United States Patent Application Publication US 2008/0114160 A1 - sequence listing, part 34

SEQ ID NO: 8974 - DNA, 189262 bp, Oryza sativa
gcccgccgccgccgccgcccaacgtcgtcgtcgtcgtctccatggcttgctctgactttggtcgcgctcgctcggctcgcccgctcgcgtttgtgatgcgtttgctgcctgcgagcggccgcgggtgcgtggtttttaagcgtgcatgggagtgtgaggaggtgggcgatgggtgggccgtagcgcgtgtgcgcgcgcgcgggcggcagggggaggcgtagctagcgtggggatcgtgtcgcgttgcggtcaaggggagcgtacgtttcgacgttttcgtgaggacgggaggagtcgcgtgccgcccctgtgccgtgcgccgcgtagatcaccacggcgagtggcgtgatccatccatgcgtgcatgcatcgtcgtcggtactccaatcgatggatcaagggcgtacgtgcccattgtgaagtgaaatgaaaagcaatttttcactcgtgaaaagggccttttccttcgtgtacgcgttttttttgcccagctggccgcatcgatcggaaaaaggagagagtaaagtgtgcgtgcgtgctgttcgacgtgggctctgaaaacaatgggggaagaggaaggaaaggaggctgcggagcggagcgcatgcaatgcacgcagctagcgcgcggccgcacagtgaatgcgtgccaacttgcctttccagaagagaagtagagtagcctagtcgatctagtgtaggaggcgcaagccgtacgaagcatctcctctcctcgtagtcgtcctcgggaatgatgggaattatttgctcgtggcaacagatttttcgttttacgggcgagatctcgtgtgtttagcccctttcggtagaggactagctagcatccatcgcgtcgctctattcatcgcgtacgtacatgtagcctctgcacgtactatgcgctgtactctgcgtccccgtataggctacttttgcaatgtccaagttagatcgatcagattcaatgcatgcacgagtttgggagtgaattgaagcttgcttgactgcttgaggccaaagtagatcgagttgttacatcgcattgcatgctttgactactacgcgatcagatcagagtgccttcaggataaacggatcaagcattttttttgttgggaaatgctcgtatcgtggttttgcgcccaaacttcagtctattgtcacagaaaatgttcgccgcggttctaaagacatcaatgcaggagattcatatcgatctcgcgcattccgttctgtgaaagcttaattcagtatacatcggtgtaaagcaattggttgcaggcttgcagcatgctgcatgcagctgaaatttttcgagttactggttgccgcatgcgtgcccgaacaaggatctctgaaatgataaatcaggtttattttgcaataacaaaagatcaaaccagcaagatacttcctccatctaaatataagtgcaactttagtacagatatgatataaggtgtatttaattctttgggtgtaaagtttttgaagtatacggacgcacatttgaaatattaaacgtagactaataacaaaacaaattacagagtccgcctataaactgcgagacgaatttattaagcctaattaatccgtcattagcaaatgtttactgtagcatcacattgtcaaatcatgacataattaggctcaaaagattcgtctcgcaatttacatataaactgtgcaattgttttttccccacatttaatgttccatacatgtatcaaacatttgatgtgacctttttgaccaaatttttttgagatctaaacaaggccatactccaatctaggaatacaaatctgaaaagtaaggcccgtttagttcgcgaaatgaaaatttttgggtgtcacatcgaacgtttgaccagatgtcggaaggggttttcggacacgaatgaaaaaactaatttcataactcgcatagaaaccgcgagacgaatcttttgagcataattaatccgtcattagcacatgtgggttactgtagcacttatggttaatcatagactaattaggctcaaaagattcgtctcgcaatttctcccctaactatgcaattagtttttatttttatctatatttaatgtttcatgcatgtattcaaagattcgatgttatgtttttgaaaaaaactttctggaaactaaacagggtctaagaagtatgctgtgtgcatgcaaacggaaagttttaaagacaactttactgcttgtctacatgttgtgtgcatggtaatcagctatcacgagctcacaaacaatgaagaggagagagaggccgggacctgaatgatcaatattgggacagagggacgccggccatggcttttactccctcaactggagacggcagctaggctgccataggtagggattgaaatggcgaggcacattgggaaatggagatagaggctgaggctgataccaaagcaggctagtgtagggcgatagatgagacgacgaacactgtatgcatgcatgcatgcgttgtgtttgggacatgcatgcaacgcacggcaatgggagagggcagaccggacggttcaggagtcggattttgagattatcgcttcccgtttccccgtaacgtgatgtgagagaagccgagacgctgcacgcctgcgtcgcattactcctcacgagctaagctagagactagagaggcagggacgaagggagaggcagacgagagggggaggaggagagaacggatcggagacgctgcaaattggcgcttgctggtgctgcgcgcattgggaaatgccatgcgtagctagaggctaaccacgcgcgactcgcctcacccaatcgggctccggtgagcagtggcagcgtgagcgtcgtcgtcgtcgggtgtccctgactagataggacatggattgactttgatcggcgacaaatcttcaagagagatccgaatacccggaaaaccgttcgccctgatccgacttaaaaacttcgacggccggccggttgggcaaatcaaaacaccggagcaggttaaccgcgagcgagccaacgctagcgcgaaaccacaaagatccaaagcccgtgctggttagttgccgtggtgcagtgcaggcgcaggtagacgccggtggaaggcgacgcgagacatccgcgtcaaagaaatcctagaattccgggcacgtagcgcaacggtgcgtgtgccatgatcaggagattgtcaaaaaaaaaaaaaaagacaacacttgagagctgttgagcagctgctggaacagacattctgaacggataaaaataataacgggcacgagaagcatgagtacaacgaagttttctgggcccaacatatattttttccttggttgattagcaccgtgaaatagtgcatagaggatcgatcagaaaaaaacaggccagtgcaaatgtgtgcatgttgttggtatgcatgctcaacagggatgcaagtgggtaatccactacccgtataaaaactcgcttgttagtatatttttcgtatgatagtttaaaatttagaagaaaaaattaactaaaagtgagataagcgggaaaaaaagcgcgcttgcccgccccacttgcatccctaatgctcaaggattctagaggtgaaaattagggatgacaattgtgcccgtttgcccgtttatccatgggtaaaaaccctattagggttgggtttgttctccattttatacccatgggtatcttattgggtcaaaagctatgcccgatgggtaaattggcatgggaatgggtaatcactacccatgcccgctttgcccatttacccgcaaaatctaacttacatgtaggctaggagcaaaatccactagaatacataagccacgtttttattttctacggtttcccttttatttcccttattatttctctccctttactctatcgccgctagaagagagacgacaccgaggcggagaatatttgatgttttaagttcaattcgaacttagaagcttgtagactttttgttccactgcttttgttgtggcgggtaaacgggcacgcccgcgggcataagacgcccgcgggcaatgggcaaccatccttacccgtcatgtagtaattgtaggatcaaggaggccgactagaggggggtgaataggcggttttaaaacttaatggcacttaaacaaaactaacctaagttgctaggcaaggtgaggtgcaaggttaactaagcaactaagttaagttttgcaaacctaagtgatatgggctcaaatatgtctctatgaatgtaaatagcacaaatgtaaatgcaacaaataaatgagacaagagacaaggaatttttcaccgaggttcggaaactcgccggtttcctaatccccgttgaggcgagcccaactccaccgctcaaccacgaagccaccgcacgcccccttcgtcaaggggtgggcaaggcgggagccggcccacggagaggactacccaagcctcgatcacttggggtagttcttccttcactccgaaggtggtgaactccaaaccactcacaaacggtgccgggcctcctccacaatctcctcggagaggtcaccgggcaacacctccacaagctgtctaggaggcggcaacctccaagagtaacaagtctaggatgcttgccgaggatgatcaagtgccacactagctataacaatgaagcaatgcacttggattggcttaactcactctctaacacctcactagataaactaagtgcacaagggtgtgagagctcttgcaagggttcaagataatgcaatggagtgccaaaaccttacccttgttgctggggagtgggtatatatacccccaaccaccaaaactagccgttggaaccgaaatccccaactttgtgctctgccggtcagaccgccgttatgaggccggtcagaccggactactttgtaacggctagaaaactagccgttacagggcaatcattgagcccactcaacctggccggtctgaccgcagtgtaggggccggtcagaccgccgtcggctcggtctgaccagttgcggctctggcggctctgtatcgccaccaaaaaccagaccagtgcaatagactagtggggccggtcagactggccttaccacgccggtcagaccggctaacagacccggtcagaccggcctaaggcccacggtcagaccgtaggtcacttttcagctcaaccgactgttagtaaaacggtgatatctcttgactcgggtatcggaatttggcgttcttggactctatggaaagcttattcaaagggccatccaacccatgaaaaatccatccaagaaacacaacttaagtcaaggataaagggctcacactccaaaggatatccaccggacatacccacaagatgtcactcactcctattggacatgcccacttctctcttggtttaggacttgagaaaactcatcacacttggttagacaagcccacaaaatgcacctacatgcatatgaactaatatggcataagatcatccacaagctcgcttcatagacccctcttgatagtacggcgcctatctagcaaatccagtctacaccaaacaccaagaccgggaaaagactaagaaaacattcttagctacattatacctttgccttgcgccatccatcttggggtcaagcttgagccgagatcaacacttgtgaccatccggttgaaccatgtttatgccgaggtcttgtccatcctttgtcaagactttattctcattacaagcttgacttcattcttgccaacatgacgatgtccttggcttggtgaccactaacccatggtgtcattcattagcctcatcataatgggacctattccttttcacacctcaaaggagaacattagtctcaacaaatcggttgtcatccttcacttgatgaccaaccggttgcatatgaaagatatagatatgtttgttgagtattcattaacatcacaagtgtcatatactcgtatgcaagctcaagtgcaaagatccgatataaataataggtgaacaacatggatctagaacatgcacaataaatgtataggatttgctccccctaaatatatgcatacaaataaatatacaagagatgcaagtgtatgcataattagagaatgaccaatgggggtttatcctatacatatagagaaggcatatgtagtaatgatgtagactaacataaaacatataccttcatgatctccatgttctcaatgtaaatgagactaaataagataacattcgagtaaacattagtctcacacttatatatcaataacatggaaatcatatatatgaacctatcaaaaagtaggagataagaagtggtacatatcattttatctccatgcatttcatccttgtcatgattaaggtccatcacaaaagaatgcatgtcttccacatctcattatcgggaaataacctagtagacaacttatgcaaaagagaggttaatcccataaacatcggtttatcatctatcaccaaagtaacaattacacaaattgtttaatccaagatctttcaatcttttctctctttggtgatggataataacccgatataaacaatatagagagatgagatgaaaaatgatttcaaatcaagaaagaaatcttataataaacaaaatatagaataagctccccctcaagatgtgcatacatatggatatgaaggaacgcatatgcacataatcaataaagatcaaataggaagctcacactatattttggatccacaagagagaccaagttagaatgtgtgaagtttaatacatacctctcatcatttttactttcatatccaaatgagactagtcaaagaaaggctcataaaaatgttagtctcatataattaaatttgtcattaatcaccgaaacagaattaaggcacttgaacttatagtaatgggtatacccacgggcacaaataatctcacgggcatgggtatgggtaggaactacccgtgcccgtcgcgcccgattgccatccctagtgaaaattctttattttgaaacacttgaaccggtgtaccgtccatcctctcccaccttcgtgtgacctctcgccatgtccacaatggcttcaccgacgaccctatttggcgattaaccctcaaggcctcgaatacgaaggagccatcgtggaggtgctgtatgggacaaatagggtctgtttgggagagcttattctgaaaagtagcaagtgagaatctagagaaattgagaaactcatttctggattctacaactgtagattctcataatctaaatgaaaaactgaactgtatggaggagctcgcagctagagattatagaagaaactgcagttgtcagaaactcccctaacagacccataagctatattgggaacaatgtgggcaaggaggatgtgggggttgagcttaacacgggcatgtagtgacggcgtgatccacgatgggatgaccaggggacggcggctagatctagttgtctcaaagtagattcagtccctccattctgggatccttccgtcatctcttgagttcccaacaccgttagagcaggtacaataacactattgaccttgctcttaggacagctacttcgccacgctcaagggccccgagctcgacactgttaacaacagaatttggtaatatcagcgtcggaggtgaagatgggatcgaagcggagtcggagataaggattgttgcgggaacaaagtaagaatcggctggagtccagatcggctacgactagaatcggctaaatctgaatcagactgggttaggtgatacaaccgattccggcaatacgacttggtgtacaacatcgggttgagtcgatatgcttcaagatgatttccgcacatggatagagtcctgagaaggcaattatatctattaattaggatgttttacgtaatttccttagagatatgcttagggcaaaagtctgccgtaaagacttatggtatcttagagtttgttagagataatagtcgcgtctggtatggacatatcttgtaattcttgggtataaatagaccccgagccctatgtaactttaagaacacacgttcaatacaatctcggcgcatcgccacccttttttgctttagtgttatttcgacgagttcttgctttcgggttgagctgcatcggtttcgatcttcaacaagaggtaaaacttgttatgacgacttgcgttctcgggattagtgcttccatctttatgacactctaatcttgtttatgtaattcgtcgagttatcatatatcctacataatccctggcaatattgatatctaacctacaatcggctaacgtccgtcaatagaaggcagccgattaagttaaataccgatgttgacttagattatataggatatctaccactctatgacacatctaacggcttgattgtctagatattgtccttcttttcatacttatacctacatcagttaagtttgatcttatgagtcgtgattagaatctcaatctctagcctgcttctcggttgctgattagggtagcatcggagtttcagccgatcttacctgatttaactactttttatcttatatgcttgattgacatgttaaatctgccctttacgttaagatcttcctgcatttaagtatattaggctgttgtttagtatattctacttgctttaatatcttaatataaagtggtatcggagtattagccgatacatgctagatctatctgatcggctatgctatgaacgtatatagtctcattattaatatatattttgatctaagtgatttatactgtctcggcatggcgaccgatctatcccaatcacttgatttaagtatatatcgatataaagattatatattagtaatatctgcaaccgatcgagtatatttagtcccttcttatttattaatggctgccgatcgatgcatatatgacatcggctcaaagataaatgatatgtcatcggcactagccgatcggctatcatttttagatttaaccgcgatttctttgcttctacttcttgttggttacaggatcaaatcaactggcatgctagcacacccgaaggcgagctttggacctgcactggagttaagcagatctcccaggcctcgtgttttctgtcaacacgcttttggcacgcctggtgggacaactaagaagtcagccaacaatcctccctcatggccgaaaaaccaccaccaccaccatctagcccaggctctgttaaggaaaagatgctgaagttgggattgactgacgtcaatgaaggaaacgtcgtgccgatcgatccagaaaaattcacacctgagcagaagaaagagtttgaagcaatgttgcggcaagcacgggatcagttcttgaactcattcatgcagacccgcaaggggacacttgttcagaagtacaaaataaaagttgttgctgatgatcctggaaccagttcttctaaggatggagatgggaaacaagctctagacggctccgctcagccgagtatcaaaggtgctgccgatggctctctaggaaatcaaggcaacaattctcaaggggtccatggaggacaaggtgacggggtgcatggagttcaaggtgacggtgctcaggggctgcagggaggaaatcttaatagtgacgtggcacaggactttttcaataacttccaagatcaggttgattacgctgtacatcatgctttgatcaatcagtctggggtgatagtcaataccctgtcaaacatgatgaagtcaatagccgatggttcaatagctgaacatcaggctgcaggcccgatctatttgcaaggaggtgtttttccaaattatcggtctttgattaccgacgttcagtcatctactcaggcagttccctccgttacacccacaactcagccgacggcaccggcaacaactcccctacctgctacatcagctatggcgccaggccagccaatgaatcctcagctgttaatgagagagcatccatagcatagtgggcaggttgcgaatcggccaacccaagatcaggttgctgctatgtttttgccgcctcaacatgcggttgatctaatacagtagcagccgattcagcaacagccgattcagcagacaccccaaattcagcaggttgtgcaaccaatccagcaacaggtcatgcaaccagcacaaccaatccagcaacaggtcatacaaccagttcagcaaacaccaccaaggcagcagtctctgcagccgatttagcaaacgccgttgagacagcagatcgtctagccgatccagcaccaaggtttagtgagcgcatcggccgggtttgcaacgcctggtggtcagcctgtacaacaacttttaaaccaagttgtcccagaacatttggttcaccacgtacagccggatggcatagtaatgcctcaggttgttcctgagcacttgctgtgcaatatccagccggaccctcacaattaccaagggggtaacctaaattatcaatatcaacctccttccccacaagcccaatatcggccagggggattggctcaacctcagtttgcatcgcaatatggtcagttcgagcccatgcagcaacagtcacaaggcgcaactcagcaacgaccgtgggccgatgtaattgctgacgtaatgagggaacagtttgggcttaaaccaaaagagatcggaagcttgtatcggcagccttaccctgagtggtttgaaagagttcctcttcccaatcggttcaaagttctggacttctccaaattttcaggacaagatgatgtgtcgacttatgagcacattagccgattcctagctcaatgtggtgaagcatcggcggtagacgctctgaaagttaggttattccggttatctctgtctagatcggcttttacttggttttcctccttgccatatggttcgatcaacagttgggccgatttggagaagcaattccacaactatttctacagtggggttcatgagatgaagttatctgacttgacgacgattaagcagcggcatgatgaacctgtgcacgagtatattcagagattcagggagatgaggaacaaatgcttcagcttgagtttaactgatgcccagttagccgatttggcctttcacggtatgattgctccaattagggagaagttctcatctgaagactttgatagcttgtcacatctgatacagaaagtaaccctgcatgagcataggtctgcggaagttaggaagagctctaagagagttaatcatgtttgtccgtacatgtatggatgatgaggatgatcctgaaatagctgcagccgaatgggtaaggagtaaaaaggtcgtaccatgccaatgggtgaaatgttctggaaaagaggagaagtataattttgatattactaaagctgacaagatcttcgatctgctactccgagaaaagcaaattcaacttcctgctggtcatacaatcccatcggctgaggagttaggcaaaaagaggtattgcaaatggcataattctaggtctcattctactaatgattgcaaggtttttagacaacagattcaggtggccattgaggggggcaagattaggtttgatgattccaaaaagccgatgaaggtcgatggtaatccttttcctgttaatatggtgcatacagctagccaaacaaccgatagggcccgcgcaaggggttttcaggtgaattcggctaagattatcaacaaatattagaggaagtatgacaagcagcaggagaagcattatgaagaatacgatgatggttttgatcctcattggggttgtgagttctttagattctgctggaatgaaggtatgaggttgccatctattgaaaactgccctgggtgcagtgatattgtcgagagctcaagccgatcatataataggggtaatcggctgaggcagacaagagtttctattcatcaaagattgggtcctgtgaatcaagatcatggctaagaagacagtgtggtcaggaagaatcaatggtgtccttctggtactttcacaaagaatcagaagagaagggttcaaagattgaggaacagagaacgccttcaggaggttgaacaagaaattaatcatcggctgaggaaagcaaagccaaggcaggagtggcgtgttaagaatcaggttcatgtagccgatgatgttgcagccgatgaggcaaagaggttggcaaaagggaagagtgttgtgacggcactgattaacatggtctttaccttgccagccgatttcgggattgatcaagccgatgtcgacgaggtggaagaggaatcggctaagttggttctatcaccagaacaggcagtgtttgagaaacccgaggggacagagaatcggcatcttaaaccgttgtatataaatggctacgtcaatgggaggccaatgtctaaaatgatggttgatggtggggctacggtaaatttgatgccttatgctacgttcaggaagttgggtagaaatgccgaggatctcatcaagacaaacatggtgctcaaagacttcagtggtaatccatcggaaaccaaaggtgttctgaatgtggagctgacagtcggcagtaaaactattcctactacgttttttgtcatcgatgggaagggttcttacagcttgttgcttggaagggattggattcatcataattgttgcattccttcaactatgcatcaatgtttgattcaatggcaaggcgacaagatagagatcgtgccagtcgacaggtcagttaatgttgccagtgctgatttagctctttgggagatggatagccttgattgtttatctggaaaagtctgggatagagattttctaaaagtatccgattctgatatacaaccaattgaagatggagaacccaagctattattttgagggcgtcgtggggggttcagtcgtctaccctaaggatacagtagatgatctcgatgacaagcaaggtcaaggtttcatgtcggccgatgatttggaagaaatagacataggtccaggcgatcggccaaggccgacatttattagtaagaacttatctccggagtttagaaccaagctgatagaactcttaaaagagtttagagattgcttcgcttgggagtattatgagatgcctggactcagccgatcgattgttgaacatcggttacctatcaaaccaggggttaggccacaccagcaacctccgaggagatgtaaagccgatatgcttgaacctgtcaaagctgagattaaacgattgtatgatgctgattttattcgtccttgccgatacgctgaatgggtttctagcatagttccagttatcaagaagaatggcaaggtcagggtgtgcattgatttccgagatctgaataaagctacaccgaaggatgaatatccaatgccagtagccgatcagctggttgatgctgcatcagggaacaaaattttgagttttatggatgggaacgcgggatacaatcaaatctttatggctgaagaagacattcataagacagcttttgagtgtcctggtgcaatcggcttatttgaatgggttgtcatgactttcggcttgaagagtgctggagctacatatcaaagagccatgaattacatatatcatgatctaatcggctagttggttgaagtctacatcgatgatgtggttgttaagtctaaagaaataggggaccatatagccgatttgaggaaggttttcgagagaactagaaaatatgacctaaagatgaatccgacaaaatgtgcttttggtgtatcggctggccagtttttgggatttcttgtgcatgaaagggggattgaggtaactcaaaggagtgttaatgcgattaagaagattcagcctccggagaataagacagaattacaggagatgatcggcaagataaattttgttaggaggtttatttctaatttgtctggaagattagaaccttttataccattgttgagattgaaagctgatcagtaatttacttgggaggcagagcagcaaaaggctttggatgatattaaggagtatcttagctctcctcctgttttgattcctccacagaaaggaataccgtttaggttatatttatcggccggtgagaagtcaatcggctcagttttgattcaggagttggaaggaaaggaacgagtcgtattttatcttagtcgtcggctcttggatgctgaaactcggtactcccctatggagaagttatgcttgtgtctgtatttttcgtgtacaaggttgaggcattatctactatctaacgagtgtactgttatatgtaaagccgacgtagtcaaatacatgctatcggctccaatattgaaaggaatggttgaaaagtggatattttccttaaccgagtttgatcttcggtatgagtcaccgaaggcgattaagggacaatctatagccgattttattgtggaacatcgtgatgattcaatcggctcggttgaaatagtaccgtggactttattctttgatggatcggtgtgtactcatggctgtggtatcggcttagtcataatctcccctaggggggcatgtttcgagtttgcttatactattaaaccatatgcgactaataatcaagctgagtatgaggcagtgctcaaagggttgcaactactcaaggaagttgaagccgataccattgaaatcatgggggattctctgttagtaatcagtcaattggcaggagaatatgaatgcaagaatgatacattgatggtttataatgagaagtgccaagaactaatgaaagagtttcggctggttactttaaagcatgtttctcgagagcaaaatattgaagctaatgatttagctcaaggggcatcgggatataagccgatgatcaaagatgttaaagttgaaattgcagcaatgatagctgatgattggaggtatgatgtacatcgatatttgagtaatccgtctcaatcagcttctaggaaattaagatataaggcattaaagtatactctgttggatgatgaactttattaccgaacgattgatggagtattacttaagtgcttgagtgctgattaggctaaggttgcaatcggcgaagttcatgaaggaatttgtggtactcatcaatcggctcataagatgaagtggttgcttcggcgcgcagggtacttttggccgacaatgctggaagattgtttcagatattataaggggtgtcaagattgtcagaagtttggagcaattcagcaagcaccggcgtcggctatgaatcctattattaagccatggccgtttagaggatggggcattgatatgatcggtatgataaacccaccatcgagtaaaggacataagtttatattggtggtaactgattatttcaccaagtgggtggaggcgattcctttgaagaaagttgattctggggatgccattcaattcgttcaggaatatataatctaccgatttggtattcctcaaactattactactgatcagggttcaatcttcgtgtctgatgagtttgttcagtttgccgatagcatgggtatcaagttgttgaattcttcaccttattatgcacaagctaacgggcaagccgaggcatctaataaaagtttgatcaaattgattaagcggaaaatttctgattatccgcggcaatggcacactcggttggccgaagcgttgtggtcttatagtatggcttgtcatggatcgatccaagtccctccttacaaaattgtttatggacatgaggctgttttgccatgggaggttagaatcagctctcgaagaacagaattacaaaacgatttaacggccgatgagtattacaaccttatggccgatgagagggaggatctggttcagtcacgattgcgtgcccttgcaaaggttaccaaggataaggaacgtgttgctcggcactgtaataagaaagtggtacctaaagatttttcggaaggagaacttgtatggaagttgattttgccgattggtactcgtgatggtaaatttgacaagtggtcgccgaattgggaaggaccgtttcaaattataaggttgtatctaaaggagcgtatatgttgcaagggcttgatggtgaagtctatgagcgagcgctcaatggcaagtatttgaagaaatattacccaagtgtttgggttaacgcataatcggctagtattgccgatgcatgacagccgatgtgtttccatcgccttgagatggccgatatggttatatcacccttagttgtttttttttcctggtgtaatcggttgtggtttgccgatgtacaatggccgatatggttatatcgcccttagttgttttttcatggtataatcgattgtggtttctataattttatcaatgcttttgacattgtaaaattagggggcacatatgtatcaaaatgaaatttttttgagcaaatttcgaagtcatattaatcggcacaaaggattgtcaagacagtaaagtactagagcatcttagccgattacaaagatttctaagtcctattacataaaagttattgagacaagtattgctggatagccgaaatagctttttgcctaatttgttcaacttcctcaatagcttgggcaccttgagcatcagttccaggaatgatcttcaaagacttagtcagatcagcaacattcttgatagccgatttaagtcttgctttttgttcttcgacagaccgcgggagatcggctagtttcttgtgctccagatctaattcggcattgcattcctgaagttgtgccaggagctcaatcttgcgagcctcgagccgatcaatgttggatttgatcggaccttctgaaagctgatcaagtttggattttttcctcatgcacaagttgccgattagcttggattgtagcttcaatgtctttacgttctcgccgttcggtcagtcttaacttggctttctccaatttgaattgatgttgctcaagataaacggctggagtaaggatatcgactaactcatctgggatcagagcttgaatttcatgtagctgagtcctaattgaggcgcaatcaactaccaagctatctagtgatgatgcctctagccgatgagaaatattttccagagttttcttcacgtcatcggataaaggggctaaggctttgcttatggtgtcttcttctccttcatcaagataatctttgatgtcaaaagaaaaaagatcggctaagacctgcagcgacgatttaaagagagttaggggtcaaataggcatagccgatctgaatgttttttgtcaaaagaaaacctactgggatagtaggaacagttggttgaatttcttcttctatatggtgacttcctacagctgatggagtctggtcacttgttgattgctgtacagaaggagaaggaggaggaggaggcttaaaaagaaacaagtgttaggcaaaatcggctgagagttaattaatggaaaattgaggttatcttactggtggagctggtttagatgttgtcgcagccaatttctttttcacagcagtcttctttttctgcaattattaaatctttaagtaatcggtcataagatacaatgattataaaagggattaaagggagctatttactcttgaaaagtggactggagcagaaggagttggaggggtttgtttgggtgaagccgatggtgttcgttctgtatcgcttacttcggctgcggcctcgtcaatgtcatcttcaataatttcttcatccagagcttgttcaatggatggatctagagcagatagatcatcagctggtgtggtcttctttgtcttagtcttcttctttggagctggggctgaaatatttatagccgatgatctggtctttcttttcttgcgggcatcagctggttctctgataagcccttggagaagagctgaagacttgggggcattatagccgatgacggggggagatggcccacctccgttggggatcagtcctggggcatactcgatatccctgccgctgttgctttggtgatggggagaagattctgttgtctgtaaatcaggaggaaagttagctaagggctaatcaaccaagtagttattcaaataaaatcaagtgagttaggacttacttgagggacaatatctggaaagagatctatcatatacttggaagccgattgatggaataagtgtagcttccattcaccccaccatctgtcaaataatttgctcctaaaggttgccagctttatggtgtcaatgctgcctagaggaggtccttggagattgagcagccgatccatcattaaagatgatgagatttctcctcggcattggatcttatcggcaaagaataagccaattgggagttggcccattccaaattgtctggcagaactcattggatgataaaactcgtaggaaacttggatggttctcccttgatgaatgccgactggaaggatgcatggggtgattgcagataagaagatttctctgggcttctgatatctgtcattgttgatgtcttcgaatttgaagtcccatggattttctagaagtgttgagtctccatagagaaaccaaactcgagcatccttttggaacccctcataaaagctacaaaaccaatctttgagcagctcggccgatagctttgctcctgcatcagttggggtagaggcgtactctccatatgatgtgcatctccgatgagtgagttcctctccgtcatcgttaacagtcggctctaatcttgggaattcagtttctgttacagatggccgatcgacgaacctcatgactaccaagtttagccaggattgcagcagccaccatggtccacccgctccgactactgagccgacaattagcttagccgatgcattatttagcatttggtacaagtagccgaggaggattttgcctaaaggaaattgtctttttgtctccaaggcttcggctacgaactgccaattggttgtaggaccgcagctagacccacaaaagagaaacttttctaaccacattaataggaaagccacatgttctcgaggggtaactggaccctggcctatatatgctgctacatagcctgaccagccgcctatgctcttggtcttgaagtcatattggttctttgtattcaaactcatagggttggccgatgaggtgacatccagacccgtgatcatgctgatatctatgagagttgggatcatcggcccttgattaaacgaaaaggcattgatggtgtttgaccagaagtaagaagcagctgccatcaggggttcatctttggccgagtttgctatagtgaggtcaagtgcttggccgattccaatttcgtcccagtgaacccttttgcttgctgacacacgtttgaaccatgtggtccaacttttctcgggtggaactttctctagagatggccaagatttaaaggtgttattccaatgacctagatctgggttggttagtctgaagggaatcctattggtttcaccaatgataaactcagtgggatcaggattgccgactgggccgagaaagtagtagttttcgtgtgataagcttggaatcgcgattcagttagagagatgctacaaatccaagacaaccgagagaaagagagcgatataagataggagaaaatcgatctgctgctaagaaaggggatctagccagtggagacttacctcagcatactcggccgatggcacatcagatggattggtggaagacgacatcgctgcaggcggaggtctcgctggagatgaagtcacccgggagtcgcttttgcgtcggaggaatcgccggagagagagagaggataaagtttcgcttgagcggtgaaaacagaagtcacggtgtgagatttctcgagggtgacggttagtatttcaagcacggcaataacggtcggaaaacagcaaagtgcgaaacttgctcgaagtcagtacacggcaaatccggaacattaccaaatatcccggacttggggggcatgtgttaacaaccgaatttggtaatatcagcgtcggaggtgaagatgggatcgaagcggagttggagataaggattgttgcgggaacagagtaagaatcggctggagtccagatcagctacgactagaatcggctaaatctgaatcagactgggttacgtgatacaaccaattccggcaatacgacttggtgtacaacatcgggttgagtcgatatgcttcaagatgattgccgcacatggatagagttctgagaaggcaattgtatctattaattaggatgttttacgtaatttccttagagatatgcttagggcaaaagtctgccgcaaagaacgtatatgctataaacgtatatagtttcattattaatatatatttcgatctaagtgatttatactgtctcggcatggcgaccgatctatcccaatcacttgatttaagtatatatcgatataaagattatatattggtaatatatgcagccgatcgagtatatttagtcccttcttatttattaatggttgccgattgatgtatatatgacatcggctcaaagataaatgatatgtcatcggcacctagccgatcggctatcatttatagatttaaccgcgatttctttgcttctacttcttgttggttacaggatcaaatcaactggcacgctagcacacccgaaggcgagctttggacctgcactggagttaagcagatctcccaggcctcgtgttttctgtcaacagacaccctccgaatgcctgcatgtcgtcgtgcgcgccgcattctgtgctgtccacccacgcccaccgcccgtcctcgccatgcacgcagcatgtgcgagagagaggaagaggggaagtggagtatgatgactggattgccacgcgtgcgccacgttggacaaaaccaatcttaatttggtctagggggttaatttgtccggtatggaaagttcaggatagggtttagggggctatcaaattttagttatttctaaattatatttctatacaaactctatactccacttccaatgttctttattttttaattatgaattttcattatttataagttttactcctatatttcttattttaaattcaaaacttcagttatttctaaattatactcctatatgaactctagacacttcttttaatattgcttattttttttaatttgtgaattttcattatttctaattgtatttctatatgcactctaaactcatcattcgatattatttatttttaatttatgaattacagttacttctaaattgtatttttatggactctagactattgttccaataattttcataatttctaattttagttatttgtaaattgtatttctatatttactctaaactcaacttttaattttattgtttttattttgaattttaattaattctagattcctatatggactatatactcttattctaatattcattattttaattcctaatttctattaagtctaaataggctataaacttacctttcaatatttctttttttatactccttccatccacaaaagttacacctattacttttgtcgccaagaccaaggaaaaattgaatcatcttgaatgttacaaaatcaatgagtgaatgcaagcatgcaactaatgagtatttagatgactccttggattgtactccctctggttctatattaattgacgttttggacaaggttgaggttaaacttttataactttgaccatctataactttaaaaatattaagtttaaagaaactagaaaaacatatatagatttgtctttcaaaacactataataaaagtaaacatgcatttatttattttatatattataatagagaaataaggtcaaagatatatcttgtagagcgtatcattatccaaagcgtcaatcaaaataaaaccagagggagtaatcaaacatttaatttatctcctcaatcatcttgaatgttacaaaattaaggagtgaatgcaagcatgcaaccaatgagtatgtagatgactccttggattgtaatcaaacatttaatttatctcctcatttaagtctttttttttataattacacagtacaacgcatacactcacaacgcacgcgcacacagccttatgaaggcacgcacgcaaaccctacccctatgagcatcttcgaagactaagccggcaaatccttgagattgatgaagtcaaacgcacgctcattcacacctatgaacgcacgcacgcaaaccctacccctatgagcatcctcgaagactaggccggcaaatccttaagattgacgaaatcatcacaggcgcctcgctaccacttaaagcacaacactgttaaatcgtagaaaattcgcttccatggagagtcgaacccaggacctcagatgctactgagactcttgtaactactataggctacaggcattttcgctcctcattaagtattgaatgcaaaaagactacaaaacttatttggaaaaactcaaatgtaaaatatgtctaacttttatggatggggggagtaattccgaatttcaattatttttaaattgtatttctatatggactctatattcttcttccaatatttattattttttaatttcaaattttcattatttctaaattgtatttttatatggactctaacctctacttttaatttttcttatttttttaattccaaatttccattagttatattgtatacccgtataaacttcagtcttccttttctatattcattatttttaatttcaaatttcatatatttttgaattgcatttatatatagacttttttttattaatatgagaattttcagaccatagagcgaacgtggaggcttttttctattccttaaataagttaataaattctatagttttatagtcctccaattaccaaagtgggtggtaggatttgtgggaccaatgaatatacaaagcttattgtgcatcaaccactcgatgagatgagagagagaataatatgtttgtaaacatcagcgcccgatattttggcaagagcattattttggatattcctaaaatatctgtaggatttatggaagccagttcatgtgttctgaatggccatatagaaatttgttcttagtattttctacaaaaagtatcgtcgtccgattatattcccttcaagacccttaaagaaaaaaaaaagcatgagaccacacctcgcgaacgtctgttttaaaatcttccagggttccaacgtaaaccaatgcacatgacacattgacaccatattcttgcattttcccaatcccattttggataatccaaatctaatgcacatgacaccatatttcttacattttcctaatctcattttggataatcctgtgtttcagaggattagcatccacaaatttttggttaatcgttgggccatttcgccattggaaaccaaatagctcccaatcttacagcccaatagaccgttacgatcacgtcaggacacaataggcaagaacagtttcaaggacaaaactccacagaatcaagggcaatagaaccctgagaaattgtgacaaaaccgatgtatcgaaacatgtgccaaaatttcaatgctcctcaatagcattgcaatgttctcaacggcaatacagcacctcgatctagagcttactataggtccatataaatgaattacaataaggattgcaaaaagatcttcaacttgaaacttctatttcttcttgtcagtagtaccagcagacctgcacaacaagagaagggatttagtttgcaaattctctttgtcaaaggtaagaattggccagaaaatgaaaaatgaaacaaaacttacatacaactgaggtaccaaaacaacggagaaaatcatttgtactgctttgaattataaagctataataaataacagaacagaagtatagggacacaagttgggcggacaagcgggattattttatttttcccggttatcccacttatagttcactttttcttccaaaatttgtgctaccatgtgggaaatgaactagcaagaaggtatttatgcaaatagtggtattgtccacttgcacccctacatagctacagaaaaaggaccaagttaatttagagacaagtccaatatttgcagaatgcctcttatatacttgggagtacttacacaaataaatctcacaacaatgttaccgataaagtgctactccctccggttccataattcttgacgttttggacagagtgtagtcaaacttttataactttaactatcaactttaaaagtatttagtttaaaagaattagaatagcatatatggattcatctttcaaagttctataataaaagtaaacatgcatttatttattttgtatattataatagaaaaacaaggtcaaagatatattttgaataccgtgtcattgttcaaaaagtcaaaaattatgaaaccagagggagtagaacccattctacaatacgcacggaaaaaaaatagcaactaaaaaacagagaacatcaacaatgaaattgcagaatgcagtagtaaagacacacacctcatcttcctgatgacacccgccatctcctctctcttcttctttgctctcttgtgggtaccgagctttctcttagcgaccttcagtgcacgcttgtcctttccaaccttcagaagctcagtgattcgtttctcatatggagcaaatcccacaacctccctaatcaagcccctgacaaaattcactctcttggtacttttctgcaataagacaagaaaacatattaatgaaagaatataaataggaagcagctatggtgtatggccgtattcatcaggaagacagcaaaagaaatctctggtcatagactcgagaagcagctatggtggagattgtagttctcctcagtaaagtgaatttttttttcacgtcataggctcaagagatcacaagatcaactaatggtaattcagaattttctatttgacatgaggtgacaaagcatcacttcatcgttcatttgtcatttcaaaatattgaagctgtggaagttaaaaaatagattttaacagaacatcatttttatttgcttttatagctttgctcagaaaggtaaaccaaagatccacacaactgcacaagcaaaaaacattcaatttttgtttacattgcacagaaaccgaatctacattactggataataaaaaacaaaaaacattaaaatatttagaacaagacaaaacagaggtaaatttagtgagatattttagaaacaaaatcatgaggtgattaagcttccacgttagactcaccaaataaatatatgcctccaggactagcaattttggagttgtgttttctccaaattgccaaaggtgagacgaggcacaaagacatcagtgtgcatacacatctaagccattcaaatgcaattttgatgtacagaaaacgataacccattgctgatacttgccattaacacgccaccatttcaggcaaataaattaataaattaaacacaccattcttagtccattataatcaaattgccaggaaggtgattaagcaagcacaagccaccacgcacttactcatgtccaatggtaatttagacaaccatataattttatgccgacataatatataatttaacaaaaaaacagcagtcgctgctccgatgtctagtacgacgaaacgaaattagctagcaaatacagtaactgtaccatatagatctaatcaaacagatgacatgcccatgttgctacgatacgagatgagcaaggatagagaagggaggaaacaaattacccccttgcggtcggacgggcgaggtggcagctcgcgcttggtgacgacgtggcccttgttgatgccgacgaagagccccgacttgggctgcggcggcgccatggcggatctcctcctcgctcctcggacctgcggcgaaggcgacggaacaaaccaaaatcgatcaacaaacagagaatcgaagcggagaggggcgcgagagatctcgagtaaggaagcgctcgtgtgtgtgagagagaggcggcgctcggaggctgcgtaccttggatcggcgacagctacaaaaccctaagccgccggctgcgtccgaggagaaaccctaagcgatggagaggatgttgttatatacacgtcgggtactagggtcacagcccagatcgattcgtaggaggaattaatgggccggcctagtttgccttcctgggcaatgactatgggcttgcttcacttatccatttcgctttttagctcgcgtttcgttgttatctcgagaggctgtaagccttgaaatgtaaaattcttgtacatgaaatctttcgtctgctcgcttttcacttaatgccatcatgtagcagcaaagaagattagtactccccttgttttttgtcgaaatattctttttcctataaccttcaccaatcgctataggcttttgtaccaaattttgatagcgttggtttagtttgatgtttttccaaaatttagtagcatttttatgagggaatcttcggaactaccaaatgttggtaggatggtgttgttaaggtagtgtttagtttttttcccaattaaaatttggtaacactaaaatttggttatgttgaaagtagcggtaaagtggcacatgccctgtatgtcaaagaagagcgtttttttctttttagagatgcaagcccttatacataggtacattcaccctttagcctttgtaaaggcgaatccgaacaccttatcctctatggatacgtttaaaaattggtgtatattttgaggcgaacgaaagtcaccataaacgtcgtcatctatctatctatctatctatctattatctatctatctattatatactaaaagtccataaaacttcctacagacgttctcaagccaccacgtggcgctctaataaaatagagaaaatcctagaaattctaagaaaaaagcaaaacatctatcccttgattttaaattaaattggcggggtccaatattacacaccgttagataaaattgatcttaaaacaaactaaatactatgggtcccacctatcctcctcccgcacattggcaggtggattatatacgtgcgtactgtacatacgattcctccccttttttttcctttttttcttcttttttcaatttatatatataatggatatattttttaaataataataattttacaaacaaagaatctaccatcatataatttaaaccggtgtactctttactttgtactattattttcaaataatgcactattttaaaataaattttacacaattatatcgtgtacctatcaaataaacaatatctatattaacaaatttatacgtgcacttaaactgatggccctattatataaattatcggatctactttttacattggtctattattctcaggtaatgcactgtttcaaaataaggtctactattattaactaattaactaatttaaattctatattaactaatttacacttacactagaactggtggacatattattataatcattggatctattgtttgctaataaataaagcgtccgaaattctctttttgcatgctgcacagcgcacgtctgcaccttggcctttcgcacgtgtgacaaagcgtagtgtctgagacatctaaggtgatcacaaccgctctagcactaccgctttgccacatatcaaatcataaatcatatatgaagatgattaattttgttaataacatgaaaagaaaattaaaggtgatgcaacgagagaataattaagcaccatgggttgtgtttttctcaacactaattagctctgtttaagttgaaaccgagagttgattacataataattataatgtatttgtgttatgtcgtatttggattttgtactatttatctgtacaggtgaaatgaatcattatgttataaatgcgagtacaatattgacgaatatcaatagaactcttagtacgacaagggtgataataggagcttaaggccctctctttttttcccgattccatattttggatttttttttgcacgctttccaagtttctaaatggtgtcttctttaaacaacattctaactttttagaagtcaattcattcgtttataccctcaaatagctatcacataaattatataattcatcaatttcagctatcctaaaccttaagtactacatatttttttcatgcgagtcatggtgatcagtaaattggtgatcaacgaatcatcgaagttgtaagatgaatatgtaagagttactctgaacaattgtaaataggtgttaaaattaattgctattaatcagacatttaatggcttgctagccacaaaattaatttctctctacatatatataaacatagacgaagttggaataaatattaccatacgtcccatacatatatattgcgcagttaatattctaattagtcatttaaaattccttaaaatgctctcaagctgccacgttgtgctctaataaattagggcaaatattagaaattctaagaaaaaaataaagtatccgttacttgattttcacttaaatcggtaggtccaatattataaaccgttagattaaattgatcttagaacaaactaaatactacgaggtcccacctcagcataggtatgcacctacgtgcatgggtacgtacgcctcccctcccttttttatttttctctttcttctttttttcccatgcatatgcttccctccttttattaccatatcatgcgtctttatgagacgatttaatcaaaagaattttgagtatcatgcactcatatttttcatttgtggccatactacacgtatgtatatatagatggactgtatgataattaactagcaatatttttttatttactcgagaaaaaaaacatgattcaaaagttataagtacttaatccatctcctattcaaaagtttatgaatggttttctaaaataccttaagaaaaatagaacccttaatttattataaaataacatcatccaaactttagtttgccctaaatttatgaggcaaaatttctgaacaaacaataatcttacctttcaaaaatatgcccgcgcatacgcgcgggccaccatcctagttcactaaaaaagtaattagctgtaaacataaacacccgtcccaaattagagactaaccagccgagtaaatcgctttccatcaaccggtttcggattgacagcgtcgtataggttacacaatgctgaaaggattcctttcaatggcgcacacgattcaatgccacttaaatcaccgcgtgtggtaagaagaggggaaaaaacgcaaattgatcggttaaccttcgcaagctgttttcgtctcctcgttgggatgacgcgttgctcttccatccatgtacgctcgaatcaacaaaaactgataaagaacttgtctatttttttatcggcaaatgttttactcggcaaagacaaacgtagcagagatcaatgtgaagaatcatgaaagattcgacaatgacccgggttctctggaaaatgagaagaatcgaaatgcaacgcgaaaccgatcaaactcgagcatctctagccatggttccccatgagaatatgagatcataagctacaacgagctgctgcttgctctcctctccatctcgaggaattgcccgagcgacggcgcggcgcggccgttctccaggtggctccggaggcagagcgacagcagcagcgccctgaccttgccgctcttgctcgtcgccctcgcgctccggcgccgccggctacggctctccatggcgtccaccaggccgatcaggctcgccagcgtcatcccgccgccggcgccgccgcctccacggcgggacaatgaccatgccgactgcgacaaaaaacatacttatatataaacgtacgttacgatcagatccagatgtaatctgcctgcactactgttccattgccgcattgcgaatttgcgatacagattatgttcgaactgacctctgtgtcgaaatcacaagaagtgaaggaagacgaagcgcagtgagacgaagtgaaggccgtgctgaaggaggccgagccagaaagatccacgcttctcgtcactccagctcttgcattcatggcgcccagtccaagaggccacccatcctgcaccatctccccaaacaaaccacaagcttgccatgatcaattggtgcgctaaaacagactgagaaaaagcatgtgagattagagctacaattaggcgaaattaagattggcgcacctcatgggccatgatctctcagagccgagcttgccgatcccacgggggacaagagcactaccagagtctagaaagcaggggtaactgactgatgaggagtggacaggcgtgaaggcttatatggtggagtcgaaagcgggcaacacgtgaaaaagccaagcatttgtcagtaaaattatctgacaaacctgcttgttttgcctcgagggttggaaagttgcaggcggataaacaaagtgcctaattgccaacactactacatggattagattcagccttggttagcatcaccatcacgagctcatgagatgtcgtcagtgctgctgctgctgcgtgagctcttgtgcgcgcattttacaagcccattgtggccaaagcacagatcgggaggaggctgcttacagtaagataatggaggaaaagccttgaaagacggtgcgaatcgttggcggtgtatgcggacaaatgtgcgcccgagaccgcggaaagctcgctagctccgccgctgcacgcctgcagcgcatcccgcgcatcctccgttctccctcggtccctcgagtttttcagttaccgggggacttcagtagagttaattgggatcactttccgggctgactgcattgttggttgggcttccggcgaaattctctactccgtcacgggcctaatgtctggcccagatcgttttcgacggggaaaaagtacaccgaaggtccctcaacttgtcatcgggatacaaaatcgtcccccaactgtaaaaccagatatccgacatcccttaactatacaaaaccagtcacaatatgtctctcggcggtttttatcccggttttatcctacgtgactgctgtctcagcgtgggacccacgtgggccccacatgtcagcctcttaatatttctctctcttgccctttccactctcctttccacgggcgaccggcgtgcgcgcttgcgcgggacggagaggctgggcacggcgcggccggcggcggcggcaggggaggagctgggcgcgagggcggtcgctggggagccgcgctatcctcgcctcctgcgcgcacacgccgcacacacgcgctccgcggcgtgcgcctcgccgcgcccccgccgcctaccgcgcgtttggcgcgctcgcggctgccactggcgagcaaggcgaagtggccaggctcggctactgactacagatttccaaggagagagtacactctcatgctagctttgcttaaattaggccttgccatggtggtgatgtggttaattagctggctgagcaagctaacctcttcgagcatggggtaaatgtaaatcttgcccttgagccgctgcagctcgcccccgtccatggactggatctgcgtcggcgcggtccacgacgacgagcctccgccaccgacggcgtcttcttgcgcctgcttgggtgccttgcttgccgacgatgggctggtggtgctcttcatggggaggctgcagaactcctgcaagagctgctgcgtcgggaggaggaacctttagccgcggagatgccacgcgccttgctgcagctgccatgtcgacgccgcgcccgccgccggcgacggctggtggtggtggttgtgctgctacatcagcagcgacatcgccgcctccggcctgtgaagcgagagggacagcggcgcttggctctgcggtgttggtggtggtaagctcgccgagcccgccgaagtggaccgtcggcagtcgcgcctccatcatcgacgccgccgccgccgagcgcgcccacacccttactttgctcgtgcgcgtgcgccaccgtcgctggcatgagccccctcacccatctttggccgccgcagagcttcaccgggctaccgccgtgcttccccactgcggccgctgccgtcggccgccatcgcggcgccgccctcctcctctcccgcctcgccccggcggcctcctccccaatccccagccgccggccggcttgcgatttgcgaagagaaaggaagagaagagaagagaagaggaggaggaagggagagagatgacgtggcatcctggtggggcccacgtgggtcccacgctgagtcagcagccacataggacaaaatcgggatcaaaatcaccgaggcactattgtgaccggttttgtatagttaagagatcatcggtatctggttttgcggttggggacgattttatatcccgatgacaagttaagggaccttcggtgtactttttccttttcgacggtgagcatatggcccgtgaaaattctggcaggctaccatgagggagttgccgcgtgccgatggacatatcggtacggtcgtaattcgtaaagacgttaagtaaacgacattgataaggtcgttaccgttttcaccccggtgtcagtgtcatgctcacgctgtcgatggtgaggctctctcgacctgactgtcgtgcatcctgttggggcggctgctccatcacttgtcgacgctgagcacgcagtttgcaagtagcgatacgtgactcgtcacgacgaaagtgaaggctgcgattaagaggatgaggaaaaaaaatagagaagatactgtcgacgagtgatactcatgtatcggaagaatagagtattgggttacgtcggaatagggatctacgtagtacgacattaaaacagacaaaagacaaggattgtactgtttcaggccctttatcaggtaatagccctagtccagtttatatgggattgctgatgatgagaacagattacaaagcgcaaaatctaaatcgagagcgctcttgatttagtcataacgagcgacgctagccattgtccagatacgattagccattgtccagatatgtgtcttgaagaatcttactttactatagtactaattgatcaagcaagtagaaaaaatattcctaccatttatgcttcaaatataattttctcttaaactattcatccgatctacgatccgattacactgttgtgttcataacaattaaatctttacaacaagatctcacatgattatattttgataaaaaatcataaattacttttataatatatctaaattacttttagatttcactaagttaaatatataaaagtaaattcaataaagttttaaagtaattaacatatattatagaagttactttctttttttataagttacttctatagtatatgtaaattacttttaggctttattgaattacttttatatgtctaagaagtaacttagtgaaatctaaaagtaatttagatatattataaaagtaatttatattttttttcatcaaaatataatcgtgtgagttcttgttataaagatttaattgttacgaacacaacggtgtaatcggattgtagatcggatgagcagttttagagaaaattgtatttgaaatataggtggatagtgtctatcatatatgagacaaaccagctaccattagctgtgtagttacgtccattacagagagagtaaccgaacaggtgataccgacaagatcgtagtcgagggatttgacgagatctcccggcgagttggctccgtgtactccggcttcgtaaactttggtgggtgtgttggcgatgagatgcgatgcccttagcctctccctaggggtcccttttatatcgtgggataccttgactctcaagtaagacttggagattatgtaaaccgacatgatatactagagattttacccttttcgagtagtacttcggtaatcccttaactcgtagagatatctcccataatttgaggtgaatttctaacggcgtatacggaaaccaaccgtatacgtatacgtgagagtataccttattgatatattccataagtcataggacagaggttatccttatccgtaaccctgacagatacacgcgatgaactgaaccattaacccgtaatcaattgggtaatattttttaaaacttgtaacgaatttaaagtaacttttctataaaattattttcaaaaatacattgtttaacaactcagaaaaagcatatatgacgagaatttattctctctctggtccgaacgaacgtagcttacgactggacaaggtggcacgtagaaaagcccgtggaccgtgacacattttaacacagacatcgtctcaatgaaaaagttaaaaaatgtagatgaaatcctttcttttctggttctcctacttcttccacgctttcaccggtgacgcccgtcgactcaccttgggacgctaggaacaatcttgcactgtactccctccgttccaaaaaaaaaagataaatcctgggttagtgtccaatatttaactgtccgtcttatttaaaaaaaatatgaaaaaaattaaaaagacaagtcatgtataaagtattaatcatgttttaatcatctagcaacaataaaaatactaattataaaaaaatttcgtaaaagacggatagttaaacgttgcacacaaatttagggttagtctttttttttttaagtaagtctaacaaaagcgggtcaaatcccttccaacctccacctgccaaacgtcgtaggagtatggctccagaacacttccgtagaaaaaccgagaaaagaaatcaaagtcatcgttctcgaaagcgactactactgccactaccactaccactaccactaccaccaccacaccgcttgtccctgacgtcgctgggcgatcgatcgtgcgatatggagtgtactcctatacgcttcggggcacaggcgcacagcgcgaatgtgcgtcgcacagagaattccagcacggccaccacctgccccccatctgggccgtcctcgccacggcgcgcacgccacgcgtacgtaggccggaccacgtgacctcagccgcgacgcaccacggcggccacccctctagctagtactagcgcctgcgctgccctggctgcgccacgggatgcgggtttcaaaattcaaaactcgcccacccgtctaatagtaccaaacaccagttgacaatcttgtcgcctcgctgcactaggccactagcacagcgtagcgtcgtcccgtccacttttgaacgcttcaaaggggtgatgacaaagagatcgaccggggcgcgcacttctttcccctccaaataagctcgtccagtccaagcacacaagccattccaccgctcgccgtcgctgtctcccatcccatcccatgcatcactagcggatttgtggagtggttgcgccccctgcgagcgagctctgttcgtaccgcgcgctccggtgcggagtggttgctggccggcgaggcgggcggacggacgcgtcgatgcgcgtggcagtagctgcgtgcgggtgacgaagcaggggcacttgctatatccgtcgcctcttggcggatgtgcgggattctgcgcgcagtacgcggcggccatggacgcgtcctcgcccttcagcttccacgagctcaggcggcaggcctcgtcctacctcaccgacaagatccgctccgcgcggctcgcgctcaccgatgttaccccgacgcagctgtgagtggctccttcctcgatcgatccttcccccgtcttgttgttcggatagatgtcaccgatccgttgttccatcgtgttcttgatgctgaggtttttgttggtatggtccaggatgacggaggaggcgacgagcggggacgcatcgccgccgaacgtgaagacgatgagcctcatcgcgcggcaggcgttcgagatcgacgagtacgtcaggatctccgacatcctccacaagaggtgagcgatggacgtgcctagcttgcctctcttaacgaagccacccacacgcacgctgcgtttgtgatctgctcgtttgttggctgatcgattgattcgggggcgggaaatcttacaggttcgcgaggttcgacaggcggcagtggcgtgaggcgtacaaggccctcctcctcctcgagcacctcctgacgcacggcccccgtagcgtcgcgttggagttccagagggatcgggaggtcatcgagcagatggtctccttccagcacatcgacgagaaagggtccgtttcaattcttcgtcccgactcgatcatatcttctcctgatgttctctcgcccttctttctcatcaccgatggtttcttcttgaatccgagttgcagtttcaactgggggatgacggtgaagagcaagtcggagcgcgtgctgaggctgctggagcggggccccttcctggaggatgagcgtgagcgtgcgcgcaagatagcgcacgagatcaagggattcggcagcttcaacctcagcagcgcgcatgcgtcggggtcggcggcggcagccctccgcgcgggggcgatggagcaccagtgctacggccggagcaactcgcggtacgagggcaggtggaggagggaggcctgcgtggacgacggcgacaaggagaacctgctggtggtgtcgatggccgaggcgaaggccgaggcggcggcggaggagccgcaccactaccaccacccgttctacggcttcgggcagcagcggccggaggcgatgctgctcctgagccagtagtgatcgtttgggtggatggttcttcgtcgatcgcatcgttcgttggtttgtgatgcgtgagaaaaaatcctgtaaagtcagtggcttgctggcatcctctttgtgatgacccttttgtaatcgtcgtccttaatttcagttctgatttctgaaactctaaaaatgcctgattccctgagctcataaacacacgaagaaaggaaattttgagaagttggaagcttcaagctggcaattgcaggcaaatacacctgacatgaatccggacaggtacaaggatcgtgaaaagacatgcgaatggatgaaccgatgcagtgaaattctctctgctatactccagagtccagaatgtgatatgctgaactgatcagaatcagacctaggcctggtttaggtcgtgtttgggaaaagtttgggaagaagttgatagtttggaaaaaaaaagttaggagttatatgtgcgtaggaaagttttggatgtgatgtgatgtaatggaaagttgggatttggagggaagtttggtgtccttaggctgtgtttagatcctaactttggattcaaacttccaactttttatatcacatcaacctgtcatacacacacaaattttcagtcacatcgtaccaatttcaacccaaacttctaactttggaaggaactaaacacagcctaagttcccaactttttcttcaaacttctaactttttcatcacatcaaaacttttctactcacacaaacttccaacttttccgtcacatcgtttcatttttaaccaaactttcaatttgtaaaatcaatgtgtgttttgattcttattctgtgataaacaattggcatatgtgattattggttttgatatttggagattatcgtcgaagtggttttggagataatcaattttcaggtgatgatcggattcactgttatttcatgtgaccggtccgaccgggcggtgtatgccggtcagaccggtggtgatcgagcggttagaccggccggcccgcggtctgaccggccgacgctgtgtcggtttcggtttcgagttgtttctttggatatccgtgattgtttcatagttatggcttctagatggatattatacgtatgtaatactgttgtttgctactaatgagtcaagttggggatagcttggtctcgaaatatggtttctttgtttgtttcatgtgtaggtgactcgatgcctcgagagagtatttgcggtgatggaccgggagtcggcttggtggtaagacgatgtccgtggtggtcagatatcatgcgggatactaaggctagagttgatgcacatgattggtgaagattccatatggcatacaatggaggtattatgtgcgtatgggatgcggagtcgaatttggaaggagtccaaatttggtacgattggttatgtaaagtttctttcttatactagagggtttcctaaggtgtttaggactcttagtatgagtttggttcgtggctttaggctgcctacctcatgtataaatagagggggagcgtgaggcttcccggtatcgcttttgagagcaattgagttgctagtttagttagggtttcgagtttagtcgaaatttttttaaggagtgctgttggtatactttgtaaacacagagagaagcaataaagttgtgcttcgatttgtgtttcaccgggttttggcagtctaaccggcgactcaccggcggcaaggcggcggtcagaccggctagggcgaggcggtcagaccggcggcgacttcacacgcggcaggcaatcttcaggcggttgaaccgagtgatcaacatcggtcagaccgacagcgcgagcgcggtcagaccggcggatcaacttcggttagaccgatctacatcgaatttaagggtaacttttatttccgctaaaagtttgggtttttgggtataccaaccattcaccccctctggttggcttagttactttgtttcgatcctacacaattttagcgtgagttaaactcacccctaagcttgctgattaatctgtgacatacgagtatcagaaaactctggttcgtgccggacagttcggcgttcgtgttccattgcattttctttggcccaagtcccactcttaattttattctaacctagtaacatcatgcaaatacttaaactcttcactaaacacatatctacagcttaccttttctctgtcacttttacatgtaaactgttcgtcattaccacttgactagttgactttaccataccatcaaatattccaacaattatcagtgtattcaacgctacatactagcactctatctggaaaaaaaaacactacagagcactctagttattacttcctatgtcccataaaaaaacgaatctagtattacatgtgacatattctagtacgatgaatctggacagatgtatatccagattcatagtactaaaatatatcacatctgatactaggttggttttttatgagacggagggagtactccagctacttgcaaatagaaaggagggcacaaaagctcgcggcagaaggcagctgcggtctataggtaacgcgtagcaagatgacatgaatagattcctccagtgcgtgcatcattcccaactactgtacatccctttttgactctgctatcatgcactgtttaatctgttatcatatcttatcctaccccacaggggcccttcgaccggcaggataggaaaaatataataatagtaaaaacgtaggaattgaagtaatatgattcttcaatcccgttggaataaaaaacacaggaaaagatgaaatgtgccctttgatagtgctataggaaaaaacacatgatttctcttccaaagaggtcagacctttttcttttttttcctgtgaaaatgaactaaaggtatgtaatccttgaatgtttcctttcatttcctatgaatcagaggcatccataggaaataatccataggattgtgaatcctacaaaaatcaaaatcctatactgatcctttgattaccgatcctttgaatcaaagagccctaattactggaaaatggcgtagagagtgtatgcctgaattatgcgatgttctgtacaagatcctaccatgggagtactagatttccctcacaagtacagaattcaaacctaaggttcaataacagacttttcatgtcatggtcaccaaaactctacagcgccacaatagcacgcgatggaacgtactggagcttagcattttacctccgacatcacaatagtgctgtgaaaaccggctatgtaaaacaccgaccctattggttaatatcgtcaatcctcacaagtgttcaatatccacacaattgtttaaaagaaatgaaatgaacgtgccacaaggattcattggtaactcacctattgaaggaaccaggcaaacttctacttccttccgaaacagctactccagtaaatggattttcctcggctggtcccatttatatcattaacaagggctaagaaagaaataggaaaaaataaatcaagcagaaatatcagttctttgaaccctcccacaaaaaataacccctaatataaagatcaccggaagcaggtcacctcatgtacagatcttgctgcagcatggcaaggccattctacttgtacattttcactttgtaaccatcatacaaaaatagacagtacaataatatgcctgcaaccatgtgaccacgaactaaattccactgttgtatcaatgaagagcctctgacatcaaacatgtcctaccaatttggatcatctgaagttgctccatgcttttgctttacctaagaattttaacatgtggcatgtctaagacatctactttcacatcttttcaagtcaatcaaattcacagtacaacaaatctcacaaaaactgtaactgctaatccaacaagaaaacagaagcaactttcagttttctctatgaacatagagttctagactactgaatcagcacattcttgacctaagaagattggaattaatggctagatagcatgttacactacagtcacctgatcttcatttcgacatttagggcatgtaaaaagagagggggaggaggctactatatccactaagaacacttatgtcagctacccttgtattattgatcaaaatttgcagattgaaagaacctcataataactatgcatatcttcttcctttttttttctttttgttgataaaagtacaggtaatcaggaattttagatgcacaatcctttgatggagtatgtataagaagttcagaactccattaagctcatttgcaggaataggttacaagaacttacagaaaagaacattgcatattcctactctaggatttaagttacagagataggttaaatgatcttacagaaaagatgaagcttcagacaaggagcatgagaacaaaaatcaaaaggtaaaaaatattaaaatagatgggcaccttccatttattcattattgctgaaattcagtctcaagactgtacccatccccccccccccaaaaaaaaaaaaactgtagcacaataggtgacaagtgcatgctgcagcgcacaacaaagaacaagatattggtgttacactgttttctacagcatatgccggtatttttctgacaagacttcagaatgtgaaattgaaaacatagatacaaatgcctcttgatttcactgtaggctatagatggacaagtccgcaacaataaactaaaccagtaatttgccactaatccaacatacctatatgcattattgctaaatcttatcttgcccaagaacctaggtgttccaaacgactcattactttgatctttcataaatatcacctcatttgttttcatgacatgaagacactcgagacatatgataaatattgaactttttttagtataaatattctccgcaatctgaacagtatatttcagataggcagggttttctattctgcattcatttcttcactcttcagtggtacagaggatacacttttactgaagtagttacaagtttaatgaatagttacaagtctatgacaaacacatcgcatccagtattaatgctgaatttccaagacgctagtttacaaagaaagcagaaaatgtgcacgtcattatttagaaagtttgacatttcaaccatggctcatctcatggatattattcagaaaagaacttgatgggtcccatggctcatgtaaagtacgcatgagctggcacatgaccaaacgggtccagaaactaatcgaataaagatgggcaacctcaataggtccactttcatggactctagtgaaactacatacaaaagtttcatgcacagtggtccctccccaaaaacccaccagccattatgaacatgaaacaccacagaatgttaggaatagccgcacatataaacggtagctaccagaggcatatacaagttacaacaactcatgtttttggtcgacatgtttggataactgacagactatttggatatgtttagacgttagactagcaatgcatgacaatagcacctagaatttcaaactctttattgggatggtttaaattccctcaaatctctaccaaacacaacaatatacaactacctaacttgcatgaaatgagcaatacctgataggtagtcacaagaatcagaacacctacctatcagtaaattcgcaacctggtatacaatgctgctaaacttcttctcttcagatcttagggctgctaaagttcatataggaagcttttggagctggggcataagctatttaatttaactgcaaaccaacttatcagatttcagttcacacgctacgaaactagccaaatgatcagcaaggagtacgtggtaggccaccctatatggttagataaaaaaagggataattgagcatatgccaccctaaatggttggtttatgtcctcaacagaaatttaacggtggaaaatcctgaccaatcagctaaagggtggacatgtgttcaatttgtcttcagggaatagtaacagcaagcgcaactagagtccgcgtcattagcaggaaagaggagtgagaatcaaaaacaggggtagacaaccaggccacctccaagctggccagctcattcctcacgcttaccacctatctatcaatctccagaaccctgactccaagacttcaggtccttgataaacaaaataccaggcaaatgcatgtcttcaaattcttctgcaccttaccttaatacaaaagacacacaaatcgattccccagtaatcctcagttcctcacaccaattccccagtaatgctagccccaattggacttcagttcaaacacaaactgacctgattagaacaactatgaacatgctgctgttcgttttggaacaagtaggtttcataggtctctctacacatgatattatttcgttaaaactaataaagaaactagacaaattgctactgcttttgcccctataaaattctctacccatcacattcccgtagtacacattctaaaatggggaaaatagtaacagaagaacaaaaattgagcaaaatgaagcgagcaatgggtaacatccggatctcataccagaggtagtagtaagagatgcagatttaggagcaccaaccgtatacaccaccaattgacagcccttgccgttgacaatgctgatgacgactcactatcagcgccaccccgcagtgctggaggtgacgacagtctcgtcggcggcgtccgcacgttctcggcagcatctggcgccatcgcgtccggcggcggcgccatgacgtcgctatcagcaccgccccgaccgaacatttccttgggcagtagaaccttcgagacggcaaacaccgcaacgggattttggtcgaacaccgtgcgggtgatcgaagcctgcacgatgccggtgtcgatggcgacggagccattgacgcgtgtgatgtttagcgtgaactggccggcctcgaagcgctcggtggcgagcgtgggctgcacggggttcacgatggactcgagggagccgagcggatagtacgagtgcagcacgtggaagcgaagcacggtggccttgcgatctgcggggagggactggaggcggtcggtggcggggaggtcggcgaaggcgtcgtcggtgggcacgaagacggtgatgccggcgccgcgctcgtctgccgtgaactcgtccgcgacgcccgatgcctccagcatggaggcagcaacgttgaacccccgcgcgtccgcgaggacgtgggtgatgttgacgccaccggccgggcggctgtcggaggccgcgacgtcgagcccggaggggacgatgaggccacccaccgcgagcacgctgaggttgtaaggcacagcggtgacggcgccgaggacagtggcgctcgaccccgggaaaggcgccggcgaccggaccacgacggtggagtttcccccgacggtgaggttgacggcgccgagatcggagggcgcgcgcccggtggtctggaacagcgtcgtcacgagcttcccggaggcggggaggcgcgcgaggtcagaaggggagaggtactcaagcaggacgtggtaccgcagcacatcggcgatgtcggcgccggaggccgccgcgaacgccgagggcgagcgcggcaggttgttgttcggcacggccagcagcgtcagcgacgaccgcgccgccagctccccggccaccgggctcgactccagaagccgcgcgaagtcggcgaagctggggaaagccgcgagcgcggccgtcacgttcaccccggccgcccgggacggcagcacggcgagaactagaagcagcaccaccccgagcgcgaggccgcctggcaccggaagggctcccgctccgccccgcatctcgccagcggggggagcaactggggtggtgggtgggggactgaggagtaagcgaggagaagaggtgcccgaggaggaaggagacggggaagaaaaatattttgcgcgtgattttggttttagattacggggatttttttgctgtcgaaatgcgatagtttacgcctttctttaaacggtggacttgttttgggtgtggaattaaatggtggcgtcgcagcgttgatgggacgatgtggactcctgctagtctactacgccagccagctctttcccactctccgctaccaggcgcttttgccaactttgtaccatgatgcacgtcgcatcacgtgtgccttggtcctattcgacagaatggtgcggattgaggcgtcattctaccaaccaaacaattaaatacggactttgctcttaaaatacttcgaatcaaaggattaactatatgaactagtccattactgtaaatttcaaaaaaaaaaaactagtccattactgtaccctcaattcaggatcaaaaatatttcgaaactaatggtcttaagattcgacattgttttggtcctgggcggtgtttactctgttgtgtgaaaatggggcacgtgaagggcgtagtgaaatggcagcggttaccttccctgggtggaaatgtagtgtgtgtattacactcaacctgaccagaacagcaagatatggccgaactttcctcaggtgaggtatcgtcttccggaccactacgatagcacggtatgttgtgacgcctgtttgagaagccttgattcattcagtaccaaaaggcacctggccaaaaatgggtaactgaaacaatgaacgggcaaaaaggcgaatctaaatccgtcagagagatttcacgagatgctcgactcaccagcttcctttcacaagttattgtcgtttaacggggatgatgcgagcggcgtacataagctacaaatggggcatgtgacccgcctcgagcccccattgacgacctgcaactgacgccggtgaatgcttgtactcgataagctgaaagcaagacggccgtggaaaacgtaccggttttcctttaccatcacattcttcatcggactgataatctctcatactggacactttggttttgaaagattgccaactgcaatttcagaaatatcctgcttctcagatggcaacatgaagaaccagaactgggaatagaatttccaacttttagctgtttgcctgtttctgactcaaactgaaattggcaaattgtacaaatgaaagaagaaggaaaacctccctcccttgatacaataatcaaaagaatagttagacaaagagctagctttcagatgaaaggatcaataaattatatcagaataagcattgttcctcttctcaaaatttgtatgacaaatttcttcctagctgagaaatgtacaagggaactactattacatcaagcggactggcactacattgtcagggtattagacctagaaacggttagacacatctattgagactcagatcggtgtattgttagccccaggattagcttagctaatatgaatctaatatatccgcaaaatccacctggggagtgtaatagatgagcaatgctgcagtagggtgcttggagaccggacagacatcacaccaccagacggcaagcaaagaatgagcacatgctatggtaccaaaaagaatcaaggtcagtcaatcaagtcaagactagtagatgctatctagcctggatggatttagagtgttctgatttgtttgagcggcacatgcagtcggggcatggaaaggtgtatatagattcatttgctcttttcatttcaatacccttggcatcgctgtgtgttctcatattcaccaactgacgtttcagtgacttccatctgcacaaatgcaactaaaattttaacaaaacgaaaatttgctagttttaacaacgaataatgcaagaacgtccaagatttccagagccagaaggtaatttaatactgagttcatgagccacagtaatagcatacccgatacgtggactatcgaagagtatggctaatcttcttttatcaggcttaattgtcttcgaatgaccaccataaatgtatctcctatgaccaagaaggaaatgaggaaaatttccaccttgggtagtcacgaaaacttcactatgaacacatactgtgtaatcgatagctgccatccttgaagagaaattctggcagatattgcattatgtcagatcatacttgaaaagcaaagaaacttttgcagacaccatttgtatataccttgaatggagcaagttcttcatctgatgccaatgtttcttttgtctgcaagagaggaaacatttcaaggagaggtgccatgttcttctctgatttatatatcctcccagaagccaaatagatcgcggtgttattgctgaaacccatcccgcgaagcattaacccaacctaagcacagaacataaatatgtaaacctatggtgcaacaatcttaagcaatggctattaattaaatcagtgtaaacttgatggaaatatttagacactagaatacacctccaaaggtgtaagtggacatttcccattcatccttattgctccaggccttattacacgtcctggcctagtaaactttcctctccaacccctctccctggctgcatccagttccttcttctccttttcacccccgtcgaagacacaacaagagaatgcaaccatatcctgcaaaagaaaaatcaattggttgacaattctcttgtctgagaaacaggggattcggaccccattattattttggacagaatcagcacccaaaggtatcatgaatagtccagaacgatttgttaacagaagaaagactaacctcttcaaaacggagatgcaccgctacatatttcccattgttttcggcacttttttctctcattcgagatactaaaatgtcagataaagttgtgatcggcttagaaaactttaaggcttcaaaattagccagacatctcaaccgttgaacagctgatggagcatcaaaggacagtcggtttgcaaaaggtgatatccttataagcctataatgtacagataaaagcaataaaatatcatatatcacagtcggtttgtgaaatttactctatcatatatcacaagtcaacattcttacattcttcagaactacaataacaaaattggctttaacctacctttcttcgatcaacttaggaagaacagcttctttgtagtatcggatagaagaccaagcctttatcttgaaattaaacacattactcaaattgtgaccaaacctctccataataaactcaggcaccttgtcaactactcggacatcatttttcaatcgttggacgaagtgttcctcatcataaatatcactaaatttgctgtatcaagaaaaagaaatgttaataacttgatttttttatgttgtaataaatcctcaaagaagcctctctcatccaaacacaaacatagaaccttgtcagtatggcagttaacatagtacagtgttgcagcatgcaaaaaaaggaacattttcatacttcactactaccatttggtatcttttttatgtgacacctttgaacaaaatcatttctcattaactcatacacatatttcataaaaaatggcataagtagagttaatgcaaacaaacttctggttgtttcaaaagaaattcaacttcgtcagagagagagggggagagagagagagagagacctaggatccctccaaatgctgtgatagtggaagtttgggatcacaagagttgcatttagaaaaccagcaaccgcaacagcattgcatatctgcaaaaaaaaaagggggggggggcgggaacaaaaaaaattgtagaaactcatgatgtgtttgtggacagaaatgataaaaatacaaaaacaaaaagggttcattgaaggtaggtaacaaccgatgccctttgctgattcaaaccaccattcgcctccacgtatatgtagccatttaattcaggcaaatctaacataaatatttaactttattagataattccatcaagacataggcgcatcatgcaaaatggtattgctgttttactaagtaactgaaaaaggagtatgcatatagcataaacaagtatggcaaatgcacataagtaaacgacttccagtaaaaaaaacaaagtgccctaggcctaggatgtacagtcaaactattattttactttgaccaataatagcttcatggtagttatattggcacaaaggtgccttatgccatgtcccacaaatatatcggtagatttatcttaaaacatacttccaataatattacaaatttcccggcctttacaaatacatcacaacaaaagtgcaatgtagaaagtgcaccacatatcactcatatgcaaatgacaagtggaatcatttgcatgtaaatgtgatttatctttcctttagatttttgtgcaaaaaggatgtaccaggaagcagcaagccaatggaaggaattaaatgtctgtttgttcagagatacacaattaaccatcagagatgtcatatttggaaactgtgaagaaataataagcattgttcataaaaatcctttatgggcatgtccacatgtgcctgattctaccaataaatgtaaccctgaccaacatgcatatgtagtggtatagtttcacctaaatcacttgtaaagttttgatattttctttcacaaaatggaacttcaaatattacacgtggacaaaggaagaaactaggctgcattggaattcatccaagtcatatcatattaataggaacagttctggcctttgaaatgaatatataaacaaatataagaactgtttgaaactcattagtaaaaaaggaaaggtaggaatggcataccatatgtaatattgtttatgcaaggtcgccaaatgccacccttgtaagcatgtctccatacagttgctagctacaaaaatgtagtaatatgagattataaacatacatcgaaaacatgcataagtgaacttagaaggacaagataaagggtgatagcatgagggaaataataaaccctcaaaccacagaacaatatggatctgtaacatataacatgaaatggtactaggcaacactaaaaattatgtcatataactacattaaagctaatggacacaatagaaggaaaatggtattgataaatcaatcctccattatgttatgagcacacaaagatctatatatgaaaatagcacatattccatctttgataaattcagtgcaaaagaatgccccacagtgctatagcaagcaggtggcaacagttgtacagtacatcttattgtttgctaccaagcaaggtcattttcactgatcaaaaggacaatgcgagctatcacaccaggaaacaggcccataaaacttgaaaggccatcggatacacagaagtttcattaatttgaattaaaaaaaattacctgtaatcatctaaaatgaaattcttttttgcagtcatcatccatatcgagtgcaataattcattaaggaagaaccaactaaggcatttacttaatgtgccacaattcataatcattgtggacaaaaagatacaaatgaggtgtatttcttaaactcccagcaggcagtcacaataaacacaaacatgatagctttttgacccaatgtacaaacccaacaggcttattggcttattgcttgcagcagttgaactgataaattctcacattccaacactctagttctgaccaagcaaccccattgtctgctaatgcccaactggctaatattataggacacccacaaatccacaaatatgaagtaggtttcaaccggtgaaacaccactagtctgccctctaatccaccccgcacatgcagcaagtacaccaaaaacattaactgatacatcacacgcatttctataattttattgcaattccccaacaactgtaagaatacctaacccaaatccaacccagtcagaataaactaaataatctaatcgtttattggccgctagccacagacacagttcactgttgctacagatgcgctaaacttagtacacaatcacccagtaatccaagtaccaccgccagacctaagacatctcaagcaccaagtaaactcgctcagcggtcatcacaaaaaacgaccaaatattttcatcgcaaatataaatttctagtgcaacagacccaggctgcggatgagcaggtgggagacactcaccgcgtcagtggcgttgtcggcgtccatgtcggcgcgcaggcgggcgtagagctgcgggctgcggtacagcgaaccaggcgccgggcgcgagatgatgcggggcacgctgtcgagagagatggagcccatgtagagcagcatcgccgcgacgtacagcagcggagcgaagaggaagaccgcctgccgccgcagcagcgcggcgagcaccaccctcgccgccctccgcacggcgcctccgccccgcacagctccggccgcgcctgcccccgcccccgccctcgccgacccgcccttccccgacgacctcctccccgccccccgccgcggcgaagacggcggcgacggcacggcgccgctcccgccgccgccgccgccgcccaagctccccagccggttgtacgcgtggttctgcatcgagcccctcccaatattaaagccgttagttaatacccccccccccctccactgtagagctagggtttctcccgcgcgatcgatcgcgcgccgcgccgccacgcggcgggagagcgagacaacaccgaggcggcggcggcggcggcggcggagaggaggaggtggcgagccggagcggagggggaaggggcgccgcacggcatgtgtccggcgcgtgaccccgcgcgcgcgcgtgcgtggccgcgtgggtgccggtccgagcgcggcgctagtggccgcgcgctggtggtggactggtgacctcccctaatcggtcgcgctcggattcccagaagttttttcgtgcgcgtttcaggcgcggcgcggcgcggattatggtttggctttggctttggccgtcgctgaccggggattcggatttttctggtctctctgatgtggtgcggccggtgggcgcgcggcacgccaatccagcacgggagtcgggatagattgattgatgtgggaatgaacggaatggaaggtctaatgttcaagattgggagtatggaactagtcggattatctttctatcctcgcgtgggtggtggtggacatttgggtttggggagagattcgtaatgcgatccgatctttgcctcatgatcgtgatggggaagtgaggttgacagcatcaggaggccaggaatgggctcggtaatgaccctttttattcgttagggcatgccaaatgtatctggctcaagtgggcattagcataggcccatgtaacaggaggtagcagtgacatagagagttcactatgtatattttgtctgccagaggtagtaaggtggggccactgaaaaaactatacattttctatataacataattgcttaccccatgaaaatgttgcacatctattatttttttattttcttgctaccggtagtagtactaaaaccggatagcagttgttaccccttgccacaatgtttattacccgataatagagatgtatttatgtcttattacctacttttcaaccatattgtggttgtagtgagtagtgacggctattgatcagagtcatcaggctgtgcttcctgtagtaccgcatggtgactgtgacttttaacacgaggataggatgcaagttgggagtgtacagacagacagaaatgctaccagtattattactaccggtttattaccacgtcatcggtttaggccatgtgagtatgtgacacgcggagcatgtagagagacaaaccgaagacacgcttccttctattccggatctttcaaagaaaactgcaagctgtactcagcattgatctctttcctcgtttcctaagcttccacagctagtactagtagtactacgcaagttttgtgcatgacaaccgaatttcttccagaagatactgcatatgccagtgtgaagccaagtagtagcacaaaattgtttttctgctcttctccgatctgtcaaactctggtagccgtgcatagttggcgatggatattattttcgtctcaagctccccctttttcacacggacagaacttatattgggccataacaccatctttcaagtggttttggtttggtgtggtatttatgccacttaaatactatgccaaataatgcggtacatttcccacgggttattataaatggaattgctatatgttattcgaatgaaatttagagatgaaatcttatagattttagactattggatctatgccaagattcgtacatcggcttctctcctctaactccggcgggctccccttcttctccggcgctggcgacaccccccaacttcggtagggagcatacgggttaggatttggagttggggtcagagtaggaggggggttagggagggggaagagagggttttcctcggggcttagagagatggccgtaggaggcagagaaatggcagtgggtggtgggcggtggacttcagcgggcggcaaggcagcggcggcgccgccgaagccacagtgatggaggagggtggtgggccggcatcggcggcgggggcaaagcaagcgtgtggttaggagacagcggtgatggttgcagattcggcgatggggagccatcggagacggggaagacggcagggcgggggcagggggctcgctgagggagcctcactagcaccgttgactatttccaactagccaacgaggcgggcggcggcacagtgggacggtgatggcaggggatcgcacgagggacggaaggaggagtggtggcagcgcgatctgaacggggggaggaggagaggagttgttgagaatataggcatataatgatttaatatattccataaataaatcatgacattacagatgtatacgggcgagctgtcgcggacgaacaaggagcagtcgcgcgaaacgcttcccaaaaaccttattgccgccttctccggtgcaggacgtcgaaggcgataagtcgcgcgtaacttatccggactccactacgcgaagcgcttcccaaaaaccttattgtcgccttctcccggtgcaggacgtcgaaggcataagtcgcgcgtaacttatccgactccattgcatctgcgaagggtgaggagccaattttgtgaatcattcgacgcgtacgtctgccagaccaggccagcgagcgcgcgcgtgtgttccccctcttctctccaccacacatgcttcaagtggctaggagggcatcctcccctttaaggatgtccccctctcctagaataagcaaggtggtactaaactccacatgcatgccatcccatgaggtgggcttttgtgattttccaaagaattaatcttcgaataggccttagcccatctattaattccaacagaagttagggttaagagctccgcacaaatcttgaagcatatccaatggtccaaaattcgaataatatgatgtgggattttctgtcacaaaggacctgttcagattgtagccaaaataaaccttacaataccaaaaatttggcaatttaataatattaccaagttttggcaggattttttatttatttactagagtttgataagtaactaaatggatgcacgtatttcacaactttgcaaaaaaaaaggtttgaaatggcatcaatctaaacaagcccaaaatatgtagacatccccatttataaacatttttcagatgtcctgtatttattttctggaagctccatcacctgattttaaacataatgtatttgttatagcatgactgtatatgctacagtttgcaccaaagtaattgcatctttgatcaatcctatcaaaaggctataaagaattaagattgtgtgatctatgacatgttgattacggattgatcatccaaagcttaattaaagtaggttgatatggtttcagaaaagaagaaaaagaataactagtagtaagaattatttaaggccagatacagttaagatggtgcagctatatcattacctaccattaatggtggggagcattacgatccgactgataaatttagttttttttttgccttaaatagttccgatcatacaaaaacaaagaccaaagtgcattgatttttttctagaaaaaaagagtgttgttattttggcatgcggtcatgacaaaagaaataacagttccaagggatgaagaaaatcacaaaagcaacagaggactaggaggaagaaagaggaggaagccaagcgctacatcagccagccacattgccatctacaaccagcgatctatataacaatggagagaccagagtggaggaagcaacgaccataagagactcgaagttgagaaggagaccctcgacgtggtcaccattcgtcgaagtggacgaggatacgcagccatcagagacaattaggaggaatgtggctttatctcagcagtatgggcgttgggtggacagtatacgcgcgagatgtggcgtgtgagtggctaggtgtgggactatggtctatgggaatggcgagtgggtgactgcttggataagaggcacctagcttactcaagaaccataacaattactatattgacagaaaaaaaaactagaagatatgcataatttgaccacgttgaatataggctttaacgatgtaggtgtactgatatagttgtgtttatgaaaatggaagaaagggttgaatctcaaatacaatttgttttaaaagaatctaactttgcatcaagttatgctggaaaatacattagcttgtgtcgaagaaagtaaaagaaactaaatcattcccatctttttttctgaatggataggtttattatgttaaatttggaagttttgagaactgtaccaacaaagcccgtctagctcagtcggtagagcgcaaggctcttaaccttgtggtcgtgggttcgagccccacggtgggcgcatttcatttttttcctgttaaagtcctttcctgtgatccagcacatgacacccagctaatgctttctggcactctagatacaggatttttttttttgccgaagatggagaagctgatgaatgcggtagcaaatcgccgatcatctcatcaatattcatcaggtgacaactgacaactcaagaatcccacttagacaagccattctagttccctgtgtggttggttccttatatcattggatatttaattcatggatgagactcccgactttctgtggtttgtagttttgccattgacatgtgggccatatcaaaaataggacccacatgtcagtggcacaaccttaattcagttacctcttttagcacagcctgcacctgcaatgtcgtcgaaaacacagcgcactagcgagcagttcatgctgatacttaacgaccgattgagtgaggatacaacctccgttattaagaaaagaaaccttctagatatggcttctttgccaattttttttattatacgaatgcgtatttgaagtattgaacgtaaactaataacaaaataaattacagattccgtctataaactgcgagacgaatttattaagcctaattaatccgtcattagcaaatgtttgttgtagcatcacattgtcaaatcatggcacaattaggctcaaaaagtttcatctcgcaatttacatgcaaactgtgaaattgtttttttcgtccacatttaatgctacatgcgtgtgtccaaatatttaatgtgacatttttggccaaaaatttttgggatctaaacgcaccctatgtcgaaatatataactagaatttaggactgttttggtttgctgcaaaaatttcctctaacaaatagttggcacttaaaatagtaccttgtagatgtttggattgatgccaaaatttaccaaaggcaatataactcctataattcaactctactaaaaatattggcaatgccaaatcttgcccataatttgacactaccaatgatttggtagggcaccaaaccaaatgagccctcattatctttttaaaaaagagggagtaggcaaaactattggtagttcatatgtaacggggtaagtgtagcgtcttgcttgaaaaaaaaaaacaggtggaagtgacctaaatatatgcagacccgaaatgactagtactaccacaataaacaagatgcgacatatttcgtattttattttttatgggacgaatatagagaactccctctgtccttaaaaaaaaaggcaaacttaaatttccatgccaacgtttgactgtccgtcttatataaatttttttttataattagtattttcattgttgttggatgataaaatatgattaatactttaagtgacttatctttttaatttttttcataagttttttaaataagatggacggtcaaatgttggacacggaaaacagagtttgtctttttttttttgggacggaaggagtacatgctaaggcgcgctatatagtctctagtgttaacaatgattgatttaaggtatggtggtaggtgacaacattcaaccacatatcctgattcctgacattaaacaggagctatttttccaactagactgaatgagctgccggttgaacacgtctagtttcttcatagctccatttcaccaagtacatgaaacggtagagatggtcggttggtcacgttgatctgaaaaaattagcacgagtgggattattcaaggtcctagagatggtcagttgagcgccggctgcgcgcggccaccgcccggaggtcattccatgccggcacttggacgtatatattacacgagtaccccgtatttacaccatcatcgtgtatacacgagggggagggggaactccgatgtggggaacaacagccgcagcagcgcgccgtctctgcgcggccggcgacgtccgctcggtgctcgcgatgctcgcctgcagggcgaaggcgggggacacggcgctggacatgaccgcgtgcgccgcgcttgtccggaccacgggttctgcaagggcggcgatgtggcggaagcccggagggtgttcgatctaatgccgctcttgggggtggcgcctaatgaggtcacctacaccgctttgatgcacggctacttcatccatggccagagggagaatggtttgtccttgttcgaggagatgagaattgaggagggctggagtcgagccaagcctctacacctaaaactgcttgatcgcagagtggtgcacaagggaattcgagcgcgctcgtaactagttcgacgaaatgcctgcaagggtcatagtacgcaatattattagctctcattgccgcctacgcaggcatggcaagctgtggggtaccgccaagctattggaaatgatgcggagggacagtactcgtctgagataaacatcattacctatagcctccttgttgatggctacggcaaagctgggaagatgtccaatgctttgcatttcttcagcctgatgaaggcggccagtttccaaccagtgcaatgacatacaatatgcttattgccggtttctgtcgtgctaggggcaaatagggctttatctgacatgaaggaacgaggcttggaaccgaccaaagtgacatacacaatactaattgattatttgattcatttgccagagaaaatgacatgaataaggctttttagatgcttgcatgggagaaggcaggtctagaggtggatgtgcgcacttatggtgttctggttcatgcactcttcatggaagggcatatgaaggatgccaggaagctgtttcagtcaatggaccagaaaggtgttgaaccgggcaatgtgatctatgacatgatgatttatggctatggaagagaagggagttgatacaaggctctgaagttgatcatggaaatgaggcagaagggtttggttccaaattccgtaaggtatgccttgatgatgacgatttgttttctttgcaatgatgataaatgtcaggaagctgaggctctgctcgatgacatggtccgtgctggtctgcaaacaagtgaaccaatctgccagtttactgaatgccaaggcaagattgagaggttctactgatggctcttttgtgtaagtaggaattcatttcttttcatgttatagtgaattatcctgattcatgagaaattagaaagatattgcacaaggaaatctacgtattgaattacaatataagaaactgtaagttcatttgctgggcatcacagagaactccattgcaagcgacaaagataggcagcaaaatgccgaagataaatgcacccagcacttgctgcaaaataaaggtcagtgcttattgggatcctgtgctttcatgctcgtcctgcacgccggaggctttgccaggtgaaacttggtttgagcaaaacccttttcagatgttatttcatgattcctagtacaagataacctaccttcatactcaggtattagataagaaaactagagatatatagcttcaactattttgtgtccgtaccatatactccgcccatagcgcctgttcatatcagtcaagtagaattaggttttattgtttcttgtttgtcagggggtcaaccatgagtccttgacaatgctgtatgagttcctgctatatgatagatcagcagtcgtcattttcctcaggcaatataaaacctagctttatattcttgctcttatttgcttcataaacgcttgactttaagttataacccatgtttatcatgcacacgcaagttcccagcactctcctacattattaaattggggtgtgtttagttccatgccagaattggaagtttgaagaaattagaacgatgtgacagaaaaattggaagtttgaatgtgtaggaaagttcgatgtgacggaaaagttaaaaatttaaagaaaaaagttgactcttcagggatggagaccccttccatacaaagaaataagaatgtcggcgttctctataggctactgacaaagctatgctacatgagttcccttgcacccccttttcataatataagagattttaggtagatgtgacacatcctaatacaacgaatctggacagaccgtttgtctagattcattatactagaatgtgttatatctacccaaaatctcttatattatgggacgtagggagtaattaatagctctatatggtttaaggaaatgagtaccctatccaaatttctacacctgggcctcctcgtccttttctgattgctatgtgataccggttcccacttgctaagttgccttaacaccgcactttgcaatttttctgataggagaatcaagagtgaccgatccttttcagattcttttgcaggtacttttcagttcatcttgtgtttatgacgaaatgctctttaattcttttgagctcatgaataagtgtcttaaaagaagagctcatgaacaagaataatttaattgttactaatactagtaacaaattactgcatatttactctctcttttgtttttacttgttagtttggacatcaacatagtctacttaattatatttatatatacaaaagaatgctgaaaacatacttcctccgtcccacaataattcaactcctggattcccaatgcaaacttagtacaaccatgaaaataccgaaatgccctcaacaacaacattacacaggattgtactgggttctctgcactgtcctcactgaaaaaaaaggtttaactgggttctttgcacccatcgattacactggtatccagcaaaaaaatgaagttttaaaccgaatatgctaacaaaaattaagaacctctagtctgaaaaaagaaatcataaaaaaaatactactccacaatctgcaagatggtttgcatccataatctgtcaaaaaaatacttctccacaatctgcaaggagtatgaattaatctgcaagaactagaaagaacaaagaaaggtgtttgcatccaccaaggtggcctgtagtcatgtgtgtatttatctagattgaccatgcaaaaagtcatcatcaaaatccaagaacttagtatagttaacaaggtgaaatggcagaaataaacaccagagaagaaagagtgatgaaaaataagtagtagaaaagagtacctgggttcattctaatggcaaagcttctcgaaccacctcagcgctaggagacacaaaatcgttggctccttcatcagatccgccattgcaaaagcttgtgcatcaggctccctgcaacagatccactggcgctggagaccataggcttgcgccttcgccgccgtagtcgagcagcacctacacgttgcgttcgccttctcctgcatcacaatcgcaagcccctacctctgccgccgtgctgctagtgcctcatccgagccatctcaatccgccggggccggcgctgcccccgccgacctgtcgcatccatgacatcacgggaggtcgcagggagggagagatggatggagcgtggagggaggggaagcgactcatcgccgtcgagggatgggcgaaggtcgtgaggagagggaggagatgagaccggcggtggtggttttttttagcgcggctgtgtggtgggcgagaggagagagacgggcagggataaggatcattgaatatttctcgggtgttgcgcaggagttgattttttctgggacaaatcctcacccccagaaatcgcttctttctgagacggagggagtaaataattgaagtacttctgacgacaagtctcttgatgctattttcatgtactccttccgtcccataatataaggtattttgagtttttacttatactctttgaccactcgtcttattcaaaaaatttatgcaaatataaaaaacaaaaagttgtgcttaaagtactttaaataataagggcaaaaaaagtaaataataattccaatttttttttaataaaacgagtggtcaaacagtactaataaaaactcaaaatcccttatattataggacggagggagtaacaaacatttatcttttacgaatgggtaaattggaatcatgccattataattttgtaaagtttgagatctatcggtatctcaatgacacgtaggacccacatgagtcaatgacatgtgggtcaggatgacatatctcaaattttgtaaaattataatgacatggttccaattttccgttacgaattgatgtcaatgttcttggaatgttcactacagcaagtactagcgctgaagcagtacagcataacgacgactataggactatttacctgttcattactcgtcgtaatgtcgtggactcgtggtacgccgcgtacgcttctgcacgctgaccgctcgccatgggccatggcaaatgtgaagccgtgaagcatcggcccagcagaatcacccgtacacaggatcgattaccaacggcgcagatgacctggaggagaccggacgcggccggatgcggaagtgtattccccttcgcaccgcacggtcgcacgcacgcaccgcgagccgttaggggttcaaacttccggcccacaacggtaactgtcgacgtttgcgaccgcggccccttctggcatctagaacccgaaccggggcactcgcaacccgacggcgccgtcaactaaccatggcacgaccgtcgcgtccgctacacgtttcctttcgtctccaactcgtattgctcctctttttttttgtattccacccctctatttccgtaaatcatactatcccatgtgttactgtactactatacggtaggggaaatctcgtttttttcatgcattttgcattgtactaacagcacaattgtgagagttcgtgctgaacatgtccagggttcatattcctaatggaaatcacgattttcatgaaaatagaccgattttcatggaaatagaatatttggggttggttccataacaaaaaccattcgatttcatggttaagcttttcaaacaatcaaactaaaatttaattattttgataacatttttctcatttttgtcttttttgttagtttaccggtagttttcgtgaaaactggatatactgctcgtgctagagaaagttttcagtccgataaagggattgtgaagcctgccctaaacacatgaaaaatgtaaaattcaactttgatttttttgcaagaatccttttccttttttttgggtgcttttcttttgtatagcactgtaccgtatacaacactgaatacaacaatgtaggccgagtttagttccaaacttttttttcaacttccaattttttcatcacatcaaaactttcttacacacataaactttcaactttttcatcacataattacaatttcaaccaaattttcaattttagcttgaactaaacacacccgcaatattagaaatttttttctcgcctccttatctaataaggacaaatctgagggacctattcggaaaaaagagatgggttaataatttattcctctcgctcgtcttccccttccccatcgcttcaacgggcgaggttttttgaaagcatcatcctctctctctcctcccccatcgactacccccgacacccaacggaagccgtagaaggagagagaggggaaaagcttgctattttataccctcatctagggttccgagcccaccggctctctccccccttgctggcttcgcgccatctctcccgccaccgcctccccccctccccccctccgcctccgatagattcgcgctcgccctcctgacccacggattcggttcccacgaaaccgctcgatctgggggatctgctagattcgtaaggcggcgtttcgatcgatctgttcgggggtttctgccgtggggaattttgatctataaagttagttttttgattttgtttcttttttgctttttggtggcggtttcgctgtgttaggtttgtggtggtggtggtggtggtgaggatgtgcttgtgccgttagatgggggccatggcgatggtggagcaggaggggtgcgtcgagaaccggcagcccctggcggcgtcgagctcgtcagtttccgacggaagcagctatggcggcggcggcggcgggctcgcgcagatgtcgccgccggtgtctagctcggcgaattccatctccggtcttaggtaaggaagttctttgcccgattcccctcagttgggatcctattatgggagggatctaggaaggtccgttggttagtacctaagttcgtgtggtagttgagaaaaatggggccttcgtggatggctccccgatggttgtgtggttttatcgctggcaatttgccctgtctgtgattccacgagcggttgtttgtgcgtttgagaaaaaatcttgccacgaggagtgctaccttggcggatatgtggcaccgagagtgttgtggtggctgtttgagtgataaatttggtgtttttttggtatccatttgatgagatacttttttatattcagacatgactttgagtgtgttatgatggatatactgatatgaaggcgttttccttttgggatggctgttgatgttttcatttctgtaattaatttgcttgccttactttaaagtgtgtatattgatgtaatttggataaaaatatgttcacttggaacactaaattggtccggttacatgcagcagtagttgtttaaactggaaatgtgttttttatgccatgacccaaggttttattagatttaatatgcttgggctacagcattggagataccatttacttgtaaccttgatgtgtatattttttgttctgactgctgcgctaaaatatggtactggtgcactatagaaatagttgttttaatgaataaacagtatttttttgttaggccctgtttggaacgtttaccctttgtgtaagattcctgagttcaaaacagggcctgaatagttgcagttacaactaaccgccatttttgtttcccacttttaatttcttgatgatgaattgaatggtgttagtagggttaagcagtatttttttcatggaaatctttcttgttcatgaaaggctccacacatgggaaatttacattgtcgaactatagccttaatgttcttccctatgtaggtctctcaaccaacaattgctgtttttttgggtcatcttatgctagtgtatttagatataccttgtgccttctcggacctaatatgctattgtgccctgaacagaaaatctttcactttatttttgctgataatctttatcttatgttaggcggacaagcgggccaataaggagagcaaagggtggctggacaccagaggaggtcaacacctcactctctattgtacttcataaatactccataagtcctattaaatgcaatacatacctacatttgttacacatatatgctagtttggtttgtatatgtattttggcatattcagtggtaatatcatgcactggaaaagttcttagttaatctttttccattcctgtttttctaaggttcttattttatccgattttatttcatatatgtttttattgttattcatggtctgaccattgattttttgtttgaatcaaatcttctattttcctgcttgaacgacatttccatgttgattcagttacacaatcactgttactaattggtcttaacttatcgcaacaggacgagacattgaggaaggcagttgaggcttataagggtagaaactggaagaaaataggtccggctctcaattccactgcaccagtgtataacttgggcagtcagttatccttgagatgatgctatcattttgttgaaaacaacctgtcaggaggattgcaaatgcctaatggtttgattccattaatatcggcccatttgcatataaatatgcgtatacaaatatgatctcagcaaactaatacatttttgcgtagattatatttgtataaatatatataagtatgcaacctatagtaatattggtgatcttgtagttgaaatagctgtttttttacctttttaatgttgtagtacttcattatatcagttgctccacgtgtactggcatacagcatgccatattatttttccatatctgtatgccaagtacattgagctcatagaatgtatctgtatgcagccgaatgttttccatacagaacagaggtacaatgcttgcatcgatggcaaaaggttcttaatcctgaacttatcaaaggtccttggactcaagaggtttgtcatgtagctgactttgctttgatggtaagcgttgacattatatcttctaattgttatattaatgccatgttttctgcaggaagatgatcaaattattgatcttgtaaagaagtatggaccaacaaaatggtctgtcatagctaaggcattacctggccgtatagggaagcaatgtcgagagaggtaatatttttatatcatggctgtattgttaccaggattcagctcactgttattaataaaacttttaaatttccagttatttttttcacatatgcatttatttccctttacatgagacattaggaaacttttgtaattgcaagaaagaactttaaattttaggatgctcatagttgctacaaaagctcaggatcccgtctattatgaaatatgaattaattaaggccttgttcggttaatccctgtgatggagggattggaggggatttattccacacctattgtggtgtggaattattccccctcaatccccttcaatcctcttcaactctaaaccgaacaaggcctaagaaatgcactacttactgaaagaactgtgaaaataattggctaataattatgctacagtatctcatagctgaattcaaactgttgtccgcatataatttactttctttatggcttcaatagtatttgttatgaaaaaagtgcttaagtttggcatgatacaatacattatacggagctaagtatgaagtcatacaatcttaggtggcacaatcatctaaatccagaaataaggaaagatgcttggactactgaggaggaacaggcactcataaatgctcatcggatttatgggaataaatgggcagagatagcaaaagttcttcctggaaggtacgtttataaagcttacttccctcggaattttttgctttcattagttcatcgagctaggtcaaaatcacgctgccctcgatctcttagcgcgctgttgcaatttagtttgtttgatttttgtttcaagttctactttcaactgcttatatacctgtgcgatggtcttaaactatttaatattggttggttgttcgtaaatcagaattatgagttgtgttattattttgaaaagacacactttacatcaccttcacagtgcttcgtatgttgctttttccaggactgataattctataaagaatcattggaatagttctctcagaaagaagcaagatatgtacaataccagcaataatatggtagttccgaaactgcttgttcatgataagttcaaggataaaccaaagctgatggctatggagggtcatcttgatttgaacaaggcacccattatcaattcaaaagaccaacctggaacagctcatcggtctaattgctcagggtttctatctcgttcctcattaccaactgctcagccacttacttcccgtgaggcatctgtagttgatggttccgctgtcactttagtggcgcaagctctggaaagtgattctgtccgtggtaagggcttggaaattgattctgttcatgagaaaggtcttgaggttaactcggcacctgatcataccgggaactcttggaccattcaactagaagctgcaccatccaaaggtgaagcagaattatctttgaagaatgaggcacgctctcttggtccactttgttaccagatccctaacatggaagatgtagtccctgtgagttcctcactcttttctgaccatcttactgggaaccatacatctgaacattgtggggatgatatattgtcacctgctggctgcactactccccctccaacaaagggaaaattaacaagccagcttagtgttgattcaattttgaagagtgctgctaacagttttccaggtactccttcaatattaaaaagaagaaaacgggataaatcaacacctgtttcagctagtgagatgaagatcagtggatcaaatactgatagattttacactcccatggggatggaacctgctacagctacaccagagtcattcaaaactacatcttttttgtcattgggttctcttgatggttctgtaaagagctttgatgtttcaccacaataccgggcaaggtcaaaaagaatggctctcacgaaaacagttgagaaacagctggatttttcatcagatggattagatacttgtggttctgagattctgaactcttcctgcaataattcccaaagcacactttctattaccgaagccccaaaactgaaagaaaaggaacatgctgttcaattggaaaatttaaccaagaactttgcgcatacaaccaatttggatgtaacctaatcttgaaaatgcaggtatgctgttacaaaaatcttgaaaacccctgctttacaattgagatgcattatacttttcatagccagtctacaaattctacctggtttatctgatccatgttggtagttgggtccttttattaattgatttgaacatggaagaagtgtgcataattgttttaccattgccttgtaggaactgacatcaatctgatgaagtaggacagatgagctgaagtgtctttctgagctgatgagctttttctcaaagtatcacgattaaaccacaacaagatcaaacaaaaccggtggagaagaattccagaattgaagctttgtactgagtacagaaggtccaccaatcattctcccatctcttctaaccaaggtgtacaaaagatgagcgacactctgtagaagaatacattgctcgctgcactttgtgaatttacagttagaaaattcagattgtagaagccacaggtgtgtacaaaacaacaacgaaaaaaaattatagtgttagaacgtcattatagctgaataagagtattcctcattggattgtcagatttattttgtcttgtgctttccctttgtcgcgaaacagccagggtctgctctgtgtaacaataataaaacccgtttttgcaaaatcattgccagagatagtcaagaaaccattttgacagcagctcaggtttcgtttgttggttgttgacaattccttaaattctttagcatcttctgtactcgctgaagctctgttagaacaacgttgcagaggctaatcatatgcttgtgttcgttcttacttgatgctagttgtatgatatgattcagctgtattactggccctgtttgggtgagcttaatttagagaaactggaatatgtttctagattctaattctatatctatagtaactatacatatcagaatatgtatgaaaaattagactatgtaagaagggtgtgttcacactaaaattggaagtttggttaaaattggaacgatgtgatggaaaaattggaagtttgtgtgtgtaagagttttgatgtgatgaaaaagttgaaagtttgaagaaaaattttggaactaaactcggccgaagttttttgtttagagcatcaccaatgtatatggcaaagtgatctatatagatgggacccacataaatagtttatccctatgataatgtccacaatgtatagatacaaggtatcattaggagaaggagaagagagaggagtagagatagataatataatttatttcatatgggtagtccatatgtatatgggtattttttgctattttttttatatggactagttgcacaatgataataggtggctgaatggaatattctattgtttatagactacttttatattgtggatgcccttaggaaaagctaaacccctatcggcgcctttctatgcctctctatcaccttttggtcattcggttcatcgcggatcgacgagaaaccaggttggcccgaatcaatcggcgccggcggcctccgcggtttccgccttcgggtaggcgcctgcggcatcaacaaagcacacagccgaaaccgaagccttttctttcttccgccccaagaagctgtgccacgtgtttcctccttcccctcctcgatttaaccgccccatctcgagtccccccatcacagcttccactccacgaaaaccctctgcctccttcgctcgctgcaccctcgtctcggcgatccatccatggctgccaggaagttcttcgtcggcggcaactggaaatgcgtaagtattccccccagcactagtcgtctcacaatccagattccggatgagccggagacgctgctgatgagtgatgaggcttgggttttatcgatgcgctgcgctgttgctgcgtgcagaatgggacaggggaggacgtgaagaagatcgtcaccgtcctcaacgaggccgaggtgccctccgaggacgtcgtcggtgagccgtcgtcccctcccgagggcgttgtttggagttggatcgattcatgaatcgatctggtgctgatctgtgggtttgtttatttattttaattttttttgggtgcagaggtggtggtgagcccgccgttcgtgttcctgccgcaggtgaagggtttgctccggccggacttctccgtcgccgcgcagaattgctgggtgcgcaagggcggcgccttcactggcgagatcaggtgagcgtcctcccccactcccctgctctgtttcccttccccttttgttttgagagagatgattagtgatttatttggcattgggtgaacaactcggccttacagcgcaatctgagtgtttatcacgagagcgtcgattttagtacggattgttcgaaccgcgagtattgttagtcgattataagcagctctagttccacgaaatctgacttgattataggcatgaatggatttgtgggacagctgaataatgaggcatgagtatgctgctgctgctctattgtggttatcggtgatgttctgcagactgcagtgctattatattaaggggtgaatgacagcagaatgtggaatgctttaagagcaatcctttgccaattcactgacgtatgcttcatatttgcagtgccgagatgttggtgaacctgcaggtgccttgggtgattctgggacactctgagcggagagcgctgatgggcgaatcaagtgatgtgagttctttctacattgtctagaaacataggattttttttcatgtcagctttatagcaactagaatgcgggcagctactggtttagcaaggccaggaacttgccaagaatatctagacaatggtcctattttaaggtcaatctgcaccgtccctaagctagcataaaagactgttgagttactctgttgagttttagccaagttagacctataaattgggttatttcatcaagctgctggaaattctgtttgaagctcatgggattttgatttactatgttgttactaacagttcttttcaccattcatgacagtttgttgctgacaaaattgcgtacgcactttcccaaggtatcaaggtaattgcttgcattggtgagacccttgaacagagagaagcaggaacaacgatggaagttgttgcagcgcaaactaaagctattgcaggtaatttcacttgctattcttcaagttaatttcttataaagttggaacttcacccctaatgttggaacaactgaataagtgcttccttccttccttatgaagtaccttgtgctgttgataaatccagttcttccaccttgaaagctgttaaacaggaatgctagtttatatttgcagaatagaatactgtgattgcttttaccctgctaaatatccaaaaggtatctgtagcttgtgtacaggtttatgatgataacggtgtggtcaaattattaaatgatctatcatttgaactaggaattatgtcatacaagaaacacatactttactactatgagccttttagttattgaagaaaacacatcctgttttgattagtcacatccattttcgtttcatttgttctttatggcttttgtggtccattgtactgtgctgacatagaagtcttctcatttctccacccctaactttttgtcttttttactcgtcatatttttcagagaagatatccgattggaccaatgttgttttggcatatgaaccagtttgggccattggaaccggcaaggttgcaacccctgctcaggctcaggaggtattccttctaacatagagcaattacatcacgattagcatgttcccttcacatttatctgcctcataaaccaatatgggttttttcctatatctaatgtctttcttgaccgatgcctggtacctgattctgcaattctgttcattcgaattatttgaaatatgcatgacattaggttcatgatggtctgagaaagtggcttgtgactaatgttagtcctgcagttgctgaatcaaccaggattatttacagaggtatacctttataactataggactatgaattgaaatgtaaccaagattttgtttagtagtgatgccaattgctaatgtacaaaactctccccacttccctacgattaacctgatcccttgtcttcgcatatttgtcttctacaggctccgtaaatggagcaaactgcaaagaacttgctgctaaacctgatgttgatggattccttgttggaggagcttcattgaaggtcatattcctattcctttattatcctctccatgatattgatagtagcatgtagaacataagcctagttaaacaaaacaccatttgaccagtacaatccttgtgcggttgtgcctagtagcatgccaaatatttgaatttaactctatacattctcacataacatttcaggctttaccgttgtgtatattactgatgattactttttttttctgcagcctgaatttgtggacatcatcaagtctgctaccgtcaagtcttctgcttagtgttctgggttgcaaccagatgatcgtaggagttaatgctgccaattttaagttatgacatgtttgaccagcttgctttgttatatctcgaagtcagtgaactccatatcgttccatagagcatgcagccacctgtggttgctttttttctttttgactttttctcccgagaggatcagatgaactgaaagtgccgttaatgtctgtattatcagaagtttgttgatggcttgatgctataatagttgaacctgatacttcctgagtgaagtactgtcctttgcatgtttgattgatgattacttgttttcgtagtcaaacgggctatcatgaaggatatactacatgtttgttaagtttgttacttcgtgatttaagcaattgttgattaatgcagaataataaccgggtcattcgcttgttactctattacattgtcatgtaaactagttagtgactgaatccatctgtgacgtactgtcctccctcttcctttcttgaatgtacactcccttaaaagcgttttctgggaagtagttatctagtgcacattatcatccagaagaccaattttaaacatataattacatattgcaacagttgcagttataacagattttttttctctatataattgtcaacaaccatagccagacgaagtgtacattacagattttgtactcaccagataaaataaacggtatactagtacttataaaatatcatttcaaagttacaataaaatgtaatatgcgaacatccatactgattcctgcagatcagaggatgtgtattctgaatagatcctttactgccagtgcccccttgcattgttccaattctttaagagaaaatcgagcatgatccggcataagttgaacacctttgtgctacggcgtttgtcaatcacagaagccgtacaagctgcggcaatggcccccggccggccactcgacgacgagtttaacttcactggtgagtggtcccctgaggacgcctaagcggcgaacccagaaaaatttatgttgggcgtaatatgaagggctaatgaattaatttggcaacggactagctgacattgtaatatccaaaaacaccgccgctgcttagcgcctcaaacatcaaataatggggtgtttcgtttgtgcagggcacggactgcagtctgcagctagcttaatgctgataaatatgactacactgatgagtcgctgatcccaggaaatttcacatttcttggggtatgccggtgccctcccggcaccacccctgggtccggccttggaggacgggcgagttgccggcggcagccggcaggccggcagcggcgtagggtgtaacgccggctcgttcctacttcctccgtttcacaatgtaagtcattctagcatttctcacatatatattgatgttaatatatatatagattcattaacatcataatgttagaatgacttatattgtgaaacggagggagtagaaggcaacatgtcaagaaggcaggaaggcaatcgagggcggcgcggaggacatcgctgaggcagaggcgcagaagagcacgccgtccggggatgctcgtcggtgaggtcaggggctcagggcggccatcattggcagcgatccaagcagggtcctttttacaaaatgtcagggcctattcgaaaatgtgttgggcacggatgcgtcaaacgtgggtggtccctggccgttggatccctgtcaacgccggctcacccttcgtcctcgccgttgcaggggacgaccgacgacggtgatcgcatggatgtcggtgccgggagctcatcagcaacgaggtcgtgcgcgagataatcctcgctaggatttcccgtcgctgagcgtgagaagcatcgtggactaatccgcaggtgcagggcgagcaaaaccaataagaattttctttctagttgtcctcgattaagccaaattaggaaccaatcttctcgtcacgctacagagttcaactaattcaccttgaaaagttgatggtcacaaactcactagatcttctgctcacaaactcactaggtattgctgtccaattaattcagttgctctatgttttcggcaattagaatttcggaatctatgctagatttgtcgagctcagttcctcaggatcttgacatgtgaattctctgtctgctttcatttttctctgtctgaggatttcaacttttggattactgcgacactgatccatgctttgttctttaattagttatgtgttgcgcgagctatcgacttcaaaataatatgctttttttttgtgatcgactgatcgccatatacctgtacgtaatgtgagacgaaaccactattcaattttgcagctgacgttgtgatgttgatgcctgatggtgctctactgctctgtttcctgcgttcccgaaaaatactgctctgttaatctgtttccagcgtaaattaaaacaaacggccaatgataatcgtttttaattttttggccgagtcatcacagactcacagtatgtcaacaactgatgtcagtacacccgttctttgttattatgacacatcactgtcatgaaaaccacctgataggttaacaatcagaaccaagcagtttctgattctgagacccattcttcagaaatctggaaattctaccgatatctatctgcctgactatctctatctcgatctcgtccaggattgttcttgcgaactaatggttgtacgcaaattcgtctccctactgcagtctcagtccaagtttcctctttgatgattcttcgaacttatcgcgtagattgggactcgcgcatttagccgaggaaacacgcttagcagcaagactcgatcagctccgatcctcacgttgaagcgatgaaaaaaaatcacctcgaattcgatccaggcggcgagacgtgaccaaatcacgtacaagtcgtcgtcgaacagacctggttgtttaaactactaattctaaactgcagagggtcagagagaaagatcgtacgaaacttgtactgctaatcatgcaataagcatgtgttaatgccaggacgattcactggggaaggaatcacaccgtgggcatgctgttgactagcggaataataccactgatttaagtagggtcatatattgatatatagcataactgctaactgccagttgctagtgcctcttcggctcttccagctgggagtcgaaacaaacaaaagagccgtcgttaagcacgtccaagtaattaaattagtacgtagtagtaatccctaagctaaaaatatggccagttgtagctgacagctaggagtaagagatgggcaagtagagagtatagagaggaaggagagaggaagcaatatgggagaacagtagtgaagcctcgaaccggctcggttcagtccaactcaaccacgtagaaacgtgcgggtttacacggtggcgaccgcttcaaatgtgcgggagctttgactggtccccagccagctcgcctataaacgcgcgcacgctcgagccagctaccacggcatctgcttgagttggagcaacacaccaagaaggccagagagattcagagaactacaccgagaaggcgagattgtttgcgtggttggtaatttggccggccttgatcgatcgagcggagaagagaagagaaagatggcggggagcggtgtcctggaggtgcatctcgtcgacgccaagggcctcaccggcaacgacttcctaggtgagataggtgcgtcctacctcgatccgcggccgagcgccgttagaagaagacgaggccgatcgagctcgatctcatccgcgttcttgtcctgtgcaggcaagatagacccgtacgtggtggtgcagtaccggagccaggagcgcaagagcagcgtcgccagaggtcagctaatactgctccgtgcagattactgcaaacttcttggtttttcgtttcagaattcggattattgttagacgaggcattgacgaacgttctgggctctgacctgaaaatgcagatcaagggaagaacccgagctggaacgaggtgttcaagttccagatcaactccacggcggcgaccgggcagcacaagctctttctgcggctcatggaccacgacaccttctcacgggacgacttcctcggcgaagcaacgtgagtgccattatatgctctcaccaaaacaaaaagccaacaaccatggcagctagcttagtcatagcaaacgctaaacactaaagtaattttccagttcttaaaggagatattaaggaggtaccaaatttacactaaaatttttggaatttctcgaggactataaaatttctctgaacactactataatctcaacgtgctgaccacatagttaggcaaatgaaaacaagcagaaaactttatataccttttgaacatcctgcacaaatctgaatcttgatttttgttgtaatgcaggatcaacgtgactgacctgatcagcttaggcatggagcacggcacatgggagatgagcgaatccaagcaccgggtcgtcctcgcggacaaaacataccacggcgagatcagagtcagcctcacgttcacggcttctgcaaaggtaaacaaatcaccagacgcacgactgaattattgattattcatgttacgccccgttgacctccattggtctctcctgattggctgggatctgaatgtgattcgatgttgatgtccaatgacaggctcaagaccacgcagaacaggttggaggatgggcgcacagctttcgtcagtagaaagattgtgaacttcaagtctataatcagttggggcctgtgggaggtttagataagtatactatagtactagcaaggtaggattttgtgagtaacaacggcatctaatgcccaagattgatgtggttcgaagtgtatgtatgctgccttttttttttctatactagatgtatattcagaacattgtagagtcatgaacctgttaatggatgtgaattatgatactacttcaacctctttttcgcctttgtgtagcgatacatacggtcagactttaccatctctaacctccaatatattaattagaatgtatgtataattcaagtgtgatgataacgagttgatttttcatcaaaaccacttatgtatcgttatattctttacaattttttattaccacattattaggacgtctgtgtgtataagaaatcatctatttagaaacctagggagcaggcttacaccgggaagtatctactgagaagtaccaattaggtcaaaccgtgaaaaccatcacatatcagagtatcgagaggaatgtctgcatttatccactccataattcatgagaacaaatgcaatcaagtttcttgtgtccttggaaaatccattcttagtgatgtcctccgaaaagaagactagttcagaaataaatcaaaggaaccactattctttcatcgtgtcatcatatacaacgaccaaatataaacataagcaaaaaatctattatattattaaaggaatagaaaaaaggagtctccacgttcgctctcatggcctaaaaattctcacattaatcggagaaaaagaaaaatcagagtccatatagaaatacaatttagaaatagctgaaattcggaattaaaaaataagaaatattagaagaggagactagagtccatatagaaatacaatttagaaatagttaaaattcgaaattaaaaaataaggaatattagaagaggagattagagtccatatagaaatacaattaggaaataactgaaatttggaattaaaaataaggaatattagaagtagagtatagagtccatatagaaatacaattaggaaataatagaaattcggaattaaaaataaggaatattagaagtagagtatagagtccatatagaattataattaaggaaataatagaaattcggaattaaaaataaggaatattagaagtagagtatagagtccatataggaatttaaaactaactaaaattcggaataaacataataaaattaaaggtagagttttgagtctgtataaaaatacaatttacaaataactaaaattcgaaattaagaaaaacacgtgaagaagagtttaaagtcaacatagaaatacaatttagaagtaactgaaattcgaaattaaaaattaaagaatattgaaagatgagtttagagtccacataaaaatacaatttgaaataataaaaattcagaaataaaaataaataatattggaagaagagcctagagtctatatagaaatacaatttacagaaaattcggaatataatttacaaataactaaaatttgatattaaaaataattaataactaacacatatataaaatacaatatgaatatttcacatttgtagtttcgtaaagttattgcaaaatttaaaattatgatgttattttaatatatttgaataatataatgagaaaacatatatgctattatatgagagaaaatataatgatgctagccgtataatctgcgcgggccaccatgctagttaacataacagtagaaaatgcatccaactatacagttatccccaaaagtccgcgtttgaacctgaacatagcaaaggtcctacttaactcaaatgaccagatctgttccttcacctgattgtctcggactcaaaatggatgtacaagttagactactggtacctgttaaaagattcaaaatgtgaccatacccctgaactgtactcgtttggtccaagcaatatggacttcgtagttgtaaactgaagaagatggtctcgaagtggagatcgttgcctcaggtgcataggtaacaagtcacctcttgcatttacatcagaatcaatttcttcataccttcactatagaggaaacgacaggtgcaattctgctccttggcaagaccaaatagcaaagctatgtttcctaggtgcacaaagttgctgcagtagtactgtagtattgtccaaggttctaagttcagatcgtgaggcagtttgcataaacaagggattgcatttttactcatcttaaacttctgtaatctctgtgactgataagatgtcatcacgtggatgggctgcttccacaacgacactaacttcatctcccactttcccagttgaaaccacggctgtagcttggatcccaacctgcgaagtatcaccagaattggaatgtaataccccaatgacgatattgagaaagtgatcctacttcaaggaacccaaatatgccattggagaataattgtgacgaactagtgtagtggcaaagtagtctagtacagcagacatattaattagctgtgactgccagtaatcctatatatctgcaccactagcagcgattagtgctattttctcctgtgtaatgaaaccacatcatctatgttttacacagccggaggtctccatctagtaatacaataagattagctctagtcgtttctagcatgatcactgatcacattgttccatgtccagataaaatttttaccagtctggacaaatttagctgctataaaagttgggagttggtgctggtgggccatctaaccctctttcacctcactaaaaaaaaagccgcagaaagaaaacgttgctcttgttccaacaactccctctcttaaaaatttgaccagagtaccagacatggcatcatagctcacactcacggtgtaggatgagcattgcagggtcggtgcaatgctgacatagggtaaagctcagttgatgcagtggattactatgagattcaaactgtagcaaagcatgtgtattcaaactgttcctttgaatgctaagatatttgaatacttaaaatacaaaataaaacaactattgtcctggctaactgctttgcctggttcaatttgtttatacatgaaccatcaagcaattgacttgcatatgttttaccaagccttatccctattccatgtcatgtagattttgtttaacctgagtcaaggtaaaacctggtttaagataatacaaaagcattgaaatcagctacaaaaatagttttttaaataaaaaaccgtgaataggattgaattatcctaagtcatctgggattggtcatactcgggaataaacaattaaaatgaagtgaatacacaataagatggtttttatactgactaggatttgataaactttcccaagccaggttacactggttttccaagccctgggcaagaccactaatatctacagaggtgctcttgctccaaatacaatcccataaaagcaacaagaatactctcatcttatatatatcaaataaaaatgtactggatgaagcatgtttgtgtacctctataacaagcaaagttgccaaacgatccttaataaacttaagaatcagggctttatacttctttccctttggttgtcttctcaagtattccaacaaccagtaacgtaagttgttgctatggagtctcctggcaactttaacatgcatgcttgcaataaaggtcattccttctaggtcaccagctgaatagggtggagattcacctctaagaaaagcctttatctgcaatttaatacatcttccatcagcactcaaatttaagtagaccataagtacgacgctcggatcaagatacaatgaaactagactgcactcataacataaaacacaaggtgggaaattgataataggaaagctctttgtaaattgtaaccatcatgttcctggaaactgttaaagttctccctattagcaggaataacagaggcatatttacctgataatgagctagcagatcaacatatcttcgaataggggaggtgaactgtacataaccaggaataccgaggacaccatgtggtacaggtttttggaaatccatttctgcagcacggagcacactgatgttggcaaaactcctggcaggcccttcagggagatgagtaaatgctgacacagctgtgttagactggggatgccctctgtatggcaaagcaatattgttgtcagaaccaaaagcagccacggcctccccacagagtatcatcatctcagatacaagctgcattgctgggttggattggtcttcaacatatagattaatgtttggttcaggatcatcaggatttgccaccttgatacgtggttctatcatagcagtatcaatcgaaccctgtgaacttcagagtgtcaattttgtcaaataacaaatgcatcgtagtactgatgtaatacttcagaaagtctttgaaaatacaggcttgagctaattggtaagtggcaccagtagtccagtactaatggtgaaatgaacagccgtggcattcattttgtagaccttggtctaggaaaggaatctggaagggagttcccttgtccatagaaaaccatgtgtatctcgctttataagaaaattacagttgcatttcattctgctttcatttgctaatcacagatgactcataaaaagacaatgtattgataacttttgaatgtttatcactcccagctaggcaagggaatactaggctctttgaatggttcacatggctcctataaataaagtccaatgatatttgaactacacttgagaacatgctggatggtgacattgacaaggaggcaacttccgcttatgacttgctaagtcctgctgatggaggagcacaagtcatttggctctcctggtgcataatagattttctagtcaacacaggctagagtgtttaacattctcttctctacaaatgacccattctgaatcaaatgtgctcacagactgaaaataacaaaggcatgtttagtacttacctgactacgacgccactgtgcacgaagggaagcagcttcttgaagaattctcagttcttcctcttcttccaggttcatatacagtagttcagttgcactctcatatgttaacatgtaggtaggttttatgattgaattctctatactatattctgcaatactatgaacaacacaaatatagttctcaacaattttgctataacaagcaagagaaaagcaatattaagatagtaggataccttccatctggctgcaaaatcacagatacagtaacagatttacaacccctgccttgttgcaggctcatagcattcatagcaagcctctctgggaacattggaaaggtagcagttggtaaaaagatcgaggttcctctgtgcattgcttccctgtaggaaaaaaagtaatgttctcttatacataccaatactgatagaaacactagaagaaggagaagaacaagaacctgtcaatgatgctccggggttgaaccaagcttgttgggtcagcaacatgtatccagacctttatcctaccatcaggtaatctagcagcacttagtgcatcatcaagctgagtcaccaaaaaaaagtgtttaatggatctgtcagtaggcacagctgctaaattataaccagtctcttgggatagatgcaatggcagaaggaacagaaacatgcctcatcagcttcatccacatcaatagcatacactttcaaagttgagagatccttcctgatatcctggaaagatgaattgaatgagattttgaattagtatacatcttttaagggaagacagtgagggagaggcttgctgtcagtacaaatcaacttaggctgtgcactatacttgtaaaaaaacaaaaaacaatacaaagggcatcagtatttggtagtagactaatagctgacatattaatttatagttgtacagctaaacttacataaagggaaaaacacaatatgaagaacatcaatatttggtagtaattaaaactaccttgtctgagtcaggacagtctaccagaagttcctctgcagctgacaaaacttcctcagtgtacctgatgcgaacatcatacctgtaaagatcaagattgacatgcacagggaagtatccaatatttataaggatctttagagcagctgatgaagtctttgaaaagcccatagccttgagaatctgcaattacattaataatcacacaggtaaacatcagctacaagggaaaacttaattatttccttcaatgaagaattatgttacactacaaaaacatttggttcaaactttttaaaggacatgatactttatgatggtaaacaaggattatggttattcagtaaaccaacactagtgtaaacaaatatttacttatttattatgcatgacaaaataatagtagtggtatagaatatgttacgtttcctgccgttctcctttgttcatcatcacatgcatcaactgcatatgcctgaagtgactcaatttttcgcttaactttctcctccatcaaccatgaatcttttgaaggtttagcatctagaggcaatgctttggcagacttgattaactggacaaattcttccatctccttctcagctgcctctttagcaagtttccgtcgtaagagttcctccacctactaccagatgagaaatttaagtccaccagccaatacaacaacacaagttcatacagaaaattaagagataagtgcaacctgaggtaattgggcatgtgattaatacagtttttaaccaagaaaccatatgacagtagcaatgtaaagcttaatataggaaaaaatacttcccactcagacactagatactaatagaaaaatgacgagaatatgtgaagtcaagcattctttagttgaccatcaagatatttaataaaatatctagattgatcacatcaatttgatattattgtatatgctactcacaatacaatagacttagcagtaactgtggcaccttggagactacatcgattagcaaaacgacctatattttgtgaaagaaagagtgaaaggcaggtaatttagagtgtgtatcgtgagatgaaaatcatgggtatatttaggaaatatacctgagcaggtgggcgaggttggtacacagaagaatcccggctttcgaccttgacaaaatagactatgtcccttgataacaagaagtgtgcacagtagctttccagagactccttgctaccataaactatctgagaaaacaaaagattagagttacatctgaatatggaaatacaagatagaaaatcagatggaataagggagcttctgacctctgcgaactcctctactgttactgatttatcattctcagaaagctccatccaagcacactccaaaacagtagggtcctaaaaaaaaaacaaattatgcacatgtatctatggtgcagatacatatcatgattcgtgcaacacatcttaccaaaagatcttgtgctttcttgataaattcatctattcttgaatgattgtaattgatgataccaggtataacatatgtaacctgctggggttttatagaagacaatataccattctgtacaaatagaatagctatgtcaatgaaagaaatcatagacaaatagacaatgacaaacatatgctaagaaacatactcattatcaatgtttactctattgaatatagacaaaactacagtaattgtttcttttgatacctggtcagtcaccttccagtttttctttccatcgggcctttctacaacagcaagcaaaaatctctcagaatctttctgaaattcaagaagcaggcctttctgcaatgttctcttatctatcttattgtcagacagttcctttgtcccctgcaatcctatcctgaaaaagggattccaacagcaatctttagtatattgtcaaatggttaaatcaaacaattaattattaaaactaaacatctgtatgcaaaattttcagaactagccattaacaccttgtgataagctaaaagaaaggaagaaagaaaaaaaggaaacactcatttatcagaaaaggccagtgcagcagtgtcacactaatatagacatcacaatcacaatatactaaatggttgtaaatttggacaataaatggctgaatatctacaagtatatatgttaacggattttccgcattacagtataaatttcactcaacacatttaccaataaaaaatcgtgcaaacattatttcaccttcccagaagcacattatatagaaacagctccttgagtaaattatttgattacttttgttggtacataaatagttcacagcaacagctcataagaaaactatgctcacctacttgcatcaataaagaatatactatggccactggtcaccgctcaacggtagaaatgtcaattcctaagaagtttatcataaccctatagtctgtttggtttgatactgatgattgccattgtttgtcttaccaacttttggtaccattgactggatttggccagcatttggtttgctaaaagtgttcggaggattccttccattagctccctagttcattccttaccaaactttggcaaggagtgctatggaaaatttggcacaaactaccaaaccaaacacctctggggcttactcactaggcaccaaccgatgaagttttactaaggaatcaaaactcccttgtgcacaatttaatgaggaaatacatgcggattagtaactcagtgtaatgtataacttggtagctactgccaatcagctccaagtgcacacgcatacaccaaccattacaactcaagcatgcaaattatgggttcaaaatgcataggcaattcagtctagagaatgacaagggcgcgttactttgccgaaacccgaccacgcctctgtgatcggagctcctccaggacggagtcgacgaggccatggacctggcgtccccggcatccgccgtacagggagaagtgccagccggcgcgagcggagtccgggcggacggcgcggccgaggggacggaggcggaagaaggcgagcgtcgccgccgccgccgtggagcagccacccgccgcccgcaccgccatgggcgacggcctcatcgaacccgccgccacgaagctgccgccggggaggagagggtttttggcgataagagcctcccgcgagtggaaggcgaggattcaacggtgcatcgagaggttagcaagagggacaaaaatcccacgaccgcaatatgagccgccggtttcgtgtgctggtcccattatggaataagttcaccagagggtacctcaacttaacagcaaaattattttgagatcccttaaccacaacaccagaaatatgtacccctaaattcactcaaactgtttaaaggaggtcccatggaagtatatatgggtggtttcactgacgtggcatcctaggctgtgttcgttacttctggatgggagcaaatccctcccacatagaaaacggggcggtacattaacacgtgattaattaagtattagcaaattatttttttcaaaaatggatcaatgtgattttttaagcaactttcgtatagaaactttttgcaaaaaacacaccgtttagtagtttgaaaagcgtgcgtacaaaatatgagggagagaggttgggaacctaggttgccgaacacactcctagtcatccaaaaatattaaaaaaaatacgggggcccacatgtcagccaccctctcctctcttcttctcctctactcttttctcacttctctctgcttttcttcggtgagggaggccggcggcgggcagtgcgcgcggttgccggggcggagcaggcgtggcggcacggggcggccgggggcagagggtggcgcggagaggaggagaggaggccggcccgccggcgaatggcgcggattgggggagagaggcggccgggatggcgggagtggcgggccgggcggagggtagtgcaaagagggggagaggaggcgggcgcatctatgggcggcgcggattgggggagagaggcggcggatactactggagccgcgggcggggcggagggcggcgcggagaggggaagagaggcggtcgggacggcggaagtagcggacgagagcggcaagcggagcggtgagcgagagctgatagcagagtgactggcgagcgaagctagccgtggacggcgggcgatatcggtggcgctcatcatgctccagctcttcattgcctgcgtcgtcatcgtgttggttgacctccatgagcgcagcaggcgaaggagcggtgggtggagggcggcgggcaagtgcggcggagcggggggcctggtcagcaagggtgagcagcccggcgccatgctcacccgcctccactgtcgtcggccatcgacttatttctccccctttcctcgtcgtcgtccccgcatgccgtccgccggcgcgcttgcctcctctccccctctccgcgccaccctctgccctgcccgctgctcccgccgtctcggccgcctctctccccctctccgcgccgcccgccgctgcgtctgcctcctttccccctctcccgcttcttccccgcgtgtcgccgcgcccgctccgccccggccgccacgcgcgctacccattgccggcctccctcaccaaagaagagcagagaagtgagaaaagagaagaggagaaaagaggagaggacggctgacatgtgggtcccacatattttttattttttttactgactaggatgccacgtcagcgaaaccacctatatatactgtcatgggacctcttttgaactatttgagtgagtttaggtgtacacatttctggttttgtggttaatggacctcaaaaaatctcgttgtcaagttgagagacctgcggtgaacttattccgttagcttctggaagattcgtgattgggcctcaacgggaaggacgggctgattgggccatatgtgggccgtcactggtaacatttgaatttgctgcgggaattcgagcttgtgtatcgagggtgtgactcgtttgttatacgatctactgcccagattttcgtagaaattgaagtgctctacaaaatggctgtaaagttcaaacgaaaattcactaatcttgatgtaatgtgattgagaaggtccgaattgagttttataccacagtacagagacaaatgcaaaccattggatcctcagggctccatcggtcctgaacctgaactgtggtcaatgctgtaaatttgttcattaattaagtttatgttttccaatgtcaggattaactttcatgtttcagctctcgagctccttgggttccttctaatggcacatgtccccaatagcctcatcggttattcggttaatataatcaagagctgattatatggcacacagctttattagtgattgaaaaataatttaaaaattttatatatatgtgtttttaacgacttaaaaataaatgttaaaagagatattatattaaaaataccataaaatcaattttaaattttaagttttaactgtagctgaatttatttatttggtaaacgatgaggcttcttttgggtggcagccagagcaccgaatcaatctgggatccatggccgttattagcaattaatttgcatccacgggatctggacaacacgtagaccttctagaagataaacatgtgctacgacagctacgtactgtcattgcaaggacgaagacgctttgtgtgtcccctaccgccctgtcagagaattgctatacagaacttgcaatgcgcgaaggctgtaatgcacaatctaaagtagtgaaagaactctaaagataatttcaaacgaagctgcttgattcataaatttgactataaagataattaccaagtgactcaatgaagtgtgcaattaacagtactgttgacgctctttcagcatagcagtataatagtattatctccgtcccaaaataattgtaactctaaattatttagcgtatattaaggtttgagaaagaaaaaagtattgtactctaaatgatgtataggatatagcgaaagaataattatgtagaatactaggaagaaaattaaatgagaagtgattgataggacaattagtactttattgtgacatttattttaggataaatttaaataatagtagaaatacagttaccatgaataagagtgtacaattgagactaattcagttaatcatttttttataaagaaagctttattaatcttagacaattatatcaaagtgatacaattactctaaaatcaattatgacttctgcatagctagaatgcacgctgcctacaataaaaaaataaataaattgcttcaaaattaaaaaggatgacatgacagcaaatattatatcgcagcaaactgcacccaaaagtactttaagctcacgtcgagataatttaggtgcctagtttattctcagtaaaaagttgtcttttttcttttcaaatttggtcctatttggctggggaatagtgtattaccacctccgtaaaaaaaatacaattctaacaatacacctagtattaagggaaaattaatgatgtcataattaaagaacagtgcgaatgcaactgatgtccttgtattatgtcatcaaggcaacatgtcatggtcaaacccaactcttctcccaaactgatcaagaaaattttcgttatctgctcgagctacgtgccccggacaactccgagaccgaagctgcaggaaagccaagtcaaaggcgacatctccaagccccatctaacctcgctcgtggtcaatatgctactttctgctatccccaggaaaaaaaaattgcaaagcaaagcacccttaaagcttggggcatacgagtacactgcaccgggacgctgtttggtgcgcctaattaaacaattcttacatggctgcttagcccacaagacagtcggcggtcagctgacggtcagtgattagcgattaattatatagaacgggtttgtgctttgttagtgcgatgtttcatggatgcatagaaaatagaaatgattgtttaaatcaaggcagtttcttcactcacagtctcacacctgcatgcaaggacctgcagcaaccatggtaccaaactaccaggaaggtgcttaggcttcttccaccacaagataacgaaacacatgcaacgaaattattgagactaacctgatcaggtttcactgtttgtttcaggacactggcaccaacgctttattagcaacatactttatcattactggatcgccaattagcgtttagcgatgacagcatgatctgaagcaggtagatcagaaacattaatttatgttttggataacgtgataattaaacagatccgaaagtacaaacaacgagtgcacttgtacgctgtcacagcatcagaacttcacaggaagtcaagaagaacagagcgctatatgaccagatttttctgacttctgacggcgaccgtagttgcatgcatgatcgaccagtccttgctggattatggacattgagcatgtcatttcgtacgtgctgtagtatacagtatactcgtgtggtctacagagtatatcagttcgattgagatcgatggatatatcagagagatcaagacttaaaaccgcagctagcaaagtctggtttcccggccagctagctgatcaaactaaatgacgacatcaactaaaattaagtgacgtttttctgatggctgatgcatggcgttatatataaaatatactcagtgggcacatgacagactaataattatataaattaaagaggaattttcaaaggcgtgcagtttttctcgtgttaaaattgctgacagtgaagtgttgacggtttgtatcggaccacgtattttacaacaaacttctacggtaacagctagagctagctgtccatgtagatatccaactagccaataagcgccgtgtgtcaattatctgaattataccctatttgtcgtggcatacatggagtgatctgaccaaaaaaaatgccgaaagctagggtgtgtttagttcacaccaaaattagaagtttgattgaaattagaacgatgtgatgaaaaagttgaaagtttgtgtgtgtagaaaagttttgatgtgatggaaaattagaagttcgaagaaaaagtttgaaactaaactcagccctagtagtattaattagctagctttgtctactactccttctgtctcaaaacaaaaaaatgtagagttatatgatacatattttaaaattacatacacatttatagttctagcatatgtcatattcagttaaaggtttttatattttaaagagtaaattacactttggttcatgttttattacctaagttgcacattaggctaggcattagcaaaacttttcactttagacaagattttatcaccaaattttgcaagttggaccagtggcccacgcgtcaaccactgatgtcttcttcctcaatcctcaatcccctacgtgcttccctgctccctcccgattcaatcgaatccactgtgagctcctatggttaatcccttcgagcacgcggacctccactggtgagctctttctagccttacaaactcaccactcatcactgcgccaaagcagacctgcttgagcatataccctgtgccctacatgcagtgaggagtgagaagcccccacatatcccatgattatagctcaagctagccattgccggtaggtaggctccctgacctgagttagcgctagagctcaagatcaaactctaacagagctgaccccgtacgtatttcatctaaatcttcctgtttgcgctacgccatcccaagctcatgtggcagtatgtctaggacaatttgaggtagcttgtcgtgatgggcaatgaggaacgtaggtggtggaggcatgcaaacctgttgggagtaaggaattgcaggttgagatgcaattgcaaagatctggagctcaagctttagctttaatggtggtgtggtggtagctcgttgccgatggtagccaagaaaggatcaacctagtccattgtgaaacatattgtaagaatacctggtctcaagtgaaagcatgaggtagaccctggttcatagtgcaagttgggtaaaataaccttgcccaaagtgtaattcactctattttaaaacgaatggagtatatatgttgtttaaggataagacagtaatatcgttatttctccattttatatttgacagccttctttgtttattttacaacctttgtagattattttaaagatatattccctctatcctaaaaattattcaatccgatgtgtgtgtgtgtctatacacacatacatgctatctagatacatcttcacgattgatttttttcttttttgcaagaggagtagtccctccatccaaaataataacatcgcttttttacccatttcacacataccaatataaattaaaaaatatctttcactttatcaaatcctaatataatttcactttattaaatcctaatataattgttcctcactttatctagttcgaatgtatttttctcacttttataaactctaatgtaatgattacttaaaagatacaaattattttcaggacaaataagatggtgaaagataggttagtttttatgagggagtaagtctagacttggggaagcaactttaaatggtctacgtggttacgagtgtatatacgattccaatttaaaatagaacgtttccatgctgatgtttatgtatttaattaaattcagtgcgtgagaattttgtgagcttctcgcggatttacactgccagagagtgtggtgtcacgatgaaacgacacgcatgggtgtattagtacatatatgagtggtgcttgatgctacgtcgtgtaacgtacgtgtagtaggttgctaattgagcatgtccatgctgtcatttcgttattagtagttgtaacaagctttcttcagccataatgcacctagcacacctttgtttacagatgaagcaatcgtaactgctactgtactagtactatacgtacgattaatgcatactgtacgtgatgatgaatgacacgattgtttatgtccgattgtccatgatcacacataaaaagatcaacttgctatatataaacaccaaaagaagattgccccatgaattaaaaaaaccttaaaaacaaaagaaaagcctgaagcccctccaaaatatagtactaacatcctcatgttgatccgaaaagattcccacctgtcagtgttgttggtcttgtggctcaggtccaatgtaccaagaccttctagaaggaatctatgggggctcgctccacttgcatctgcatgcatgtgacgcagctcgcatggagtatataggagtaaactaacgagtctcaagaaaactaatcatcgccatataccgagattttgagaaaactaatgaacaaccaggtttatttggttatgggatataatcgcttcttaatttgctcaaagcctgcaatctaaccaaactgcgagaaggtctttgccacacctgggacccgtttggttgacaatcataagttgctatcaaactgtcaaactcaaattaagattatgtgctcaaaatctaattagcacaccttagcaagattaagataatcttgtcatcttttcggagtcattagtaatagtatgtactgtctaattcgctagaaggaataaaaatcatgatatttaaacttgattaatcttaggtgtgacaaaatcatgagaaattgcgtccggcaatcaaacagacccttgaccacatcagcctcttgaataaaagtatttcttcttatttattggatttattagactttatcttcttatttgttgaaattgtttagttgcttgtaataaatgatgggagaatggcaaatataccactacttaattttacctcctaacttggaatagccattaaaaaaactgcaaatttaccactagaatagcttccatttaccattgttgtttgatgtgtgcaattaagaggctaaaaataattcataaaacaaatgtgaaaaatcaagggaataataagaccgattccctatctgcctctcttcaaaccctggcagcactcatttgttccctttgcccatcccctcctctcttccttgaggaaacctagatcccaaatccccttattacctgttcttttaaatcgagagcaaattatcggatagatcggtcataataaggtacaagatggcgatggaagagttacaggatatgtattttagccggtagcaaatcgagcaggcggcggtggcggcttgggtgacggactgcggaggcacgcgcaacagcggtcgggtttgcagcggcttgggcagtagcagcagcaggcgactgcagcttgggcctaggtaggcgctgaggcggtcaattatggaggtagctacaaataaaaacgacgatggcggaggcgggtgttgcggcggtcgattatgcagtctattgcggctgagaagccgcaggcgcagcagctaactatggtgatagcagatgagcagcatggactacatcaacaacaacaacaacaacaacaacaacaacaacaacaacaacaacaacaacaacaacaacaacatgaggatggctgttaatcttgcaaagttgtggcagctgttactgtggcttttataattttcataaaaccaagatttctaatgatgtttgttcaatctgtcaatccgatggcagatagtctaggttcatactgtattttaatggcaatgcaatcacatttttcttaatggcagattcacaataacaattcaaaccaataacaaatatgcaattggcccataaaaaacgaacctagtaccgaatgtaacacatcatagtacttgtccatagtactaggatgtgtcacatccagtactattggttttttatgggatagaggaagtaagggggtgtttgggaaggagagactaaacttcagtgattgagcaaataccacccaagtaattgagcaaataacagaactcgtttcattgtaaaaaaaaaatgcggcggtatgtggtggtaaccactggcactgttccccgggcctcgctcgtggtagacgacggatgccgctcagctgggtgcacgacgtactccacggtgtaattcatgtgccgtttcagatgcgtgagtgcgtgacgccgtgaccccgctcatcctggacgcgtcctgtctgtccttcgtgcgtaataaagtgcgtgtgtccacatgccgacgtggaggaagggccccgcagccccgctgcgacgcaccacgccgtctgctgatgtgtcgctcgcgctgcctcgggccagcgtgcggccggcgtgcgggagcggcgtgtctggctcgggaccaccacgtggggccgtgggggaacttggtggccaaggcaattctgtgtccgtggccttcggtgaacccggcccatgcgccgtatagtataatccacacatgacacagcgcaccgcgccaatcacagtccaggaaccgcgagaatttttttatttttaacttggcgagatttctcgctgacacggtcaatcggccactgcacacgggagtgtacaggaccaagcgggtcaattacggctaatcctaaatacagcgacgacgggcggttcgtgggtactacgtactagtagcatatatccatcttagagtaccatctaaatctatgcttctaatttatagtactctggatattttctcacggtaatcatagaaataaaacgcataaggtaaccaaatataacttaaaacagatgaagtttaaaagtcgcaccaaaaagtccaaactttaggagacatcaccttctgcatccctcgacccttctcttcctcactcaagtctacttttccttttgtgttctgtctgtacatatctaatgctcttgagctgtgttatttcttatggcttcccaacctatctctatcattttttcatatgcacgcttttcaaactgctaaacggcacatgttttgaaaaagtttatataagaaagttgctttaaaaatcatatcaatccatttttcaaatttttatagctaatacttaattaagcacgtgttaatttatcgctctgttttccgtgtggtggggaggggttccaaaagaatacagccaagtgtgtaaagcgatatactcaagtactcaaccctagtacaaaggtatgcgctttacaaattatagaaaagaattaaaacagttgaaatttagaaactccccaaatttaaaatgttcacgttaataaaaaaaacaaattatcaaccctagtataaagatatatacacgctatttgcgtattccagaaataaaattaaaacaactgaaatttagaaactccccaaataaaaaaatgttcatattaataaagaaaatcaaattaccaccatgagttaagaatactactatacttgatgtagatgtagctcgtgcatgcaggcactatatgagctgtctgccacagttaggggatggccatggatggaccgatgccttgttttctatcgacgtcacgatttatatctctgcgactatgatcacatacggatgctaatgtatgtacagtacgtaaggatggtcacatgtacaggttataatatggagcaatccatgtcgagtcatcggtattctatatgccaattggtaaattaagtagtacggagtagtagttagtcagtcactcagtcttattgcttagttgcttaagacattttgtgtggagttagctgattaattaaatatctcttgccaagggaacagcgaattgatcatcgaccaaatacttggttatttgctagctactcaaatacactcaatacttgatcacaacgtacgtctacacttgtactcttcgtctacgctcgtctcccgagtttatagtgcagacaactaagtttcaaaaaaaaaaaaaaaccaagttcgtctagaattggcctttcgatgtgtaaaataaatatgcgcatgacctatatacttcaacctgaacgtgtcagaaagaacatagattgaacacgcaagctagtgggtgttaatggcgtgcatatttcatcaaattcagtgaggctatccattttacatttccccgctaaaaaagataagggtatgaatagagttacaaagtctagcattttagcgacccacttactctctcctagaataattagatattttattactaaaaccaaggagaaataaaacttcgaccgtaagctacttggttgcatacatgtacgtgggttgctctcgctattattaacgacacgacgaaattaaatgctgcatgcatgtcctccattcaattaaacaccgcatgtatattttcccattcgtaagatgctcttttttttctccttatacactcatcatccttgtatagacttaaaaaggttaacaattcttaccctaccaatcatctgttagactatttggctctgtaggttgggatcttctactcactcgtttttcacagacacatttctcgaacggttaaatgatatgtgttttgcaaatattttctataggaaagttgttctaaaaattatattagtccattttcaaggttttttttcttcaaatacttgattaattatgggctaccttatttttcgtgcagaagaaataggttgaacacactttcgaacacaaccttaattttgaatagtacctgctacctatatgaattgaaaccaattcttgccaattcgatagagttgaaacaatacaacactaccaaaattttgatagtaccaaaacttatttaaaatttagtgcggcaagtttttgatacaacttcaaaccaaaaacaaccctttctatcaaactgatgccaaatttgatatgtttgcagctgcacgctgctatcacacccatctggctagagtcaccaagctgctcaatcagtcaaaccgtcaaagtatcgaccaccacaacaaacgtccccggtgatgatgtggatcaccacaacaacaaaatacttctggcccaagtcggccagtaatcaacaatccggtctacggacacggtccaccccccgcacccagctctcggcccaggaggccgctcgcgctcgttccacgaaccttccccacggcgcaacccctctccgtgaacccgcccgcatcccacctccgcggccgtggaccaggcgcagggaaggtgtcgacacttcggctgcgcgagcgcatagcctcggttttaatagtcggcgaacggctcgggccaggccaacctgcgcctctcgaaaacactggtccgcctccgttcccctctcctctcggctctcttatctcacccttcgtttcgctcgtctccctcccgccgcagcaggtacgcgacgcgagctctcgtcggctgcgatgttgtgcgtgctgtttacgggtgacgggtcggactagccggcgcgtgggctcgacgaggcgctgctccttcgtcgccgcgggtttctgatttttgttttaattttcgtggtgttttttttggcgcatttgctaggtggggggattcgagtgttgggaggtttgcatgctctgtggtggcggtagagttggtggtggtggtggatacagatggtcatggatgctggggtgcacgacgtgtgcacgatgctgcccggatccaagcgcgacgcgcacctgccgctgccaatctacccccaaatcgccgccgccaatgggttcgcgacggcggaggagttcgacccgctgctgttcctttcgcccgatgcggtttgcggcggcggcggcggcgactacctgaatattgtctccgcgcagcccatctcggcggcctccaccaacggcgcgtcgccgccgagagatgtctcggtctctgcttcggcggcgtcgtcggcggcggcgcagcatgacgactccgaggctttctcggatatcgtcctggggtacatcaaccgcatgctcatggccgaggacatcgacgagaagttcgagcactacccggtgaacgccgatgatctgctcgccgccgagaagccgttcctcgagatcctcgccgaccagtcgccgtactcgggcggcagctcggtcgagagtcccgacggcagcagcgccgccaactcctgtaacagcctcagtccctgcaactgtagctcgtcctccgacgggcttggcgccgtgccgcagacgccggtcctcgagttccccacggccgccttctcgcagacgccccagctgtacggggatctgatccccacggggggcatggtggaatcgggcggcgcctggccgtacgacccgacggaattctatcagctccagaccaagccggttcgtgagaacctcccgtcgcaatcttcgtcgttcgcgtcttcgaacggcagcagtgttactttctcagaaggattcgagtcgttgctgagcccggctggtgtcttgcctgatgttagcctgaatgattttgttgtgcagaaccaacaggctttgcagttccgccgcgggtttcaagaggcaagcaagtttcttcctgatgagagcaagcttgtgattgatgtggataagctctacagtggagatgaggggagtaggttccttggtgaggttagacaagagaagaagcttgtgaaggtgaagacagaaacctctgatgttgaatcagcaggtcaccgaggaaagaagcatttctatggtgatgacctggatgcggaggaagggaggtgcagcaagcattccgcgcaagggattgacactgaccaccttgtgagggatttgatggacaaggtcttgctatgcaatggtgagacatgctcaaaaggtgttaaggagttgcgtgaggctctgcagcatgatgtggcgaaacattcaggcggaggccatggcaaagggtccagccatggcaagggtcgtggaaagaaacaacccaagaaggaggtggttgacctggagacccttctcatccattgtgctcagtctgtggccactgatgacaggcgcagtgcaactgagctcctgaagcagatcaggcagcatgctcatgccaatggtgatggtgatcagcgtttggcacactgcttcgccaacggcctcgaggcgaggctggcaggtactggtagtcaaatttacaagaactacacgataactcggcttccatgcactgatgtgctgaaagcgtaccagctttatttggcagcttgcccatttaagaagatctctcattactttgccaatcaaacaattttgaatgctgtggagaaggccaagaaagttcacattgtcgattatggcatatactatggatttcagtggccgtgtcttattcagcggctatctaacaggcctggaggcccaccaaagcttaggatcactggaattgacacacctcagcctggtttccgcccagcagaacgcacagaggagacggggagatatctaagtgattatgctcagaccttcaatgttccttttgaattccaagctattgcgtctcgatttgaggctgtccggatggaggatctccacattgaggaggatgaggttctgattgtcaactgcatgttcaaattcaagaatttgatggatgagagtgtggtggctgagagtccaaggaacatggcattgaagacaattaggaagatgaacccacatgtgttcattcatggggtggtgaatggatcttacaatgcaccattttttgtgacacgcttccgggaggccttgttccactattctgctatcttcgacatgttggagactaacattcccaaggataatgagcagaggttgctcattgagtctgctctatttagccgggaggcaatcaatgtgatctcttgtgagggactggagaggatggagaggccagagacatacaagcaatggcaggtacggaaccagagggttgggttcaagcagttgccattgaaccaggatatgatgaagcgtgcgcgggagaaggtcaggtgctaccacaaggacttcatcatcgatgaggacaacaggtggttactacaaggatggaaagggcgcattttgttcgcactgtcgacatggaagccagataatcgatcatcttcatagcttgttcagctctaattattgcatgatattgtaaatgtagacctgttcatatttttttggggggcatttggaccgattgttcctggtaggcaatatattgctaggtatgttatttgaacaaccaagtaatgggaaacttctgcttaggaattgtcttatatgatgatctggttcatctctgtccgtacataagatgaacccgcctgttcctagaatctctgcacatttgttgtgatcattattgttgcttccgacgggaacagttggttcaattttggtggagctgctagatatgttgaagttgtagaccttgggttgtcttatgtatggatgagccttgtacagtatttcttccaaacattcagtacttgtcactaagttctggttctggataatctatcatgcacgtgcattctctattcgtacttgttgaattgttcgacctgtttgttgaattggctggcatctgttctgttacattacatctggggttgggaaaggcaagtatgccaccatggcaacttgatactgcattagcgccgtgtcgcatataggcaatgtgtttatccatagaaggatagtcggcaacgtgtgaactgttgcgtttgccatatcacacgaatgatctggcgcctactagctactgctggaatggaagaaatagcccgccacgcgcatcactctctcctgaaaatcacggcgcatcttctaaaatgccaaaattagagcagccatttttttgccgtatgcgtcgtgctgatctgtctcgtcacgaatagcaggaaaaataagatcagtccaactttgcaatgaatctagacgcgcctgcattgcaaggaagaactaccgctcaaaagtgcaacagcgatggatgctgcctgcagggagagtccagccgtggtagtaacacacacacacaaaaacctgtggctacagtaaacgcaacaaagacacatccacacaacacgtccacgtataagaagcaaacatagcacagcaactcagcaagaagcatcggtcacggcagaaagttaccgcccagctcggcgataaacaattacagacaagccaggtcgtcgtcactcgtcacacacattggcggcttggcgcgaacaaatcggcaaatctgtcgtgcgcggccaagacgctaaaccaagatgataaaagccgcggacacccagccgctacggacgaggagtacacgtggccgtgctcccctccaaaaaaagaaaaatataccgttcacactaggtcaccactcaccacaagtgcaggttcagctcaatacaggttcactgaacacgactagcagcagtacatgttggcaggaagaaatgaacaatgcgatcaagcagaaagatatactactccctccgtcccataatataagtgattttaagtttttgtttataacgtttgaccactcgttttatttaatttttttttcaaaaataaaaaacgaaaagttgtgcttaaaacactgtagataataaagtaagtcacaaataaaataaataataatttaaattttttttgaataagacgagtggtcaaatgttgcaagaaaaaactcaaaatcacttatattatgggacggagggagtagtactttggtgtctgccctgggtattatactgctcaactggattcggttcgcatcagatgggtatatacaaaactcgcaactgcatcagtttttataattttttttatgtacggcgtgacagcggtggtactgtttgtgtgaaggccaagttgagaattttgtttgcagcataatgttccctcgagtcgtctccgtgcagtgtacacgtgaagaaagtagggaggcagcaggatgtacaagaatgccgtcatgcaagttgtggtgtcaactcgcgcctaagacggaaaagaaaattggttttgtctgcccataggcgtttgacggagcaaacaggggagaaccgattgatccatttggattagtgtcaatcaagtgtcaacgtctctgggaagcctagatgaccctgctttggtcaatgttgatagcgacggatgtggagagattacagtgttgagttgttgacgaggcgaaattacatttggaattcgcaaagagtacgactggctaaaggaagaagatgtgaaactcgtagctgggccaagtccgggtgagccacaggcccatagtcttagatgctgtggcccgcttaggactatgaagcccaaatgaaggcccacttaggaccatctgattagtcacaaacgaagattagtcaccgttgcgctgcattcacttcagatgaaaatttcctccttcaagaagtagatggcaatgcgacatgtgcgcttaaatgtccagttcttctttcgcaagctgggtcggctcaatttggcgttagctgttatgtagctatctccgtgtgtatcggaaaattgtacagcccaatcttctttgtcagcaaagacatacgagcacctttcagttatgctgtccatctacctagaatcctccttgcctccttcgctatgtatatttctcaatagcgactagaatccgcataattgtcacgtctacctagaaatcgctagattcagaccgaaggtacatttgacatgggcatcgattgtgacatgtttatgagactagtttttgttgatttttctgctgtttcaggtcatattgggtgatcactgttggaaatttggtcataattcggcatattttaatccaaaataacaagataataaacatgatatttacaataggatttgatccagtgatagtggtgaatgtaatcaacatgagcatgcttaacgttgaataagcatcaacaatcacataatgacacaatgttgacattgcgatgaacattaacagtaaaacttctaattgaaataatgtaataagattataccccaagaatggtcctccgctggagtttgaggcagtattgcctccgtaggtctcttggtccatgtacatgtgtgaacctgtaatgcagagttaccatttatcttggaaatcatccatatcttcaatcaattctctcctagtagtttcaaggcggttcaaaaaaaaaaaacaagtgaaatccacatatttatctagtttggaacaaagtgcacaaccatgaaattgagaggttccatccacctgtactattttatttattccctcacctcagattagactcatgctgtaactaaggtatttgacatctacaaatggagcctttcaaagttaatttctactacctgtaaagactgttgtcaggaaaaaaattcaggtttaaaaaaataggaaaaagattcagagaaatacagattaaatgtaaccatgttctgatgttctgtttcctgcgtctaaagaaacaacaattcccagagcaatgaactatgttcaaaaccaattcgcgcccgcatttggttgatattgtgttcagctgtgtatcaatgttatcgcctcatctcacctagtagtaaaaaggcaattaatccagagagggaaaaggtttagttacgatgtgcgtctcgcagtcgcaggcgtataagagatagctgagcggcgaagcacggcggccgtcatcgtcatacggcgtcttctctggagacttgattcgtgaactcgaagaactacaggagcaattttctggatttttccctccgtaatcatgtgtaacatccaaatctggatagggtgaattggtgaaatccattagatgaaaaattggtggccaagcagacattttttttggataccgttagatctaaactgcacggtccacgtcgctcactaggactggatggtgtattttcttcaaaaaccccctttagtttccgagtattatatcgctcttacatcgatcgtctctgcacctcgtccccttcctcgccagcgccgagcacaaccaacctctgacagtgtggtcattgcgcaaagtgtaagctattcacttcgcgtgaaggataaagcttacctcctccttcaaggcgaaaatgacgtgttatgttggatgccagattctccagttttgcaagcagcgccatcgcaattttggactagctaatgtgcagctttcccagcctctgttccaaaactgtgtggtagctggagtctctgctttgtcagcaaggccagatgaacacacctaacccgtctctctgcgttgtgctgctgaactgcggctatctgtacagaatcagatataatagcccatctaccttaacagtcactagttttagaactataaagcttgttatatggatttccaggttattagtactatttgatagtaccttttcttctagttggagtacttgattagtttttgtgccatgatccgtgcaccggacttgttttggttggtcttgttgctgtctcaggatctgtgagctgatccatgtacctgtctgtaatagtatttttaattgccccttttattcttatgtaaatacagcatcacctttctttaggagttaaaaccatcgtttactctttaacttatcagctgtagccaaactttaaattttacaactcaatttttgagttgatttttccatcatagtttatttgttttattgacttctctgagaatacatatataaaaactttacgaccaaatcattttttattggtaataagtgttacgcttataaataattaactgtaggtgaaatgatggaagtaatatattttctcttgattttagatagtttgaattcaagttgtgggaaacaaatccacagatttgtttaattgggaaagaaaatggatactcatgaaagaaaaatataggcaaaaaggacaacgtacaaggagtgttctggaacagtttcatgcaattaatgcccatttttttattcaaagaagcatcaaaacagtgtcattgtatagttgtacacaaataaaagaaaaaagaacaaaataatgtcacaaaagttagctaagaacgggctaacacactaaaatctccttcaggagaaagcaatcgcaaattggcgaacaaatgaaatgaggaaagaagaatcaacggcatctgtggtaaggtcccgactagcatttgggcagatcggacggcggaggaagcagcttctggttcggatggctcccatccaacactagccatgccatcctcaggccccacgtcgtgtgcgcctccaaatgacagtgcatgaaccatacacctgcacgcacataattgcacaacaaaaattattagcagggtagtactatatctaagacgaatttcacgtacactaattgcagagataactaactaactaactcacctgggttgtcagcgaggaaacggatggccacccatccgccggccggcacgccgacggtgttgcgctcgacggggtcgacgaggttgaacttggccgggtcgttcacggcgtcgtagttgccgaacccttggccgatcacgaagaagttgaagccgtgcaggtgcagcgggtggctctcgatgcccaggatgctggtgtcctgcatcaccagctccaccgacgtgttgtaccgcagcaccagcagcttggtcccggtcttcacgttggtgttgttcggcggcgtccccgtgtagttgaacggcgacagcggcgcgacggggaagtccggcgcgtacacgccgctggagagtccggtgaagtgggactgcagcagcgccctcgccgggagcacgaaggagacgttgttcatggacgccgccatctgcgtgttgttggggccctggcaggtcatgttcgccgggcacggcagcgtgcccagcccgaccgtgaagaagaatcgcttgtcaaccgactgcggcacggccgccgggtactccggcgtcgcgaggctacggagcttgtcggtgaagttggtgacgaagtcggtgtcgttgagctgcggcagcgtcggcttgaacagcggcaagcccttgacgaagctcgccgcggagggcgacatggcggggttctcgtactcgaggatgccggcgacggtcgtgttgccgaaggtcccaggcctggcggtggagtagggcgcggcggacatgtagaagttggcgccggggtagtacggcttggcggtgaggagcacgttggtggtctgccccggcgagatcaccagggtgtcgacggtgaacggcttgacgtagacggcgtcgacctcgacgacggtgagcgtgtggttggcgacggcgaagaagagctcctcgttgagcgcggcgttgatgaggcgcagcatgtacgttttcccgggtttcaccttcagcttgaacgtgtctgcatccacgcgcacgcacgcatgccaacggtaaccagagtcagcacgtttcaatattcactaatcaccagctaaattcttcgacggcgacgtgcatgaatggaaagcgcacctagctcccctagctatgtcgcaactaagattttgtttacgtgacaccagccggacccaataacagagtttgcttttccaatggaccaaaaatgttaggtcgagtaccacgctcagatcccacgacagtgacacaccgcattaattcggagcaacaaatgcacaatcccatgcatctccgttacgagaaaggaacacggaatcttctccgtccacctttggtgatttgatctgttaccaacctccggagccgaattctctcacgcgccaaaaaagatgcaggaggaagcacagtactcgtgcacggtaacgtttgtctctgttttttttcttggaaacaaaaaaaaaaggttattaatttgtggttaaccgggcgaaatgcacgtaccttgggcagagcagttgtagagagggccggggaggccgttgatggtgaaggcgtcggagacgttcgggcctccgccggtctggaccgcctggttgaccacctcctccgtgtccgcgttccaccactcgcctacgcgacaaacgcaacaatcaaattaaaaggtagcgagcccctgatcatgcaatgatcagtaagtatgcatatatgtcgcgacgttgcgtgcaaaccgacgcgatgcgcgacgtcgtacgacgacgtaatgcgtgcagcgtgcgtacgtacgtaccgaagatgacggggacctccttgtgcggggcggggaaggggtaggggacgccgagcttggggaggatgacgagggcgccgtagacggtggcgcggagccaggagatgtgggcgtgccaccacagggtgccgcgctgcccggccaccgtgaagttgtacacgtagctctgccccgtctggatcgggcactgcgtgatgtacgccggcccgtccgcccacccggtccgcacctgccggacgccgtgcctgcacgtacgcacgaatgcaccatcgatcggatcaaaaaactaaagcgtgaggaatcgtatcgatcggtacggtggcttaccagtgcaacgagatgttgtgcgcgacgttgttggtgacgcggatgacgacgcggtcgccttccctcgccaccagctccggcccggggcactgcccgttcaccgtcaccatgctcttggtgttgcacagcctcgtcgcgttcgccatttgcacctgcatgcagatcgatcgatcgatcaatcaatcaatcaatcaattaagtttttcatcaaggcgagatcactttgcattggctatgcgtgtgcaggcatacattgaattcgtagtgcctagtgatgccctgagcttggacgatgagaagcagtagggaagccgccaagagtagagggctaggaagagcagaggagatagccatggtcatcttaatttgtgtagcctaagctttgagccacaatctgtaatggctcttgatcagctagctctgtgagactttgagtgggagatggcctggcaaggatggaatgaatgttgggaaaaagcactcgagtcgtctacatatatataggacatgccaagtgtgtcgcaaccaccaccgccatttctttgagggttttttttttctacacgcgcggccgtaggcgaggagatacgcagcttaggcgacacctcttgtttggtgattcggtagatgaacgatcaagggaggagcttgagcttgagctagctagctagtgctctgtttttggagtgtagccaaagccagcggcaaccatgcatctgtttttcagtcttttgaccatgcatgcgtgttttgttgtatgtaccatccatgcaatggatcgatcgcctgaactgtgttgattaatttgcatgcatagtggcacgtactgtttctgatatgatgcaaaagcttgctgaaactgaaagttaaaactatgcaaactaataaaataaagaagttggtttactgcgaattggttacaatgcaagaatcgaccttttgagattcaaaacatagcactgatatcgggatgtagattttaaaggatgtactcttgttttagcgccatatcgtctagaaaatcatcaaaaacatttagagagaatgacaaaatatataaatatgtggtatattatgtattccactaacatatgtaagtttaaatatgacttgcataaatataatacaaacacatcgttaattttttttacatgtacaagttaaatttaaatttggatgtttctgaagtgatatatcttcattgatctatactgttaatttgtactacctccatcccaaaatagctaaaaatacgtatattttgagatagatggagtatattgttaaaaggactttttaatgactttttcgatgacatgtaaaaaacgaggggacgttctcgagtgccaaatagactttccacttgtccaagtaatgaaccagtgaattaagtcttgcactaaacatgttggaaatgaaatatctttgggggcatacattgtcagttgtcaaaactgttgaatcaatgtgatggttactttattcagaaactaaaacgaacggttccacatgaatgtactctttgtactttctagctgatttggttccacataaatccattcgatcaagtgccaataagtcaaacatgatctaatatgcaaataacttcgagcatgtattaggtgtactccatacatataaaatcatgacaacttaaaccaaaattcatataggagctgacatgtcagaagttattggccctatattttgataaggtacttcgttctctattcttctagataccatactatcttatgggtacattcaaggttaggttgtgcagcttaatcgaattaaacatcacacgacacacgtaccatacacgcagtgcagggagtacttcccctgttacatcgagattagctccttttgaaaagcacttcgatcgacggacaattattttgtcaatcaccatcagcaacctacatatatagtggtagtagtatagcaagctaggcatgcagtttaatttcgtcaatgtccattctgatataccttcaaagttcaccataatcatatcgctaagcggtaacatcacttcctgatatgctcgtcccttgttttcacctacagtacaatgaacctaggctttttattttttatgtatatataatatatgctcaacaatggctaagttgcatgatcacttgacatggatcccaagatatatatctatccagtaggtgcaacctgcatggttggtgtagtctagggtggcttctttccttgtactattcccaacggggagaaggatgcttgacccaaccagaccgagcgctgcaacatttttcttcgtattatattgactcgaacagaagcatgatcaacagtaagatggcatcgccaaatgcatctcgcagttcgtaccttttcagacacttcttccctgttgtttgtttatttggaatgctcaaagcatataccttaaaggcttttataaaattgcaaacttagtatatacttcatccgtcccacaatataagagattttgagtatatgtaacatatcctgaagtactacgaatctggacaacctaaagtcttttacattttagatggaggaagtaatatagtatataggaagtggattttgatccctcgagaggatatcctctcgttgtttgcaatgccattcaaatggttatgaaaaatttgaaaaaatttgagatgatgtattaacatgtgatatatcactccacaaacatgcaagtaaaaattcaacttctatatcttgcaacgaaattaacaaatttaactctaaatatacgttaactagctacggtttaatttgatttttttcgttacttataaaattaaatactactagtaaaacaaattgaacaaaaaccagtcattggttggtaggttccttatggtataacccattcaactaatttcaagccctagttacggctctaatgtttatcacatgacaacgctatattgttgtatctatcgtatattattaagataggaagaaaagtaaccaccacacttttactctaggtccagaaattaacgcttagtagaaggaaaagaagaaaaatatgcactatttgataatgatagatctagattataacggctaatcaatatagttggatactactactgtatttgtgaaaatataagcaatatttgcatgtcaaatccagttgtattttgaatataaaatctatagctacataaaaaattgcccgggaaattctactagttaatatatgtagaataaaaataagttatatagttcttaaccaaagaatacgaatatataatagctcatctgaaacgacatgctttattcagaagcaaaatgtgatatattatttgttattttgttagtagcatcgtggaaatccatacccattacttttgaatatgaattgcataaaagtagtgagatatagggaaaaaggcaatcaagattttccattcgagtatcatctttcttcaacatgtgtgtcagagttatggataccatatacctaatagtagttgactaaatctcggcaggacccaccacataccatgtcttctacggaaacaaccttcggatataggaggagttccgcataaggaaggatgaatagagttctacatggaaacgacaaggactactcggattgtatccatatggtttccttagttctactagcttggacaaggggacacctatgggtataaatacaagaccctctaggaggagaggggagacggaatgtagcgcccgttccatcgtggcgcctagcgggaaaactatctcttaaaaaaaaccctaattgcgaaatctgtttctttgcttgttgtctagtgtctgtgccatctcagatctcaaatccccgatctatcgtcaagttcaatcccgaatccaaatccttcccaaatcaaatccctccgcaaaagtctatttcgcctccctcaggttcgatgggccgaattcctctcggcccatctccccctggggcggcgtctctgtctctcgcggtgggtctcgctctgggtcggccccggtctgggggtgcgctccagacgctgggtcggggatccggccgagccgagcgccctccgccctcgctgccgctttccgccgacgccgcccaaatcgccgcgccgcccgttgcttcccgcgcgcgcgcgcgccgtggtggccgaccgcctggtcgccgccgccgtcagcctctgccgtgcctgtccgcgcctgccgtccgtgtcgccgctccgctccacaccgcccccgccgtcatcgctgtcgtcacaacccggccccgccactccgcgcgctagcttccaagggacgaaggcagagcttcccccctctgccgcgtcgccctctctccctcctccttttccccaaagtggcaagggggcaagccccctttcccctcctccttttccccttttctctcccgccggtgtcattccccccgcccccccgtcgccgctttggccgcgaccgccgagcgctagctccctcccttgaccgccctaggtcggttcccaaatcgacgttgccaccctataaagcccaggcgccctctctcccttctcctcttgttttgtcccatcgcctctactccattatcgccgcctcccgtgctccgttcatcgtcgcgcgtgtcggaggagccggcacgagcgaggacgcggaaggggactccgggcgcgccctcttcttcctcttccctggcccgaggccggagagatcactcccgtgccgtcggcctctcgtctcagcgccccgcctcgtcccggtagtgcctccctccgttctccctcctcgttccatctcctccccttagactcgggtagtagcacgagtagcctccccgtagctagctggcgccgccccgaccgttgccgccgctcgctgtatgctcgccgccgtcgccgcccgtgctccgtagcgcctgctcgtcgccggcctcgcttggcatagctccgcccaatccgacgctagcaatgggttcccgtagccgtgtagatgctctcaccgctgggaatcggcccctcgtgacctcgtcgccgtttcccccttttctctccgccggttgccgccgccgcaatccgccgccgacggactccctccggcgaatccaagccgttggctcgctccctctcgttctccctcatcatcccggtgtacgtcccgtcgcccctcgtcgtcgcacgacgtcccggagaaaccgccgccgcccgccgtccattcgcggccggcgccttcgtcttcctccagccggcccgcgtcgcagccacgtaggcgccacgtcggagccacctcggcacgaccggatcggctgacccggccagccgctccctccgttccccccccccgtgcgcatggtccgcggtgagccatgaggctgcgcgtgggcccgccgcaccgcgtcctccgcgaaccgcgcgcatgcgtcgcggctccctccctaaaccctagcacgccccgcgtgcacctcgctcacggtgagccgagtcgccgacaagcgggtcccacccgagaccacgcgggatggacccggcccaccggctctctctctctcccctccccgcccccgcgcgcgctttgggccgccttcttgggccggccggcccattaagctcggtcgagccgcccctttctctcgggccgcgccctagccgcccgaggaaagtctaatttccctccctccttcctttcctttcttttctttttcaaaaaggatttaaataaatccttttcctttagactaaaaatccaataatcttagaaattcaatatcttcccaaccgtaagtccgtttgactccgttcaacttccaaaatttctcaaatctcgagatctatctaatggcacgcttagaggtcaataatagggctttattttcgccgtttgctgagttgtcccgtttcgcgtgtagtttcggagcccgaagacccgcagtgcgaggatttcgaggatcaagctcaagatctcgagcaaggcaagccacctttgaacatcttgagcctatatttgaacttaattatgttgcttgaaaaatattatgtattgataggattgcacttaatctgcttgtcccgtctgcaaggcagattggcggacgtacctaacttgttgcatctgatccttccattgttaattgttataccatgtcccccttaaccccttagttgcgcctcggtaatcgtgcactctgtacgagtatcgacggtcgccttcaaacttaaaatctgagaaacatcctgggtaaaacttgggttttacaaaagactcggaaaaacccgacacctgggtcggtgcttgcgaactaaatgaatttccaaaattgcggaccggggaatgtaccgggtgtacagtttcccgctcttgcacttaaggaccgtttccttggaatttcatccgaacataagacaagtacgaccacatgggtggaatgggacacccctggctgagtaactagctaatcgggggagccatgatgccaagagacatgtggattcaacggggtggtgtcggggaggacccccgggtttcctggcacaatatggtatgggacctgatctggtgttggtctgggacccctctcgttggcatatggtgaacctgtgtcggctttcgaaatgccttgtcatgaaagccttaaggtctctagtcgtggccgttctgcacgggctggatgatccgggttagtaatgtcgtgtgggtaaagtgtaccccctctgcagaggttattaaactgttcgaacagccgtgcccacggtcatgggcggatgtgaggtgattcctagcgtagttttgttttactactgctttgtgaaatttgctgatgtggtttgggattgatgtttggaaaatctgcggctgatgggatcagccaggcccgggtggccgtttgaaagctgttggccgggtgccaatcttgatcaattcaaaagactgatacattgcacatactccgaccggacgagacgcactgtctcatccgtgtcgtttgagaagcactcacttagttgtttcagaaaagagtttaaataaaatcaattgcaaaaacaacagcctttccttgaagcctgcattaaacacttatttcccatggcttgctgagtactcccatactcacccttgctctacataaataatccccccagttgctgaagaagatgaaacggatcccgctgacgaggagttcttccaggagcaagccggctacgatgagttttagggtttcggcctagttcccaagtcgcgcctgtgatgtttggtcgaagtcttggcttccgcttcccttttgtaatgcagttgtgagctcgggatctgtccgcagcccaacatgactgtactcctactctataataaagagacctctgttgctgtgatattctgccttcctgtgataccagcactgtttcttgggactggtatcgactaacaggttaatttggagcgtcacgggctagttccgctcgggactagttcggggcgtgacacagaacaatagatcaagacaaaagatcaacatacaagccaacatatgccaagacaagctgccggatatcgacatcagagatatgcctggatcaaccctatccggtacctatagagaccggctgtagggatttaacgttgtctctgatctcgccgggcacgaactcgaggaggaaggctaccctgttgtcgactacgagtcagaccttcagaccgccatgtcgataacagttagataggttaccccaaatattgtactggtgcgattatggtgaatatataagagcaataccggcttcggccaacaggatgtagggttattatctgacaattcaggggcccgaacctgtataaaaatccttgtatctatcttttttaccttagtctgagatctatcctagtaccaacgatccccatactatgcaaataccggaatcgcgacatcaaacatcgacaatgtgagttatgtatccacatgtcaataagatcaaacagaggtgcagattgatgtcaaagtgtgaagagcagctagattgtcattaatttattattcccaaatttcatgacagtacaatttattctataatcaagcagtaattaacctcaatgattaactctaaacgggttatgttcaaggcttggaaccagtgtactttaattttaacagtatatggatgtgcatgtttagtgggttgagtaaagattctgccacactccaggagatatttgatgactgaaaaattcctagcatacggtggaagccgcacacacgtgtgtttggtggtttgcgttggtgactgcataggagtctcgttgtaatctcttcaaaaaaaaaatgtgagaaagaagtcgcctcctaatttttcaagtctctgtcccaaatcaaatattttttttcttggaaaaaggtgataacgataccgcccgttattttcattgatatgaaatgttttgtaacctaagcattgtgtgggtcaggttactacctaaatattttgattggctgctttttattgggtcctgcataacagttaacgagtgttattattttttcttagaaaatttaacaaggtagactttggggacttggatacactttgtaggccttttattatttaaacctttgatttgatttcactcctgtgttgctggagctgccaaaaacagacttgccacacaaccacaatatattccttatcagtaaagtgaattggcaattttattgcggtattttttttaaaaaaaagtgaaactttgattaaaaaaaacattctcaagcaaccacaatctattcctgtcatagcaagctaatcccctagtcaatactagttacaccaaaatcaccgaggtaaatgagttactccaaaacaatataacaaacattgattaatatgaaatagtacataaaaaaatcctttgccgtacatcaaatgatggtacaaattattgggatgaacgtggatttatgatccagctccctcatatgttacaaaaggtgacaaataataatgagaagcccaaaattaaaggccttgcgtctgatcaagaaacttgcccatgatcattcgtacatcagctaaccagatgacgacacaacttcggaaaggcacaccactacaagaaaagcattccatagcaccaaccgcgagcaatcaacagaagcaagctagcaaaagcagaggagtatccgagtatcctacagggaagctgatgagcaagacgcaatctctgtctctggtcggccggtgtcgatcggttagcatttggggagatcggacggcggagggaggatcttctggttgggtaggctcccgtcctgcaccacccatgccatcttcaggccccagctgacgtgcacctccaagtggcaatgcatgaaccatacccctgcacacgtccaagcaaaagtagcgaattagttgcaaatttcaactcatgtgtgcgcagccaaatctgttttctcgcttattgatcagaaatgcaatgtaagaataaaaaaaatcaataaaatgttgcaataatgcaatgattctcacctggattgtccacgaggaagcgaatggcaacccagccggccgccggcacgccgacggtgttgcgctcgacggggtcgacgaggttgtacttggccgggtcgttcacggggtcgaagttgccgaacccttggccgacgacgaagaagttgaagccgtgcaggtggaacgggtggctctcggcgccaaggacgctggtgccctgcatcaccagctcgaccgacgcgccgtacgggagcacgaccagcctcgtcccgttggacacgttggtgttgttcggcggcgtcccggtgtagttgaacggcgacagcggcatggccgggaagttggaggcgtacaccccgttggacctgccggtgtagtgcgactgcagcagcgccgtggaggggagcacgaaggagacgttgttcacggccgccgcgaaccggctcccgttgggaccctggcacgtcccgttcacggcgcaggggtgcgtgcccaggccgacggtgaagaagaaccgcgtgtccacctgctgcggcacgttcgccgggtactccgccgtggcgaagctgcggagctttgcggtgtagttggagacgaagctggtgtcgttgatctgcggcagggtgggcctgagcaccgggaggttcttgttgaacgccgcggtggagtgggagctggggtcctcgtactcgaggattcccgcgacggtggtgttgtcgaacgtgccggacatcgccgtggagtatggcgccgccagcatgtagaacgtcgcaccggggtacgacggcttggtggtgaggagcacgttggtggtctggcccggggtgatgaggagggtgtccacggtgaatggcttgacgtagaccgcgtcgacgtcgaccacggtgagcgtgtgcccggcgatggagaagaagagctcgtcattgagcgcagcgttgatgagccgcagcatgtacgtcttcccggcctccaccttcagcttgaacgtatctgcatgccacacaatgcgtatgcgtataatcaaaatgtactagctagctagcttatagctgcaagtgtacagcacagtgcaccacctttggcagagcagttgtagagcggcccagggaggccattgatggtgaacgcgtcggagacgttcgggcctccgccggtctgcgtcgcctggcttatcaccgcctccgtgtccgccttccaccactcgcctaccacccaaacaaaacaaacgcaatttaacccctgatcactgatcagtcgccatgtttgttacgcttacgtacagacccacgccacgcgacagtacgtctgtcgtcgatcattacataccgaagacgacggggacctccttgtccggcgccgggaacgggtaggggacgccggccttggggaggatgatgatggggccgtacacggtggcgcggagccaggagatgtgcgcgtgccaccacagcgtgccgcgctgcccggtgatggtgtacttgtacacgtagctgccgcccggctggatcgggcactgcgtgatgtacgccggcccgtccgcccacccgctccgcagctgccggatgccgtgcctgcatcatcgatcgatcgatcgatcgtcacaatgcgcagtgatgagctcgatcggtaaaattttgcaccggaaaactgatcgatcaaacggtgaagcgtgcgtgcgcgcgggtgtgtgcgtaccagtggatgctcatgttgtagggggagtggttgatgacccggatgacgacgaggtcgccttccctcgcgaacacagtcggccccgggaactgcccgttcaccgtcacgatgctcttgctgctgcacagccgtgtcacgttcgtcgttttcacctgcacacgtacacaccatacgcacaaacacatcgcaattaacgtaccattacactattgccacgcatgcatgcaagttggttctctcgatcatgcatgcatcgaacgtaaagaaaacaaagaagaaacagaggacagcgactcacatcgaattggtattccctaatgtcgcccttggccaggttgacggagaagagcagtagcgcggcgacggcgaggatggaggaacggagaaggtaggagatagccatggatgcctcctcgagctctcgacttacgtacactgagagctctcgtcggctaatgggctatgaatgtgtttgagatcgatgctagatgagtgtctaaggtgtctatatataatagtactagaggacaggaggatgagatcgagaaaatgattaattaatctgtacgcttctggtgattctgaacagaagtttttttttttgagtttttttcaactcggccagcttagtaagctttatttggtgcgttgttggttaatgaactgggcacgaggtcgatcttcccaactcgcaaggcacaaacactgagagcggggcccatgcatgcatatagctgtgtatagcttcggagtgtggctaaagtcaactactcttctgtttgcatgtcaccttgaccaccttttatctttttctcatgtcttaattaacacgcagaatgccgaatatacaatataataattagatcatgctgcaatgcgaatatgcacttgttaatttgtgtgttttggttatctttgtcacgttttcttgttgacttgggtgcacgaatcaatttagctcagctctactttgaaaataggggattttatagccagctgaagtgcgatttactcagaaataaagaacttgtgtggatggtaagaactttcacatttaatttctagtacttgtgtacttatgttgaacttctttccataatctaaagaaccgctgtcaaggttgtcattatttttaaggcgtgaagattggtggttcggctgagattaatttttggcggcacccgaaatgatataatacattagcgcatgtatcaagcgttaactattactccctccgtttctaaacatttcatgtcgtcgacttttttaaatatgtttgactgtttattttattaaaaaaatttaagtaattattaatttttttcctatcatttgattcattgttaaatatacttatatgtatacatatagttttacatatttcacaaaagtttttgaataagacgaacggtcaaatatgtgctaaaaaatcaacggtgtcaaacatttagaaacagagggagtataaatttaaaaatagctttatttgatttcttaaaaaaaacttttacatacaaaatttttacacaaaacacttggagaataaggaagtagccattcggaacagttaattgttacaatacatagtaatagtctgctaatatattgttctatgagtgattttccaggtgttgattaggtaccagaagttaaccatatttcttgtacaatataataatgtcttacttccttaatgaccgtaaaatttcttttgtcatgtactttagccttttttttatgatacataaaagttttgcgcatctttatattgagcattgggagaataccaattcaaaatataagagcaatattgatatggtctccgaattatcctttttaatagagggagtatggtctccctattccgtttgcttgtaatgtaaactcaagaattcctttaaccggtcgatcgggagagatcatcgaggttagttcgagttttctgcacctactattagaaatgtgttaaatcaggggtagttgaattttcgctttaaaactaaaggtcagaggcggcaccaagtggatcagttgcaaatcacatacttttttcgtcaaggcccctaccatattatccttacatgccaagggatgagatcacgagagccagtgaagacaacgaccttggcctggacgagagggttgttccaagcccgttcttcgattggcaacacattcgcgtcggccagaaatggccaggcatggagtacattactaatatatgtcaatttaaaaatgggggattcttgatttgtaagctgtttatctggtaggtcgtcgcccgcggatggtttggtaacggagctgtgcttcgaacagttctcttctttttgcccccccaagtctccaaaggaagagaaggatgcctgacccaaccttacctgttgctatccatggacacagcacacaatgacacaacgcatgctttgcaaggcagacttgatacgtaaggcaagtgggggttgctcaagctcaaaccttctgcaggtatgattcgagtttcggccttgatggcagtttctcattttaagttggggaagtacttcctttgtcttgttctagttttgcagactatttcgttgcagttccccaaagaacgaaaatgcaagataactttctggtacatttcaggaaaaaaaaaaagggacaggagaactagattgcaagatgttatcaaaacgttaacaagtactacaggtaaactctcagggagagggcgagaggctcaggctttccaagctatgagcacgggagactactactcatcatacgctagtgatgggttacaggaacagagaacaaatcgtcaagcagatttcagaaaaaccacgaacacctttatacaacttctcatgccctagtgctaggttacagccttacaggaacagagatcaaatcgtcaagtaaatttctgaaaattcatgaactgaaccactagttatcggcagattcaacagattgaacgcctgcgcgaagtggaaatcgcaatctagcaaaatagccataacttggcatatgaacacctttatacagcttctcatgcctcagaaatattaataatctgttcagcaaacatgcgatatacacctacaattctgtccaagttatgatgccacagcctctccaagggatgatgctccatctgcatttgacaattcagcattcctattgctgtcttcatcttgaaaaccttgtttgaatcgatcataattagttggctcgagtgtcttgaatgggcgttcccctagaacctggacaagatcatcctggtggagaacctctttctcaagcagcagctcggcgatttgtgcaacttgatctttatgttgttttataagctcaacagttttttcataggccttagcgacccattccctcacctcagtgtcaatgatggatgccgtctggctgctatatggtttgctcatctcaaaaccatcctccctttgagggaaagaaagaaggccaaccttttcgctgaagccatatactgcaacctgggcataagtcatcttagtaactttctccagatcattctgtgcaccagtcgagatctttccaatcaagacctgaaaaaaaatcacataattaagtcatttgcttaagaataaactctactgataagttagaaaatgttgtgtacctcctcagcagctcggccacctagtgtcatgcaggtcatgtcaaaaagctgctctttagtcatcaaaagattgtcatttggcacatactgagcaaaacctaaagcagctgttccacgaggaacaattgtgaccttcagtagtggctcggcatgctccaaaaaccatccagcaacagcatgaccagattcatggtaagcaacagttcgccgctccaacttgctaatcacctgtggtggacagattgataagtacataaccgctacacatgaatgtccaattgttcatgccccatataatactttacatccaatgcaacagcacttaattatgcaatgatttctgctgtaacaagtaacaaagagaacactgaaatcacttttaaaattgtacaaaccaacctaggctctcaaagcaaatgtgaaggtttcaaagtgcgcctcagtcacatcaagaataaaatatagcaattatttgcaatttaagaaaaaacagttataagcagttctcatatagaattgacaacattgaccaagccgatattgtttaacatatatataataaaatttgctacctcctgaattgataaaacaaaaagtatggcagcccaacaacaaagtatttgcaacaattttgtttatttatgtactcgtagcctagcagcattgtggatactggatagtttggcagccaggttgcaaaattcttatgtaaaatttgataaatcaactagtagaggcaaatgaaaattggcaccgtaaaaaataccttgtttttcttttccaagcctccgataaccctatcaattgcagattcaaaatgttgcattgtaatgagtgtgccctcacttcttgcagcaattaaagctgcctcattacaaacattggcaatgtcagctccagcaaatccaggtgtcaaagcagctaatctttgtgaataaaatgatggttccttgtccagtttcagctttttaaggtagatgcgaaatatttgatcacgaccctttatgtctggtttatcaatacttatctgacgatcaaatcttcctggtcttagcaaagccttatccaggatgtcaggcctattggtaccagcaagaacaacaacaccagatgtagttccaaacccatccatctctacaagtaactggttcaatgtgctttcacgctcatcatgtccaccagaaaaacctccacggcctctagcacggccgattgcatcaatttcatcaatgaatacaatactaggtgaacactgccgagcttcttgaaataagttccgcaccctggatggtccaacaccaacaaacatttccatgaagtctgaaccagaaatagacaagaagggcacaccagactctcctgcagtagctttagcaaggagagtctttcctgtgcctgggggaccaacaagaagagcaccctttggtatttttgctcccagttcttcatatttcttgggatttttcaggaaatgaacaaattccataatttcttgtttggcttcatcacagccagctacatccttaaagaacacctgtagcacacaagaaacaaggttacttcagtagaattatatgaatatgttattgtatgttctttgtcaatggtgaataaagctacagaacaaacatttacaaaaaaggatatgaatttcatgttttgttcaaaatagcaagagatggaaatagcaaataaaaactaaccttatttttggagtttttatccaattttgtcacttgaacttttccaatactgaaaatgctacggcctcctttcccaggaccacccccaacagtaaatccattttgtatccttttcccaagcaaatatattaatccaataattagaacggttgggacatacttcattacttcctcaaaccattttgcttcagtagtgtaagtgattgggacataatagtgtggatctatctccaatgctttctgggcctcttgtaacttctcttcaaaggagtcaacacttccaatattgaagtaatacttgtagctgctaggagactctatcccaggaagatgacttgtagttatatggatatcactatcctgaattcgatcaattgaaggtgaactcctgacgtaaaccttagcaattgacttgtttgaaacaacaatgtggtcaactaaaccaggttccaacaacttattcttgaattcttggaagcttatctgaaaagaattacaattaagtgggtatcacaagttataatggactaggaaatgaatgtatgtgtcgcacagaaaaagaaactggtagggaactgaagtgtggatatatgatatagttatacaggattagatgattaataggatgtagaataccaaccatattgcatttcataccaacatggcactaacaacatacgaagctcatgctaaaatgccctatatcaaactcttaggataggatatgatatgccatcagtaatgaagtactgtagctagggtcacatgctgcaccaaataatcacattaatgctctcgagcaaaagcataccatctccatcagtacaactatgtgatttaaatcttttcagtcaaccataacttcagtcatactccctctgtttacatttgcttgtcaccattaaccggtgctgttacaactttgaccacaacttttttaaaaatatatatatatatcatgttttgatgaatgaaaacagtatgatcatatttagcatgtaatataatttcataatatagtactccctctgtctctaaatttaaggaattctggctataaatatatggatctggacatgcacgtgtccagattcatagctagaatcccttacatctagggatggagggagtatacttttaaatatttacaagtttcttgataaaatatgagaagtcaaacttaggatatgaatagtatagtgaaaattatttaggaatggaggggggcagctaattaattatcatcaattgtgttatgtacaaataaaacataaactaaggactacatgtgaaagcataatttttttttccttaccactttgctaggccagcgaaaccaccaaatatttttttcaagataaaaaaagtaaccttatatataacctcatatcacctctctaattggactgcagcaaaatgaacactgacaaaatttatataccacacagaattggaatgattcttttctgaaatttataaggctgaccaaaggcgaggaccttcagtaaagtaaatggggattttgataacagctatcttctatccacaagtgtgaacaggtaaaatgacaatgaaacacacaagccactactgttgctcatgtttaacagtcggtttttcagtaggaacagacctcctgctctgatgaagatgctgatgcagataacaataataggccaaaaaggaataaaggagcaatcatgtccttgaattgtttaatgctctcctcgaaattccattgatcacctgaactggattgctctgcacaccagaaatgaccacattaagtatgtggtttgcagtataatgctatatacggatgcatcaaactttacaaattgtacgcaaccaacttgctttgggctaaaggctcatgttgtcgtattccacaatactcatgctagtacctctcccttaaaggtgagcgggcagtttatgaggcactaaaactcaaatattagcattttcagctatacatgatacttacatactgttaggggtatttgtgcaataaaataaaacatcaactagccccactctgtttaacatgtattgccacttacaaaagctctgcatatcatcttcttaacattgttttctattatcagtatactaaaactagaaatcacaagttatgatatagcatgattttagggcagcactcggaaggttaagtcgccactggtatgtaaaagtctactctctttcaaaatattttgcaaagctcaacaccttaataaaccatatccaacacaagagcgaggaatgcaggttaaaataagcacttactctttgagtcggacttgtcactctcatcccctttacctttattctcctcctccgaatgcttcccgtggtctgaataaaaaaggcaacgttaaatattaacagagtcaccagatatccccaaaaaccacctaaccagccagaaagcttacttttcttcgacttgtcggagaatagccgccggaactgccggctagcaagcaggaacctccagtccccacccttccctgccccggaggccaccgctgcccgattcccgataactgacgtcacatagctgcgcagaaaacccaactcgccgcagggcagcggcggcgacgaagcacggagcccgccatgccccccgagcagagaaccctacggcaacgacatccgcacacgccgcccgagccattagggcgaggacgcgcaggaagaagccacaccaatcggagaggggaaggggagggggtgcggctcgggcactcacctggcgctgccgggaggagcgcgcggaccgggcgagggcgcgggagagggaggagaggctcatggcggcggcggcggcgagcgcattggacggagatcgaggcgggggcgggccgtattagggttttgatcccgcccgcgctccgcgtgcgtgatcgatcgaaactagccggtaaagtgtactgtgcccccgttttctcgcggagagagcgacgaaccgacgagacgaggtcacgagggacgcggttgatggtggcggcggagagggctcaagggaaatttgttggtgtcgatgaaagggcaggtggacacgcggcaagggattgccaccaatctggagacagttcggagcttccgctgccagtatgggtccatgggccaccctgttggataggccacgatattggaccgctaccaaactggtccatcacgatatataaatgaggaataggttcattttaggtaccttaacttaacagtgagtttgattttcgtcctttcaaaccacaatatttttctacaaatttcatcgaatttttaaaaaattgactataaaaagaatcaaatgatttataatatgaaacagagggagtagtagctagcaacaaccaaattagtttgattggtaatgaaaaatatcaaaccaaatatgcgtttgataccagcaatgtacacatttagcctccaaattaagtggcaaactagtatatttctaatattcatcaggtattagcaattaagttcgttagttgtgcaacctgtttatagctagctcggtggtctttccagcgtcgggcgaaccccacaagttgtattcttttttcgtagctacgttcagatcctttgacctgtccactacttatacgtatccatcagtaactaattacaccttgcaagtagatatccagtactgtactatcgagtcatcttcccaagtcaactccccactcacttcagctacagaaacagtgtttcctgggaccacggccagtccaggcacgaccatatggtcggcggcgagtcagaggacagcgccgtagcggcgtcagcgcgcgccacggacgacgaggccgaggtcgagccgccgccgccgccatcgtcgcacgagcgatccgtcgcgacacgacgcggcgcggcgtgctccgcgtcgccacgtcgtcgtaactcggcgacgtcacacgacgtcccatcgtcttgtggccactctggccgtagccggccggcgccgtcgccgtcgtcctcggacgtcgtcggcgagaaggccgccctgacatagttcttcctcttccttgccgccgccgcgggcgacgacggcggcgggccagcgccggaggcggcggagaagcccactaccgacgtcggcggcggtggctgggcgatgtgcggcgggaagagcggctgcgggccgtgatggtgcgacccctcgtacgtgacgatgagcatctccgggtcatcggtggacttctcgacgtgcttcttggcgctgcatcgggagctggtgcacttgtagtaactcctgcattttcaccggagatgatgttaccattgccgtgatcctgcaaatttcggcttctctgaaaaagactgctcatctgaaaacatcgctgttgtgttcattagccgccgttttaatgcgatgcagatggatgttaattcttgcagttcggcgttcgtgtaattaattacgttttcggtgatgacgtgcacttggagattattcaacagcacagtgattcagactatatatggcatgtgcatgtatatgaaagcatgcgtgtcttcgcaccatcctgtatttctctgaacatgatctggaattaatgtctccggccgcttgcttccgctggtgtgccactacgccagtgaacaacctacctgcggcgcgcgctttcaaccccgcgtgcacagtgacactgattgactctagaactccacgtggtgctactagttgggccctgtttatttctcacccaaaaattttatatcgtatcgcatcgaacattttaacacctacgtaaaatattaaatatacataaaaaaaataactaattacacatattgcgactaatttacgagacgaatcttttgagactaattgctctatgatttgacaatgtgatgttacaagaaacatttgctaataacagattaattaggcaacaaatttgtctcgcgatttactgacggattctgaaattagttttttattagtgtccaaacaccccatccaacccatatataatacccgatgtaatacgctaaaactttacacccatggatttaaacacccccttactgatataatatatatatagctttaatttctctggaatctgaacacacgatctatcaatctatcatggttgttgtgaattaaaggctcctcacttctcaactgaaatgctagatcattcacatccacagagacagggcaatcaggaccgtgtccccccactcccccttaagacaataaggatatttaactctattttttaatatatgacatagttaacttttaataaatatttaatcaatagttttatttaaaaattttgtacaaatataaaaaaaatcattcttaaaaagtatttaacgataaatcaagtcacaataaaataaataataattgtataaacttttttgaatacgataaatagtcaaacgtatctaaaaagttaacgacatcatatattagaaaacgtagatagtaatttctttcgttagaaaaggtaagaaaattgaatggtcgaagcgaatgaactgctaagaccacaacatgctactcatcacatttgtgttagttacatgcaggatctcgtagtgtgcagtaggtacctaattaaagagtctcctaaacaaactccatcagttttaaaatacagaaactttcaacgtttgaatctggtttcaaaatataagaatatctagcacactattctagggagtacatactacttgtcctataaattattatttcccgttcaaatttcttcacatctctcactcccacctacccatacaccctacctatccatcatttatttattgtgggatttctatcttttcttgtctaccttaatatctgtccaataacctagaaatatttatatttacaaataaaggtagtagtaattattgagtactccctctgttttcgaataacatactgtagaaattttcaccaaaacacgtagatcatggtaacaaaatttataaccaaattgtcattggtagttatttggagatgattttaaagaatggataaagtggaggtggagggcaagaaatggatccaaaatagaagcacctagaagtttgctctatggtgaagattgatttatgttcacaagtatagctacggagagtagggtcaaaattaaaattctgctaataaaagtgtggtggtgataaaaatattttgaaacaaacgaattggaggaaaatgtcgttatttaaaaatggataaagtataaataaaaatagtatatcatccttttgttttgagaatgtttatatgctatttgacggaaaaacaccttacaaatcatgcaaatcctaaaccattggatcatattaagaatcgtgcaccatatttctaaccctaacccctcatttcttctattgtcattcccagcgcaaccgctgccactcgcaagcttgcatgcatgcgatgcctctgcctcagccccatgtgccgcagcccggccttgccggttggccgaatgaagtcaactgtgccggcaactcccccttcatcccgggccttctccccctcccacctctcttcccaagtcggcggcgcaagtgtccctgtctcgttgtcttccccgtcttcggcagctcctcgccgttggatccgtcaccactaatcatcgtctcctaaccataagctctggtttgcccccgtcatcaaggccaacccatcatcctcctccatctccgtggcttcgatgtggccgccgatgcctcacctccaactcgtgtctacctcccactgtcgggccgttgcctccgacatctctttaagcatggcgatgtccctcttctttgccctcccctaccaacctccaaccctaccacaatcaaaaactctaaaccctaacttcactaccttcatagaggttgctagagttggtaaagaaggtatcgtcggagctagaggagaaaaactccggtcttctgagcacgaatcacgaattaaatttcaaaatgggtaatatacgtgattataaaaagaatatcgccagccatttaaccatctttttttaatgtaagagtgttgcacggctaagcgttgacttccccgtctagggaattcgtcaatcccttgttctgcaccgtatgacactaatcgatctgtactgtacgattggcacacgtgtatacgtatacccgcgagtccttccaagtcccactcgcggaaacacgacacgtacacacgcgcgccgccgtgggcgatagcaggcggcggcgagccgcgcagctagccatattgttcatgcacggattgcacgcacaggcttgaccgcgcgcgctcctggcggcgtttttctctcgatttcgccatggtacggtgcagctgcaagcggctgcccccagcgctagcgccgtatccggtgtaaatgaacgacgtcgacacgcgcatattgcgccattcttatcaggactaagaatacatcttcgttgtcgtcgtcaactcgtcacaactgtatgtacggctacagtacatctttaccacgtcgtcccgttccgctcccttaattggttaaattttctttttcacaacctaactaagaacgatttttgaacgcttttgagcatgggcgtaagtttaatcagtgcactatggtcaacttgtcactaaaaccgtgccatccatatcgcaaaatctaaaccgagagcgctctcgatttagtgttaaaagagcgacgcactcattcgtgagagaatgtccagtgctactagtacgtgagagaagatcctgtgctgccagtacagctacgtgagaaaaggtccaggtgttactagtgcacataatgcatgtctattttttttctttttatagaattttctctcaaattacttatccgatctacaatctgattacaccattacgttcgttgcaattaaatctttacaacaagatcttacatgattatattgcgatgaaaaatatttatatttataaattacttttattatatacgtaagttacttttatcacgtatataagttacttttaaatttgactaaattacttctatacattcataatgctctaagttgattatttttattattgtttttagttaattctatattttgtggactttataaatcttctctacactttacttgtgaatttactctacataatttcttatttcagctcactcacaatataataatttctactacagagagttactcctcccgttttataatgtaagtcattttagcattacccacattcatatagatgttaatgaatctagatatagttctaaattaaagttactttaattctttttgttgtaattcaattttcttaaccgaatatagcaagaatccgacaattgacgacttgacaaatctcatcgactaatctcaggacttcgaagccgatgctaactctaagccgatgactactccgggcttaccaaatttcactgttaacagtaagttacttctataatatatgtaaattacttttaagctttactgaatttacttttatatgtctaagaagtaacttagtgaaatctagaagtaatttagacatatcataaaagtaatttgttatttttcatcaaaatataatcatgtgagatcttgttgtaaagcttctctaaatcggattaaatcggattttattgttacgaacacaacggtgtaatcggattataaatcggatgagtaatttaagagaaacttctctaagaataaaaaaaatacatagatattgagtatactagtagctttttttttaaaaaaaaaaggtgtctctctttagcactatccagatatcactctcggtgtaaatgtgtccctatgtcgcaaaatctaatgcaagccagtgaaagaagggtagagctggtggaagaataattcggattgaaggagaatgataaagcgagcagagttagattggatcgatgatactgcgcgtggcgcacctgggatgtgggttgttcttgatcgacttctgcccgtacttcctccacttgtacccgtcggccggcatcttgccgccgcagctcctcaccttgctcgtgtacttgctctccgcttccaccctgcggcttaatttccaagcaaaccaacaacataatatcaatctccggtaagaactggagttagtttagctctatgcatgtgtgcacaattgtgcatgcacctacaaatacagagagctgtagcggcggccggaggggtacggcggccggggcgacgccgacgacgacagcgccttctcgatgtcgcggatcgtcgggcctgagtacaccgagcacagatccctgctcaccgccggtgccggccgcggccgccgctcgtgatcagcgctgccgcccccgttgcacggcgcggcggcggcggctgctgatgaccccgcgccgaacgagtagtagagggtggggtgttcggcggccgggacgaacaggccgtcgtcaccgaggagctcgcctatgaggtggtcgtcgagctcgcagggccagacgccgccggccacctcctccgccgacgcggtggcctgagctcgcagcacatctcccatcagatatggtcctggaaaacgccgtcgttgcttgtgaggggattggccatacataccacgggccggtgcaacgtggttagttagacacggcgacgaagtaatggaacagctcggagagtctgatatatacggatcaatgacatggacacatggagcctaaggtcaatgtcaccctgggactagatcggtgtcatgtttcaacggaaagtcaacctgtcattggctttggtgcacgacagcaagctaggataagagccgtatgataaagttactccctccatctcaatctacagggcgcctacttttaaagaaaaattaaactcgatagcttttaattaataatcatactaactatatttatacttaaataaatattatgtatattatatcactattatattttaaaatactttcatatgatgctaattttatatttgttgggatcatataataaaataaaatattggtcaaaatatgttattcaagaccatattaaaaaatataaggcttacaattagggtagagggagtactaattatataccagagttttaaaaaatctatttaacagatactaccttattacaaacatacatattataaggatatatatcaccgttcgaatgtgaggctgggcttaagcttagcgtgggcacacaaaacatgaataactaattaaggctgtgttcggcagcccctcctaccaacccatctccctcgtttttcgcgtgcacgctttttaaactgctaaacggtgtgttttttgcaaaaagtttctatacgaaagttgcttaaaaaatcaaattaatatatttttgaaaaaaatagcaaatacttaattaatcacctgctaatcgctactctgttttccgtgcgagcacttagtgctgggaaccaggggttccgaacataccctaagtattaactctattagctactactacaaatatcaaaaattgtgtaaactagatttttaagtacttctatatgaaacttattttataaaatacgaaccgtttaatgattcggaaaacgttcacacgaaaatcgatgaagtagctcattctataagccttgccaaaaggtgcataataagtaatataagtaaaagaatgtattttcaagaaaacatattcttataaatatatagagcaaatcatccatgttgataatctctaatgaagtactacctttgtgctaaaatgtaagtatttttttggcacgtatattaaaaaaatatgtgtgaatgtttttgaggaagtgtgtgattggttaagaagaaaaagtatatgaaagagaatggttgtgattggttgagaagatgagataggtggagaaataattttattttggaacaaggtattatgctacaaatagctagtacattttaagatggatgtagcggctgataagacaatccaaatcaatacacgtgatgcacaagttcgtaagtaaagtatttacctgctactgtgtacctcacgaaaaacagcgtacagtttcttttgggaaaaaaatagagcatagttgcctccccccctctctttctctctccttcagagagtacatcctttttcaaacgtcgatgaaaagaaaatttttcggtgtcacatcatatgtttgatcggatgtcggaaaatttttttggacacgaataaaaaaactaatttcataactcgcatggaaaccacgagacgaatcttttgagcctaattaatacgtcattagcacgtctgtgttattgtagcacttatggctaatcatggactaattaggctcaaaagattcgtctcgagattttcgtgccaactgtgcaattagtttttttatctatatttaatgttccatttgagtgtccaaagattcgatatgatgtttttgggaaaaaaattttggaaactaaaccaggctatctctcaccaaacaaccaaccttgcagaaagtgagacgacgatcgagcgaacagaatatgaattccctttccactcatcgctttctcaggggcggatccaatgtgggtgtagagcggactcaaatcccccctacacctatcggacccatggatacccccctgagtccccccttcaattttttcgtcctgattgataagataggaggtgctaaatgtattttaatagtattttagcatagtttaatactgagattatatgtttatattgatgtactcggtatgttgaggggctgtttggtttggtgccacacaatgttcatggatccgcccctgcgctttctccttataatttcttgacgacgcgttgagcttcggttgatcccgacgcctgcaacagtgccacggccgcacggcgtcgtcgtcgtcaagcgcgagtatgatcttgtccggcacagcgctacagccacgatcgaatttactttcgaatttcgaaagatctcgttgtgtatacctatggcaccaatcgatcttgctcgctgccactgccacttgctgcacgcactgaaagggagacgtagagctgttcctctgaaaatgaccgataaatccacgaaacgattcggtttcacccgtaacttgacatgatatttgggcgaagcaactgttaaactgtcatttgctcattttttttcaggcagtttggtcgagcctatactcggggcctatttagttcccaaatttttttttcaaaaacatcacattgaatctttggacacatgcatgaagcattaaatatagataaaaagaaaaactaattgcacagttatgggaaaaatcgcgagacgaatcttttaagcctaattagtccgtgattagccataagtgctacagtaatccacatgtgctaatgacggcttaattagtctcaaaagattcatctcgcggtttccaagcgagttctgaaattagttttttcattcgtgtctgaaaatcccttccgacatccggtcaaacgttcgttgtgacacctaaaaattttcttttccccaactaaacacatcctcatttactctgctacagttgaagttgaaccacattgctcccctcgccacaagggtgtcaatccaaacgtcatctcggtcaattctgggatagcagcatggtcgaggacacgaggtagtataggaaatactactccactatgcactgaaaaagtcgtcctgcaatttctcgtaaaaaaaaaagttgtcatgcaattggggtagacccagccggggcaggacatggtctctttcgctaataaaaactccgccatcggctcatccatcacacagcgatggacacataaatatatactctctcggttcctaattaaatacttcatacaattttgactagttaaaaacatactctctttatattttattgtataacgccattgactttttaaccaacgtttagtcattcgtgttattcaaaatttttgtgcaaatataaaaatatttatgttatacttaaagaacatttgatgataaatcaagtcaaaataaaataaatgataattatataaattttttgaataagataaatggtcaaacgttatttaaaaagtcaacagcgtcatacattaaaataaagagggagtattaagcgagaaactaaaaaactgttatgttcttcattaatgcgaagagaaaaaagagaagagattacaattggtaaaatagtaaaaagaaaacaaaaggaagtattaaagtagtctaggggatcagtaaaactatatttatttggggataaatttttaatctaaaacatatttatttagggctaactagagggagtatatttgaagcggaaggagtgatgttgatcgcatatgcgaatttataccagaggggctgatatctttgtatgtgtttagttccttccaaagttggaaggttaggttgaaattggtacgatgtgactgaaaagttgtgtgtgtatgataggttgatgtgatggaaaaagttggaacacagcctttggaaccatggcgttacggactcttaattcttgaacggctcggaagatccagagttgcagagacaatttgcagtctttcagctgtttatccccttcatggacaggttttaaccctgcaggcagacaacaacctcggagcagtttgtgaatgtcttcagttcttgacagtgctcacagtaatctactcctatttgctactgcccctgttccaaaaatcttgacgctttaaggtttctaagccaatttagcttcatattaaaacgatcaaatttctcttaattatcgattcaattgtcacgctttaaggtttctaagccaatttagcttcatattaaaacgatcaaatttctcttaattatcgattcaattgtcatttcattgagtacctgcactcagtatgttactacggagtagtacaaagaatcccttaatgcaattaaataataaattctcttaaagctcattgttagatgatttgatggaatagacaaatggtcccacttttcaatcaaatttactactccaatgacacttttctgggacattgacagaagcttaaaaacgacaccttttttgacggaggaagtaaacatctactctatttgtttcataaaaaactactatctccgtttcaggttataagactttctaacattgtccacattcatatagatgttaatgaatctagacacacgtatatgtctatattcattagtatatatataaatatgagcagtgctagaaagtcttataatataaaatagaggaagtaatctagtactctgtactagatgcattctagtattagatgtgagcatatatatatatatatatatatatatatagagagagagagagagaatttttatggtactatatattgatagtatatattgccattataaatgatctaatggcgtatattgatttgaccttccacttaactagcttgcagtataaaatctgaaagggtagacttgtctttctgtgtggtggtccggatccgatgccgccaagggctctcaccgcgccattagagcaggtacaatagcaggctattagccagttataaacatattttaatgagataaacgatgagagagaagagcagcaggctacagatttataaccagctagctgcaacacggactccaagacataatatatgtatgacaggtgggatcgtatattaatagtatagtaagcaactattgtatgaattggctattagattagctatagatgaattagagatagcagtgggctatactattgaactttgctcttatagcgctatcgggcgcattgcacgcacacggcgtggatgcgcgacgttccgcggcagcgtcgaagacaacttgaatggcacctgaccggctggtgtgcgggtcagcgggtgaactaaaatgtgcttgcatgcacaacaagccatagcaccaccatatgagaatgattaattttggtattgggttgtgttagtagtccaaactataaggtctatttcttatctgggctgcaaaagtgaaatgaaactggatttgtgtttgctactgtctctcacgagcgtaagttaaggggctgtttggatgcccacctcaatttaccatagttttttattaaaggtgtgtcaagatgcaaattgtgtggctcaaatttaatggccacacttgtgacaaactttggctaagaaaagggtctatgactagtaggaccaaaagaatagaaagtgtggcatgctaaagttatagaaacaaaccaaacattagctacatttggacaaactaacatacctcaagtgtggtaaaatgtggcaccaaccaaacaggcccgcactagagcagccgagcggcgacgagtcacaccgccgttgcgcgccgctgtcggggcttgtctctccaagtcgcacgccgctgtcggggctcgtctctccaagtcgttcgcgaggtagtgactcacgacatgacatcacaaacatctagggattaaacctaaataaccaattacatttttttttggcaaattcctattgtacccttgtaaatactggcagcatatactaccagtacaatgtgcggtaaaagttctcttacctcacatttgtgaggaagagaataaatcacaacacacatatagatgaggggatttgatcctacgacctccactagtcaacttcatgaaaatagtatgttattgtgagactttaaaagttacatttaaattttattatagttatatatacgttataatataacactacgatcatactatatttatatttatatttatatgaaataaatttttagaaccctgtaccaaccggtcagtggcgaaagcccgccgggggggctaacctgcagcttggctcgcgtctcctccgcctcgaagcacgtcttctcccaatcatttcaccagctgccatcaactaattggtactgctacttccatctcaaaatatagtaatttttagctatgaatttaaatatataggtgactatattaataactaaaaataattacattttaggatgaagagagtactatttagtttggtgttttaatctgtattacgggagccgcaacttgacttgcagcttcagaaatagtagatacatgtgttcaaagtgataacagcaagacccgtttcagatcctaacagaaaagtacgtacaatattcctgagaactgtatagtctgtattctagatatgcaattttctccgcacatcgacgacagcttttatgagtcgaggtcgcgctcgagcttcacgacagtcacggtgattcactatttcactacgtacaagccgcccatgctcaagatcactgttgactgttgagtacttgagtgcttaccatacgaacatagcgaattggaaaacccaaatcagtatgaacgggctataaaacgtcgggcgcgctaactggcgctctgatttgcactgattttctactctaggattggctccaaccgttttatagcccgtgcatactggttaagaccacttaagcatataaaccagcagaagaaccagggttagtcagaccggataggatgttttttttcttctgaaaaataggctgagaggacacattacacatctatctatctattctattattaaaacagctttgaaaggaggcaccacgttcgcttttgggggctaataattcccacattaatcagagaaaaaaaaagaaaatgagagtccaagtagaaatacaatctaaaaatagttattaaaacagctttgaaaggaggcaccacgttcgctgtgggggcaaaaaattcccacatcaatcggagaaaaagaaaaaaaaagaaaaggagagtccaagtagaaatacaatctaaaaatagctgaaattcggaattaaaactaagcaatattgaaagaagtttccatataacaacctaatacgagattaatcaaaatttgaaataaaaataaaataaaatccaaaattataaaaggaaaggagagtccaagtaggaatacagtttaaaaatagttgaaattcggaattaaaaataagcaatattgaaataagtttccatataagaacccaatacaagattaatcaaaattcaaaataaaaataaaataaaatccaaaattagaaaaggaaatgagagtacaagtaggaatacaatttaaaaatagctgaaattcggtattaaaaataaggaatattaaaagaagagttcatataagaacccaatacaagattaattaaaatttagaataaaaataaataaatccgaaattagcaaaagaaaataaaataagagttcaagtaggaatacaatttaaaattagttcaaattcggaattaaaaataagcaatattgaacgaagaatccatgtaagaatccaatacgagattaattaaaatttagaaaaggaggcaccacgttcgctgtgggggctagaaattcccacattaatcagagaaaaagaaaaaaaaaagaaaaggagagtccaagtagaaatacaatataaaaatagatgaaattcaaaattaaaaataagcaatattgaaagaagtttccatataagaacccaatacgagattaatcaaaattcgaaataaaaataaaataaaatccaaaattagggaaaaaaaaagagagtccaagtagaaatacaatttaaaaataggtgaaattcagaattaaaaataagtaacgttgaaagaagtttccatgtaacaacccaatacgagattaatcaaaattcgaaataaaaataaaataaaatccgaaattagaaaaggaaaggggagtccaagtaggaatacaatttaaaaatagctgaaattcagaattaaaaataagtaatattgaaagaagtttccatataagaacccaatacgagattaatcaaaattcaaaataaaaataaaataaaatctaaaattagaaaaggaaatgagagtccaagtaggaatacaatttaaaaatagatgaaattaggtattaaaaataaggaatattaaaagaagagttcatataagaacccaatacgagattaattaaaatttggaataaaaataaataaatccaaaattagcaaaagaaaataaaataagagttcaagtaggaatacaatttaaaattagtttaaattcgaaattaaaaataagcaatattgaacgaagaatccacgtaagaacccaatacgagattaattaaaatttagaataaaaataaaaataatatctaaaattggaaaaactaaaagagagttcaattaggaatataattttgaaacaactgaaatttaaaataaaaaataaaaacattaaaagaacatattggtattaactatttttttaaaaaaaatactgaaattagaaaaagaaaaataagatttcaattaggaatacaatttataaataactaaaatttttgataaaaataaatattattgaaagaaaagaccatctaaaacatatgacgagataaattaagtaagaggcctataaaggagtggagtggtggcggttgatacgacatataaaaattgttaataaaacatcaaatagaatcctaatgacgattaaaaaggagagacgtcaggcaggccgtgaagcaaacgagtaaggcggttgccgagacttcttagacagtaaaaaaacaaaccgcattgataattgtattcgatttttaaaatctcaatgacaataaaaaggagaagcagcgggcggggtgtataagagtatagtttcagagccaccgacggttgacgggacttctagaaaataaaaaataaattccaacgatagttatgttcgatttttagaatcacaataacaataaagaagtaggcggcgaacatgctgtagaggggcatagtggcatcgtttgataggacttctaaaaattataaaaaatgaaactataagtccaacttttaaaggttcagaacttttaaaaagtaaaaaaaaaacaatgataatcatgttcgattttaaaatctcaatgacaataaagaaggtaggcagcgggcgagccgtagaggagtacaatggcaaagctactgacggtttggcaggacttctagaaagtaaaaatgaacccaaacgataattatgttcgatttttaaaatctcaataacaataaagagaagagacagtggacggcccgtagaggagtataatggcaacgtttgacgggacatctagaaattataaaaataaaacacaacgtgacaataaactctaaaaactataaaatccaatttttaaaggttccaagaagaatgaataaaaatagtggtagatcgagcaagcaaataaagaagatgacataaggggtagcaactggtgtgaattttaaaaactatataattagaaacatgaggatgataaggtttggtctctcaaagtcttaagacaatgagatagctatttaataaattttaagtaaaatcatacttaaaaaaatatatgattttgtttgggtgctagccgcgcaattgggtgggccacccagctgatgggcatcaatcccagggatttccgtgagttttttatgccaaccaaaaacactaaccattcaaaaatcagagttttttttaccgctttgttagctgatatttgctcggtgctttggaccacaagaaacaacatgatatttagatcgaaattggtttatttcccaccaatattaactttacaaatcatttttaatttggtgcactgaaaagttctttatcgcgctgaggaggtcgagatgatagacctgatgactgataagatgaaaagggtgatctcactgctttgagagatcagagaactgggattggctaaatcttctttttttttctttgtgctggcaagctagctaatattgagatgttctcttgctcaagttccttgttgcaaagtgcaaacaagtttgtatgggccaagagaggttgagagttttcttgtgtgggcaggcttgtgaagctgttgccacttggttgctaagactcctttttttgtaaaatgggtttttagacaaaaggtacatatataggccccgcttacattgaaagccatcacggcagcaaggagtacattcgttaagaactaattcaggaggttagtcatcagcactccttgtctagtcatcagaagtagtggcggcagtcggactctccccagcagcagaactatggccatcctgcagctccagcgcccgcctaaggagtccaataagcatgtcagaaaattctgagagcaacgataaacatggactacaattaaatgttatttggaacctcagaatcagtaatccacagttgtttggaaacacagtaaagtttcaaactatggatctatcaaatacacatgccattttgccaaagcacatgaaatttgttggatgaaataaaaaggataaaagaaactagctggtcagtttgcttcatcaggatactagtttaccatgacaaaaccatccggctagaaaatcagatagcaacattaaacatgaaacaactaaatgttatttgaaacatcggaactagcaatctagctgcaatggtttgaaactggagtggattttgatccctggagtggatatcccctcgttgtttgcatatcactcaaatagttatgaaatttttttaaaaaataaaaaagatgtattaacatgttatatataactctacaaacatgcaagttcaaattcaacttctacatctcgtaacgaagaaaaacaaatttgattgtgaatatacgttaactagctatagtttaatttgtttttttcgttacgagatatagaagttgaatttgaatttgcatgttgttgagtgatatatcacatgttaatacatcttctctaatttttttttaaatttttttcgtaaccatttgagtgacatgcaaataacgaggggacatctcctcgagatatcaaaattgtttcataacaatgtagtaaaactaaacatgcttacatggatattgaatttgaggtatttatctaacaaacaaattaactaatacattctgtaacaacctaaatggcgccaaaagaacttccacccacctacaaatcatgtcatgctacaagcataatgaaaattaggttgcattgctatatggcgtagcttcttgatgaatcatttgtaagatcaatgtgtgttttgattcttattttgtgatgaacaattggcatatgtgattattggttttgatatttggagattatcgtcgaagtggttttggagataatcaattttcagaaaatgaacaggatttactagtttgtcgggaccggtcagaccgggctgggtgtgccggtcagaccggcgtgtattgcgcagtcagaccggcgcagcccgcggtctgaccggtcgacgctgtgtcagtttcggtttcgggttgtttctttggatatccgtgattgtttcatggttatggcttctagatggatattatacgtatgtaatactgttgtttgctactaatgagtcaagttggagatagcttagtctcggaatatggtttctttgtttgtttcatgtgtaggtgactcgatgcctcgggagagtatttgcggtgatggaccgggagtcggcttggtggtaagacgatgtccgtggtggtcaaatatcatgcgggatactaaggctagagttgatgcacgtggttgatggagattccatatggcatatgatggaggtattgtatgcgtatgggatgcggagtcgaatttggaaggagtcaaatttggtacgattggttatgtaaaggttctttcttgtactagagggtttcctaaggtgtttaggactcttagtatgagtttgattcgtggctttaggctgcctacctcatgtataaatagagggggagcgtgagtcttccctgcatcgctttgtatcgcttttgtattgcttttgagagctagtttagttagggttttgagtttagtcgagatttttgtaaggagtgttgttggtgcactttgtaaacacagagagaaacaataaagttgtcatctactttgagagttcttcgatttgtgtttcaccgggtttcggcagtctaaccggcatctcagtggcggtcagaccggcggcatcgcggcggtccgaccggcggcgtaagggcggtcagaccggcggtggcgacagcaagcgacagctgatcaggcggttagaccggagtttcaatctcggtcagaccggtggctttcagacggtcagaccggacgactacctcggtcagaccgcgatccatcgatttcgagggtaacttttatttccgctaaaagtttttggtttttgggtatctcaaccattcaccccccccccctttggttggcttagttcttgtgattcaatcctacaagtggtatcaaagctttgtttgcttctttggattttaaccgatctagagtttttgccatggctgcttctaataagtttttaactaagcctcatgttttcgatggaacggatttttctcattggtgtagtaggatgcaatcttacattatggctgagaattatgatatttggagaaaagtttctcttccttgtgtgattcctgaagctattaatactgctgctgaaaaaactgcttttgaactaaattgcaaagctcgcaatattcttttgagtgggatttctcgttcggattatgatcgtgttgctcatcttcaaactgctcatgagatttgggttgctttgaataatttttatcaaggtacaaataacattaaagaacttcgtcgtgatcttttcaaaaagaagtacattaaatttgagatgaaacctggagaagctttggatgactatctttctaggtttaataaaatttagagtgatcttagatcttttgattcttcttatgatgctaattatccacaatctgagatttctcgtcactttttgattggtcttgacatgtctatttgggagatgaaagttacacctattcaggagtttgtgaacatgtctactttgactttggattcgctttacacaaaactgaaaactcatgagatgaatattcgttctcgtaaaggtgattctaagtctagtgctttggtttcgtcttcaacttctttgaatgttggtacttcttcatcgaagtcttttgttcttgctttatttaatgccatgtccgatgatcaactcgaacagttcgaggaggacgacttggttttgctatctaacaaattttctcgagctatggaaaatgttaggaacaggaaaagaggagaaccgaatcgttgttttgtgtgtggtgcacttgatcatcttcgctcgtattgtcctaagcttgggagaggcaagaaggaagatgatggtagagttaaagaggatgacgtgaacaagaagaagaacatgaaggagaaggagaagaagaagcattgcatgcagtggttaattcaagaactcataaaagttttttatggatctaaagatgaagatgagggcaaatgtaagcaatttgttgatctagcttttattgctcgtaatgaaagttctcatgttgatgaatctgatgatgataatgaagaaaagcatagttatgatcaattagaacttgctgcttacaaatttgctaaaaaaactttaaacatgttctattgtgcttgatgagaaggatcacactattgagattttaaatgctgaaattgatagattaaaatcttcgattcctgatgatgataattgtcagtcttgtgaagttttattttctgaaattaatgctttgcgagatgtcaattctgttaattgcaaaaaattagaatttgagattgaaaaatctaaaaaattggaatcttcttttgctcttgggtttgctttacatgcttgtgttgttgatgagttgattttgacaaagaatgttttgaaaaaatacaaagttgctttttgtgcaagttctttggcgaatgcttcatgtgcaaataaggcaaaacaaaacaatggtgttttgatttctgaagattgttcaaagtgtgttttgaatgagatgaagttgaaagatgctttagggcgtgttaaacacatggaggaaattgttaaacaagatgaggtgttttcttgctcaacttgtagaaaacaaaaaggtcttttggatgcttgcaaaaattgtgctattcttactcaggaggtttcttatttgaaaagttctttgcaaagattttctgatggtaaaaagaacctcaacatgattcttgatcaatctaaggttagcacacacaatcatggtttaggttttgatccttatgctcataattctagacatcctcctactgttttgggtgttgctaggagaggtgaaattttgattgaatcagagcctaagaacactgtgtttaaatctgttggcatcatgtcttctttgaatacatcttcttcgaaatcaaatgttgtgaatgcaaaaccttctgttgttgcaaaaccatctacttcacaaacttgtcgtgagaagtacacttgttctttttgtggaaaagatggacatttggttggtttttgttttagacttgcccataaacagaaaaaggaaagagaaattgcttttgcaaaacgacattggcaaaaatcgggttttaattcgaggaccacggttagaccgacactgaccagtcggtcagaccggccagcggtcagaccgcaggtaaaccggcggtcagaccggttgctaggctcggtcagaccacaggcacagtggcggtcagaccggcctcggggcaattttgtgcgaaattcaactcagacttttgtgaagcaaaaaggtaagttttttggtaagtctgattctgattttgtaagtgtgtatgtacctactggttctagtggtcgtgtgactcagtgttggattccaaaatttcttatttctaaccccaacacggaggtctcgacatcttctcgttcgtaggtattttggcggcatactccccatgtgcatttaactttgagatgacgattgtatagcaaggtaacatcactttacttttggattgacataattttggtctattctcttgtttattagctttttcatgtgctaatgtttgaggtagtagtttttgttaatactattggatgtatgtcaattcttgagaattttggtgatatcgttggcaattggatgtctttttcaaaatctttgattttttcttgatttttgttcgggaagaattggaggttattttgagggggagttagtgctttttatgactttcttttggcatgttttgagggggagtttgtacctcatggttttatcaagcaaaaatatgacaatgaaaaaattgataaaagagagctttgtttatacatatggtattttcttgtgtatgctagtaatattttgaaggtttatttgtctctagcataacttgtatgtattctagtcttttcatgagatttagtttttgcttttaagggagatgatgcatgacacttaaattctatacttgaattaagaaaatatgtaatgttgaagctagcatctggtttgatttataaatgctctatttatatgctttattgaattgttattccttaaatagctttaattgctcattgtgaaaaagagaataaaaaatatgaaaaaaatgaataccgaattcttggaaacagtcttgacgacaaggacgtattcgatgtgagcaaaataatgggtgccgaatccctggaaacagtcttgacgacagggacgtacccggaataaaaaagaaaaatatgagcaaaaaggcttaagaaaagagaaagttcaaaaaaaaattctcttggttgttttgtgctaaaggttatttgagaaagagtgataaatgcaataggtatatgtgtttagtgtttatttttcaacctatgtgcttattaagatgttgcattataaatcgtatgaaatcatgaattttgattgttgattcaagcttaattgtaaaatctttggttcatggttgtactttaatgcatgcttgttctgttatagatgggtttatcttctttttattgcaacacatgacttgatatgctatatgtatgctaagctcttatactttcaaaaacataattcctatgcttgatgaaatcattgtcaaaagggggagaagagataagttttttgggaagaagagatgagtttttatgagaagagaagagtttttgagaagagcatgttttttcaattgggaatttctttcttttaaaaagggggagaagttttcttttggatttttgagcacgatgtgtacgtttgtacaaagtgtgtttttttaccgtttttgtttttaatttttcaaactccaaaacatttttaatgggtttgccaatttgttcattaagggggagattgtaatatcaacgtgtgttttgattcttattctgtgatgaacaattggcatatgtgattatcggttttgatatttggagattatcgtcgaagtggttttggagataatcaattttcaggaaatgaacaggatttactggtttgtcgggaccggtcagaccgggttgggtgtgccagtcagaccggcgtgtattgcgcggtcagaccggcgcagcccgcggtctgaccggccgacgctgtgtcggtttcggtttcgggttgtttctttggatatccgtgattgttttatggttatggcttctagatggatattatacgtatgtaatactgttgtttgctactaatgagtcaagttggagatagcttggtttcgaaatatggtttctttgtttgtttcatgtgtaagtgactcgatgcctcgagagagtatttgcggtgatggactgggagttggcttggtggtaagacgatgtccgtggtggtcaaacatcatgtaggatactaaggctagagttgatgcacgtggttgatggagatttcatatggcatacgatggaggtattgtgtgcgtatgggatgcggagtcgaatttggaaggagtccaaattttgtaaggagtgatgttggtgcactttgtaaacacagagagaagcaataaagttgtcatctactttgagagttcttcgatttgtgtttcaccgggtttcggcagtctaaccggcatctcagcggcggtcagaccggcggcggcgacagcaagcgacagctgatcaggcggtcagaccagagtttcaatctcggtcaaaccggtggctttcagacggtcagaccggcatgactacctcggtcagaccgcgatccatcgatttcgagggtaacttttatttccgctaaaagtttttggtttttgggtatctcaaccattcacccccctttggttggcttagttattatgattcgatcttacatcattttataaacaaaatgtttatgctagaagcaatcgcatatctgttgtttaccttgagagcatcatctgattgcattgggcatgcacagagagctcgtagccaagcaatccagctatggacagcatcatgcaccataaaaacgtagccccaatggtttcgccagcaaagccaacgccagtcagcagcagaagaagaaagaagctaatcaccagatatgggacaatatagcacaacatgatgtggccaatctggtcaacggacaggagggcatcatgaagcacaaacctagcaacgaaagcagcccaggacaagatggcagccccctccacaaccgaaagaaaggccacgaacataggcagcagatcaggatcaggatcagcaaacggcctcaatagcagagctatgggcgtaaccatcagcagagatattataccaaacccggcagctctaacaccacgatctgtcttgaaggacgtctcctcctcctcggtcaagaaggttgggggatccacgcgcatggccgccgtctccgtgccaatgcgctgcaggtgatcggcgtaggcgtacccgagcaggccggccgtccagcctgtggcgaggtgcatgacggcgaacccgacgctggggccagcaaccgttccggctgcgtcggccagaaggacgccataggagatgtggaggaacacggtggagggacggattgtgcgcgagagggtggagatcaagaagaagaggtaggcggagatgaggaaggcgatcgtccacaggagggccagcggctcgcaggagttgcggagcagcagcggcggggagaatacgaggaacatgcatgagatcaagataacgcgaggtataatgtgatctggaccgccttcaccggaggagagaccggtgatggtggtcgacggagccttggcgtcgacaaggtggccggccaccacagcctcggcgccatctgcttcgcaagccgcggcgatggccattccagtcgtagggttgtgggggttgtgaagtcgaagcgagagcagggccggcgaaagaccaccacgacagccgcggcggcgatggaggagaaattgacttgactgctggtgtgtatcgctccagtcaattaggactgatcgatttgttgccaaaattagtgggatctctaattgtaaatagcacatttactattcttaacgttactaaggctgagttctttccaactcaaccacctctttttttttttgtgtgcatgcatttcaaactacttaacgatttgttttgcaaaaaaatgtttatacgaaagttgatttaaaaaattatattaatttatttttatttttaaaaaataattaatacttgattaattatatgttaatgagtctctctgttttacgtgcgttagagatgagttcaaccccaagaaacaaactcagcctaaaacttgtccttgtcgatctttgcctttacaggtttttttttagcaatctaaatgtgcgtctagtctaagcatctccaagagtttcttcaaatctcaaatcttgctctttatttgttcatttggcaatgaagcaaaataatttcttttcaaattttatatacattctaacagcttcttcatatcccacactctctaaattattttggttgtttagattgatgttattttaaaccataccatttttttaaataaaaagttgttaaatatgtctatatatttatatatttagttcttttaccaaaacttaataaatacataaggaatcctaccaaaacttggtaatattgtcaacttactgtaattttatcattgtcaaaatttggtaagatgtattttggctatggtctaaacaacccctttgaggaggtatcagtatttttctctttgagcgagtatgagtatctttctctttgagcgagttgcaacttgcaagcgagagagatgggaggaagagagaataggagactcacgtttggcaagtggtcatcgtttggaaccatgccactccgtcactcttttcgtcctccccgtcaatctttccgtcattcccatcctctctccggcatgttcaccacgttgacccgctcctccatcttgccggcagccatgagctcgaggagggagtcgaggaagtcgctgccgcggccgtccgggtgcacggcgtaggcagtgacgaacatggggtcgcggccggcggcgaacggcggcggcgatggcgaggggatgctctcccatgaccaccgctccacctggtgcccgacagggccgggctggggctgcagggcaagggccagctcgtcgccgtggaggccatgttcctcatgtcgctcgcgctcgccgccgcgcacatcgccatggcttaccgcgccagctgccgcgagcgacgccgcctgctcgtctacagaatcgacatcgaagctgtaagtgattgattcccttctttgctcgtatcgtatcaaaacaaaggattttgcctagtggtagcttgtagtgtggattggaaacatattaaacccaaaatatgcaagctttctagattccaatccgtgttttcgagagattctggagaacaatcgaggcatacgcttgccgaccttttactggacatgacaacggccagaagaacacgacgtcccctcacgcgaggaaagcaatggtggagcggtggccggcggatgagggcgggacaaggcactgccggttcttgccgccgctggctgcggcgcagggcgcgaagaaggcgaccgcggagtctgtgcgctcgatgcggagctcggcgacgaggcgcaggtcacggccgtatccgcggtcggcgaggtgggtgagcacggcgtcggcggcggcgtcatccggggcagtggagaggaggagaacggggagaggatggggaagacgaaaagattgatgggaggatggaaagagtgacggaagtggcatggttctaattttaaaattttacaagtgacatctagcagataacgtgaatagtaatggtatattttttatttaccacatttacagtgatatggatccaattaacccaaggctaaaaggcaaatatagtcacgggccaaaatgcagctaaagcatgaattccatatactttgatcaaggatggctaccacaaacagtactacatagtagctcagatgtctcaattcaaatatgtgccgatcgataagggttaagaattacacattcatagattcgtattatagcataatgcgctcgaggataacccctaatctttacacatgcatgtaggagtattcgttaaggactagtggactactaattcaggggaaaaaaaattctctggggcggagccccaatcctcagcgcgtgaggcaccattctagataggtgccacctgtattctcaccaatattgaagcaccggaaaaaagtaaagcaatttggattttttttttcttagcgtatacgctccgtattccagtggtgccctacgaacttgtatcgtattctctgccctaatcacgtcgttagcgttcctcgttcgtcggagccgtaatccagctattcgcccttccgttccggccatcgccgcgcgtgtagttcgccgcccttccatcgtcaccgtggccgtggccgtggccatggccgtcgtagtcaatgtagatgaatccccgcggcggcgccttcaccggtgccgcatcctgctcatccaccggcgatgacgatcctccgaggcccctgatcaaccatggaccaatcaacaatgcatggcagcccgtttacaagacacgaagctccaaagaaaaatatactagaaagaaataacgtgtttgagtatatcgaatcactgcaaattgcttccaggaagaaataaaggttgcaatagcttacaaattagaaacaatagttaatgttattgttttctacttatatgataagtacaatgtctacttaggaatcacagcttcttcaaaatctaatctccagttcattgagcatcgacgaatgcgccatcgtcgagaatatcgatgccatatggttgtggtcaaggttgtgctggcagttgcattcatcgatatcgtggtgtttgtggtgggcggcctcggaggatcgtcaccaccggcggatgggcaggcaacagcaccgacgaaggcgccgccacggggattcatctacattgacagcaacggtgatgacgacggcgacggccacggcgacggcgacggcggaagggcggcgaactacacgcgcggtgatggccggaacggaagggcgaatagctggattacggctctgaggaacgaggaacactaatgacgtgattagggtagagaatacgatacaagttcgtagggcactactggaatacggagggtatacgctaagaaaaaaaaatccaaattgctttacttttttccggtgctttaaaattggtgagaatacaggtggcatccatctaggatggtgcctcacgcgctgaggattggggctccgcacgagagaatttttttccaattcaggggtagttggatgttgagtgttgagatcaataagctgccgcagtactatttatctagacgctggcagtcagagtcaagaccagacctgttgtaggccatcttcatctctgctctgctccaccggcagcctgaggagagtccaataaacatgtcacaaattcagatagcaacattttaaacatgcacaacaattaaacgttatttggaacctcagaatcagtaatcctgcaatcgtttggaaacgcattaaagtatcaaactaaacagaattggtatgtggcagcactacggatctatcagacaaactacaacctgttagcaacccacaatgtgccaaacaactccccgtcgcatacagatcatgccaatgctcatcaaaagtttaatgaagattaatttgcatagttatgcagcttctcaagtaaccattttacaaacatatcgcttaattatgctagaagcaaagacctgcatttagtttgttgatttaccttggcagcaccatcttgttgtattgaacacgcacagagagcatgtagccaagcaatccagcaatggccatcattacaaaccagaaaaacatagccccgatggcatcgccagccaagacaaggcagctcagcggcacacataggatggagctcagcagcagatacgggccaatatagcacaacatgtagccaagctgatgaaccgagacgaaggcttcaaacagtaagaacttagcagtgaaaatcgcccagcagtagatggcaatcccttccagaatcgagagaatggtgacgagcagggacagtgcaggaggaggcatcttcaccagaagagctccggccgttgccacggctaaagagagcaaggtaaagaaggcagcaacactacggcggtgcaccttgaaggagctctcctcctcctcggtcaagaaggttgggggagccatgttcttggccgtcgtctccttgccaatgtgctgcaggtgctcggcgtaggcgtacccgagcaagccggccgtccagcctgtggcgaggtgcatgacggcgaacccggcgtcggggccagcgaacgtgtcggcggcgacggccacaaggacgccgtaggagacgcggaagaagactgtggagggacgcattgtgcgtgagaggctggagatcaagaagaagaggtgggtgcacatgaggagggcgatcgtccacaggagggccagcgggtcaccggagtggcggcgcagcagcggcggagagcatacgaggaaaaggaacgggactgagatcaagattatgcgagctcgaatacgattggagccttcattgtagacagtggtgactctgcggcctcggcccgatcgactcgccggggagatcgtcgccgagcccgagtggtcgccgtccgagtcgcgcgacggcggccgaatgtcggagggattgtcgtcgggggaggatgagtcactcgccacatgggtggtgtcgtcgatggcgtctccccgcaagaagtcctctgtcttggcgccggtgacgatcgacggggtcttttcaccggtgatggtcgacggggtcttggcgtcgacctcggcgtctgcttcgccatccgcggcgatggccatctcagtggtagggtactagggttgtggacttatggggttgtaaccgcgagcggggtggcgggttttataatggaggaggagctgcccgtagcgggtagcggggcggaaggagaggattcggattacccaaaaaggaaaaaggaaaggcgtgcaaaggaacaggaaagaggaaaaaggaaagtaaaggaaaaaaaatacggtaacgctaattcgctgcgcgttaggattaatcgagtgtggattctaatccctcgaggggatatccccttgtatatctttttcttccaaatttgatgcaaatagttgtgaaaaattctgaaaaaaattgataatgtagagtataatgatacctactagtccaccaaaattcatgttcaaattcgatctacacatcgagaaataaaaaagacaaatttagatataaacagtacgctactattcatacgctgaatttgtattttttatatctcgacgtgtgagttgagtttggacttaagattttgtggagttgtatatatgtgttgtatgaatgttgtcaaatttgttcagaattttttataaccgtttagatggtttttaagcaaacgagggaacatcccctcaaggggtaagaatagtttcccgaattaatccccttttcccttttttccgtttcctcccttgcaggcccgctcctctctccgttccgttttttcccttcttctcagccgttcccagtacttctaaaaaaatactactatcgttcccagcccacctctcgtattgcttctcttgtaacaaaattactagtcgaataattcctattgcaaccagtttctccttcctcgtagagaggcctttcgatcttagtcttacccagcgacgtcttgcgcggccatccgatttattcgagaagcgtccttttataaacagattgtttgcaaacacatgcaattagttttgctgtttaccttgacaggaccatctggttgtactgagcacgcacggagagcatgtagccaatcaatccagccatggccatcatcaggaaccagaaaaacatagccccgacaatggcatcgccagccaaaacaagatagctcatgaggcatacaaggaagctcaccaacagatacgcgccaatgtagaacatcatgtagccaagctgatcgaccgtgacgagggcttcgaacagcgcaaactttgcaacgaaaaccgcccagcagtagatggctgtgccttccagaaccgagagattgatcacgagcagggacagatcacgaggaggcaccttcactagcagagccatggccgtagccacaagcatagagaagacggcgaagaaggtcacaacgccactacgatgtatctcgaaggaactcttctcctcctcggtcgagaaggtggggggagccatgcgcatggccgttttctccttgccaatgtgctgcaggtgctcggcgaaggcgtacccgagcaggccggccgtccagcctgtcgcgaggtgcatgacggcgaatccggcgatggggccggcgaatgtgccagcagagatggccagcaggacgccgtaggagatgtggacgaagacggtggtgggacgcattgtgcgcgagaggatggagatcaagaagaagaggtaggcggacatgaggagggcgatcgtccacaggtgggccagcggctcgccggagtggcggcgccgcagcagcggcggcgagcacgcgaggaacaggatggagataaagcacacgcgagctccaatcagatcactgccttcgtcggagagactggtggctctggggcctccggaccggatcatcgccaagcccgagcggtcgtcgtcgaccgagtcgcgctcgcgcgccggcggcgggcgaacgccggaggggctctcggggaaggatgagtcgctggccacatcggaggtgtcgtagatggcttctccccgaaccaagtcctccgtctccgcgccggtgacggtgatcttgtcgccggcgacggtcgtcgacggggtcttgtcgtcactggtgatggtcggcggggtcttggcgtcggcaaggtggacgtcgacagcctcggcatctgcttcgccatctgcggcgatggccatctcagtcgttgtagtgttgtggggttgtaaggccggagtgagcgcagggccggcgacagacctcggcggcggcggtggaggaggaggaattcgaggttttggctttggggaacaaggcattttgctctgtgtgcaacacatgatgtctgcgagcctgcggctgtgggtcttcccggtcactatgttttgactgtttgatttgttgccaaaactagcgaattttaatatgatgataattaagataggattttatcatcatgcatttataaatatacaataataatttggtagttacatatatgtcaagttatagtagattaaaattttaaataacatacaaaatatgaacaaaatgatttattaagatattaacaacataatcacggatccaaagttagaaaacaaccttgctctgtaaaatcttagatccaagagcaaatctactgtacctaaggaggtaccataaggtactaaaaatttagtgtaaaatttggtacctcataataactagataccaagagataccaaatttataatagaaaaagtggtacctcatggtacctcctcaagaaccgtaaaattgctctagatccaaagttgtgctaaagaggaccataaccttccacttacaaatcgtactataaaatttgctaagaacttaaaccaaacaataccatcgtattagtgactcctttgatatctcgagaatatcccctattttcttgaatgtcattatgaatttttttacatgcttcgtaagtgtcatgtaggatcctaaggcactgtgacgttttagaattgggtgccacattttagcaagttcgggaaattgaaatatatgttaagagttcagggatctagatgatacaaccaaacaagtttagagatgaataatacaattttgttagatatacacccctcacatagagttcactcaaccaacacttgtatttctcgtatatcccaatgagacaggagttagaactttctaacacaacatttgtacaggtacgtacgtttggcgaaggcatgttcccaagttatactcacttgtttttcacacgcgcatattttttaaattgttaaatgatatttttttaaaaaaatagaaaacttgttttaaaaatatattaatttactcttaaattttatgaaatatattaatttattcttaaattttatgaaatgtatttatttaattatttgttaatgagttgtttcattttacatgcgtagggagagtctccaactcttacattctatatttgtatatatatatatatatagctatacgttcaacttcttgtatattattgctttgtgtctaactcttttggaaaaaaaaatattgtatattcttggtttgtgtctataactctctttggaacaaagaacttacgcgcgaaaaaaaaactttttcgtgtatcctaatctatatacagctccactttaaaaatttgcagatatgtaggaatatactctctccatcctaaaatgtttgacgccgttgacttttttaaatatgtttgaccgttcgtcttattcaaaaattttaagtaattattaatttctttcctatcatttgatttattattaaatatacttttatgtatacatatagttttacatatttcacaaaagtttttgaataagacaaatgatcaaacatgtttaaaaaaaatcaacggtgtcaaatatttagggaaggaggtgtcaaatatttagggaaggaggtagtataaatttggagatgatgaagccgtaataaaccgagcgacttactactctttttcttctcctccaagacgaggggagcatctcaatctgcaataagagcgaagccccggtccaaagcagattaagatatcaactcatcgcgcccaaaaacccacacccccgtagccaaaacccgccgaggaagagggagaggagcacacgcatggcgctcgcggcggcgcccgcgaatctggcgggcaagcagagcttgcgagtcgtcgtcatcggcgaccctggcaccggcaagtccagcctcgtcgtgtccgccgccaccgaggcgacgtcccccgcgtactgccccccacccgcctccccgtcgactacttcgccgaccgcatccccatcaccatcgtcgacacctcctccaggtcctccactgcccctcacgctagatttgcgggtgtatttttttttgttgggggatttgtggattttgattcgttgacaattctgaattgctgattcagcccagagcagaggtcgaagctgatcgccgagtgccagtcggcggatgtggtggtgctcacctacgcctgtgaccaacctgcgacgctggagcggctcagctcattctggttccccgaactccggcgcctccaggtgaggctctgcactcactgccggaattgattggtaattttgtggattaattttgtccgctgtggctcatgttttgttctgcttggctcagttggaggcaccggtgattgtcgtgggatgtaagctggacctgaggggtgaggagcagggaactcttgatgccgtgatggcacccatcatggttgcattccgagagatcgagacctgcattgagtgctctgcgcttcgccagatcctggttaatatgtctgcagtcataattttgtgttgataggttgctctgagatagggatgcttggcacattgctgcacataattaagttaatagctacaacactagctagatcataattttattgtattctaggcatgaacttgttgtacttttactgggcaatacttttattatgtactgtgtttattagctaaccagtagcaccaagttggacagactagagtaatattaccaataataattagagcagttttaaaaattatgaaatatacaagaaagtattacacgatattctgaatacacagggacattctctctgaatttgggtttctttctcagaaaaacccaggcaactctattattctttgtttatataaataaaagtcgtattatgttttgggccataatttattttacaatataatattgacatctagggaattaacattcatgtgaaagtactttgcaatagaaatgcaatggtatcatcttgtatggcagtaaacatagtaacatactatatttgttaagtcaatagttataaattttgaattttccaaattcatgtgtgacttgtagttatcaatggagggagtacatgataattctgtctgatgctgttaggcttgagtccatggcctttctcatccatgactggctgttgtagcgagtccagcacgctgcgcgcgctatggcgtgtttccctcacctgcctagtctcccgatacttgtttccacaaatcggttgatgaaatttggcaggtgttggactgtttgtatcagttgtacaatgaattagttaattatcgcatgaattatttgaaccatcagatgcattaaaagtccagacattgtgctagtctctagctaactataattgcgtatgtttgcaggtttatgaggtcttctattatgcacagaaagcagtgctttacccaacagctcctctatttgatcaggaggcacagatgctaaagttacgctgtatgagggctttgaagcgtatatttattctatgtgaccatgacagggatggagcttttagtgatgtggagctcaatgattttcaggtttgtagccactaaagctgccttggtttctttgattagtgtaaggcaaactaatgcttgcactatcattctattaatacttctggtgatgttaagaatctccttttggctgctttacaggtcatatgcttcaatgctcctctccaacctaatgaaatcataggcgtgaagagaaccatccaagagaaattgactgaaggtgtaaatgaaaatggccttaccttgactgggtttcttttccttcatacccttattattgggaacggaaagctggaaactacttggaccgtgttgaggaagtttggctatgataatgaactcaagcttagagatgacctcattccagcaattaaacgagctcctgatcaagtaatgttgcccttttgttgcttccagctatcctgtgtactatctgtataaactagagtaattgtacatgtgcatgatcttaacactgatagttaattgttttagattctataaattgagttgctctgaattcagattttagaggtgaatttatgagaatttagggtaattgatcgtttgttatgctttttatttacagtttatatatacaccctttggtattttcatcactaacattactactgtggtaaaatatccgcactcttaagaactcctaaactgctctagaaaatgtgcttgtaatttgttagtcattcaatttgatgcgaatctatggtgttagcttcactaagcatcttcatgtttgatatttatcatacttctggtttattatatattttgctgataattaatttaaagtcaaatcattttttttgttccaaaccttggaattgaaaagtcaagtcattgatttcttgagagggatcttcaacatgtttgacacagacaatgtaagttctatgcactgatgtgattgttattctcctgaatcgtattcaactctttgttgtactgagcattttttgtaataaaaactgtcattttacattgataatttgaaaatgccttttggtataatatccaggatggagctttgcaacctgctgaaatcaatgatcttttttcaaccgcacctgaaaagtaagaagctgatagaacgccctttcatgtttaataacttgatactttcattgtaacaaaaagttaggttaccaaaattgttaaatatttcttgtattaatttctctattggacttgatgtaatgaagattctttgcattagaagggtgtgaagaattactatttaataatctgtctgttgatatttcctgtatcaatactcttctattggaatttcagtccgtggtcttctcatctgtacgagaactgtgctgaaaataatgtcttgggtggtttgtcgtttgaagggttcatctccaaggtattttctcaaactttgcatgataagagttgacacaacaattgacaaccctgtatttttttgttgatggattgaccttttagcaaattattatttgttgattggtttcaaaacaagaaagagaagccctttctctattcagaactcacacgcattgtatttattggtgtggctgtcctgtagcactgtgcaagattctttcatgactctaggaaaccccatattgttgttcttttaatctctatattcattgatctgtgcattctgagcatcaaaactaggtatggaatagattgcttacagtgcatgtaaagtattaagcaaattaatctgggagcaatcatatcttgtataaggagcacgcagtgtttaatatgaactatataatttgtcttgacaaacctgtgggggtgttgttaggcagaaaattgatctttgatttctagaattttattgttgctttaatcttgcgtttggaaaatactgaatttccttattggtctgttttcttttattgactaattattctgtaattgcagtggactcttatgacacttatacacccgtcaaatagttttgccaaccttatatatgttggctatcccggcgattttgattcggcatttaccaccacgaggaaaaggcgagtagaccgtaaaaagaagcagactcagagaaatgtgttccagtgttatgtttttggtcccagacatgccggaaagactgcattgctacaatcattccttaaaagatatcactccatagtattttatatcatgaactttgtttgccatggttatttcttctgatattctcactttcactcttggtccttgcaataggcaaccttccgatgctcctcctgtcaatggtgaacaatttgcagcaaatactgttgaactgcctgatgtaagtattcgaaattcttgatttattttgctcacaccatatgcaaccattttgatagttttattttgaacagtgcaacatttactcatgtattcgtaagtattctacagtctgagatgacagatactctttaaacaatccatattcttgtttattaaaaaataagtaactagcaacatatttatatgaaaccataattgatctgcatcttaacacttgataatgtgtgtcacaaacaagttagtttctaactgtttggtctgattcaataattttcttccactgaaggggactagaaagacacttgtgatgcgagaaatttctgaaggtgatgttggaccattactatcagataaggaatctttggcaccctgtgatgtagcagtaattgtttatgataggtatgctatccactgaattatccccctctttattcatggccataagttttgtcagttgcatttttctttcatggtcactgaattcttcctttttattcatgacaaaaatcctcaatacacagttttcagtagcagcactcctttcccattagctatagcagtatgatttgtttataaacctggcatactatgagagaactttatttttgctttagatgaaatcaattttgttgttgtgatgcatttgtattaaccccagtgacaaaaacagaaaccaactgccaacaaaaagagaaatttcagtcccccaaaaaataaaaaacagaaatttctcttgttttagagacacgtcaacatcttgtggtagctatcaagggatctaaacaaactagcagtaactggaggtccacagtttggtaggactggcaaataacatatgctgatggtaatctaaatatagacttgaaaccaacagctaactgcctgggtactggtatgggatgttcatctccacaaggaatatgaattagcagtacaccacttaaatagaataaccgactacacgatactgtcaattggctcgttgaagtgactgactttaatcctttatcctgtcaattggtttaaatattcgttgttctatgcgagccctcctgctgacagttcacagattcaggattgaaccaatgtagtaattcagaagttcgacacataaatattgtttattcagatgtacctctctctatattatctattcagttgtacctaattttctgcacacaaaatgtgatgctgttgaaatggcagtggtgatgaagtttcttggcaaagagcaagagaattgcttgtacaagtggccacacggggaaaaaacactggctatgaagttccttgtctgatagttgctgctaaggatgacctcgaccaatctccgttggctctgcaggactcaactagagtaagcttcaatacaatattgattcatttttaaactgttatattttatttacctctgagaatcatttgtcctttttggcacagttggttggttgaactggaattagatatttgaatgaatcagtccccccacccttttttttttcttttgcttttgctaattggagaccaccatgccagtggttgtttctgctgcctcatggaaaaactcttgatcaaactgtgtcgttccaagtcaacattcatacaaatggactgatttgtcaatattgtctactattgccaccagttttctttatgtctgatctctacagctatggattattttcagttgttttaattcaataaaatcatgtacttgtaggtgagccatgacatgggaatcgaaacaccaattcctattagtgtaaggttgagggatttgaacaatattttctgccggatagtccatgcggcgcagcagcctcatttgagcatcccagagactgaagctgggaaaacacacaggcaataccgtcaacttctgaaccgttccctcacggttgtctcaggtaagttagtgtcaagcttctgcctctaaagtgtgtttctgtatttgcctttatgctctggcacaaatcgatcatgccaattactacagaatagtaagagcacaggtttagtaagacaataaaatctaaaagtaatagttatttatgattttgagttgaaactgaatagtggttttatcttaagttggttgagttctaacacaactgatggtgtgccaataatttgcagtaggagcggctgttgcagttgtgggcgtagctgcttaccgggtttacgcagctaggaagaacgcgtcatcttgaagctctcctggacagtgatgaaatgctactctcctggacactgatgaaatgctgctattcccctcactgcccaacaacaggatagattagattatttttattgcttgttgagcttcgtaacatgctgttttctcttgcaacatcgtttatgtaaagatatatactcagttaaaatcacactggctgggaaaagggaatgtatatactcgatatgtccatgttgcgtcgcctattgaatttcagtacgtcccatgagccatttttgaactgactctaaaagatatattatagacagttctataaaagaaaaccctccaaaaagttatttaaaaaatcttccgtattgggatatcattacagaaagttcaactacacaactgtctgtggcagtctaacagatagaggaggagtgcttggtctcttggtaatttcgacgcgaatcgcaagtttgcaaccccaccagttacaaaaaatagggttgtgtttagttattgtgccaattttttttcagtatacggacacatataaagtactccctctatcctttaatataagggattttgatattttgcttacaatatttgaccgctcgtcttattcaaaaaattttggaattattatttattttatttgtgacttactttattatccaaaatactttaagctcaactttttgtttttgatatttgcacatatttttttaataagatgagtgatcaaacagtgcaagtaaaatgtcaaaatccattatattaggggacggagggagtattaaatatagactaataacaaaataaattttagattccgtccgtaaactaggagacgaatttattaagcctaattgatccgtcattagtaaacgtttaatgtagcatcacattgtcatgtcatggtgtaattaggctcaaaagatttatctcgcgatttacatgcaaactgtgcaattgatttttttccgttcacatttaatgctccatgcatatgtctaaacgtttgatgtgacggaaaagttggaagtttgaaaaaaaaatttaaatctaaacacagcctaggtaagatacacgattttgatatcattcatgtcacctcaaagtagaaaaaagaaaaacaagaaggagatatcattaatgtcatctcaaagtcaaaaaaggaaaagaaaaagaagaagaagaagaagaacgaaacaaaggctggtttagttcctaactttttcttcaaactttcaactttttcatcacatcaaaacttttttacacatacaaacttctaacttttccgttacatcattccaatttcaatcaaatttttcaattttagcgtgacctgcacacacccaaagaaggcgctcgaaacggcccgacgaggcgaaggcgccttttattccgtggaaaaagtacaccgaaggtccctcaatttgttatcgagttacaaaatcgtctctcaaccacaaaatcagatacccgatgtccctcaactaacaaaaccattcacttatcctccggtggttttgacgctggttttatctgacgtgacggctgagtcagcgtgggacccacgtgggcctcacatgtcagagtgccaggtcatctctctcctcccctcttctctcccttcctcatctctctctgacttctctccaatttgttgcgacgcgagcgacacggctgcggtgatggtggcgacgagcgacgcggcagcggtggggggaggagctgcgggcgggcagtgggggaggggcggcgggggtaggagcgccgcgcgggctcccccgccggccgccacccacgaccacgaggcggcgtgggcagcgtcaagttcggcggctccaccgcgacggccggctcgttcccggccgacgggctagtcgggctcggcggcggcgcggtctccctcgtgatgcagctcggtggcgcggcgtcgctcggccgaagattctcctactgcctcgtcccgcactccgtcaacacttcatcggcgctcaacttcggcgccctcgccaatgtcaccgagcccggcgcggcgagcacgccgctcgtcgccggggacgtggacacgtactacaccgtggtcctcgactccgtcaaggtcggcaacaagaccgtggcatcggcggcgagtttgcgcatcatcgtggactccggtacgacgctgacattcctcgacacagctctgatgggaccactcgtcgacgagctctcccgccggtgcagtcgccggatgggctgctgcatctgtgctacgaggtggccgggcgggaggtggaagccagagagagaatcacaaatcacatcgataaacatctctagaagtccatcttgttcagataatcacagtacttatgtagaaaggatagtaagatacagaaatgcaaaaataagctgtgttactcctgcaaattgcaagtgaacagaacaatctcaagctaagctgttctttaatcagaagaacaggatatgaacaagcagaatttcaagatattttgtggcgccggtttcgctttcttacctcgctatagattctgtgagagatcaaattacatgacccataaattgtagagcaatgcaggagtaacactcccagctgagaaattgattgatgtataacactccgatcttcgatcttcgttaggcgatgcaatgagagaattcagaattctcaccaacagccagcttgctagaatagagtatgagttactgatcttgaatgacctcgtgtgtacagccaacaggaagcaaaccgaacaggcgagtccggacttgacgctggagttcggcggtggcgctgaagcaggagaacgcgttcgtgacggtgcagcagcggacgctgtgcctggcgatcgtggcgacaacggagcagcagccggtgtccatcctcgggaacctttgtcgccgccgactgcgcggggagcggccggccggcggaggagacgagcggcgggcaggcgcgctgcgggagcgggacggggagagcgaggacgccgccgccgtcgtcgtccatggccgcagatctcgcgcccgcgctgtcagcggcgtcgccggcgggagtatgtgattgcggggcagcggcgggcggagcaggcgatggcgggcggagcgggcacgacgacgaagacagcttcttcccgcgtcggcgccgccggccgcctctcccttctcaagcgtcgcagccgccgccgcctcccttatcccgtatcgtcgtcgccgccgcctcccgggcttctccgatggtccgacctccgaggtcgcacgcgccgccgctggacctcctccccaacgccagccgccctgcagagaggagagaaatgagagagatcaggaagggagagaagaggggaggagagagaagacctggcactctgacatgtggggctcacgtagatcccaagctgactcgccatcacgtcagacaaaaccaacgttaaaaccaacgttaaaactaccagaggatctaaagttcgagggacgcccggtatctggttttcgcttgagggacgattttgtaactcgataacgaattgagggaccttcagtgtactttttccttattccgttgtcatgggctcattgtaactggttggcccacttgagaactggagaggcctatgttatgggccttggcttacgatagggcccacccgacggcgagccgtccgcgtacggggtcaacgcaccgagcaacggattcacaccggaccacgcgagctccttccgatgcggggcccacgtgcccaggaatccgaggcggaagggatcattccaacagctgggagatctccggcgccccgcacccggttcaggtggacccacgactccgcaactctagctcggccccgcgtcccgcggggcgcaccaacacccggaccacgcgacgaagcggagtcgtggatatgggtggcgcccgggcccaccgtattcgctgaacccatcacttcccgtacacctggcacccctacactcccgcacaccgcaaacgtaaacgcagtggaatccaaggcgacattgtcctcctttatccaaaaacaaccctgtataagacccttaacttacaaatagccccttacatcgttgtcagggaggacttatatctaaatatggataatgtttgtccttagttgaaagagtttcaaacccaaacagtggccggtggcttcccgcctctccccgcgcgttttcccgcttgaattcgttccgcaatccgagggcgggtagggctccacgtcaccgatccagctcctccttgcggtgtaaggagccgtccaattccgtcctttgcaagccaaattcctcccgccgccgccgccgccgtcttcgcctcctttataatctcccttctccgccgtctcctcccaagttccctcccaaatcccccatttcaaaaaagggaaaccaaatttctcggcgaggaggaaaagaatcctgcaatggagagcaaagcagaggcgttggctgcggcggctgcggcggcggccgcggcagcatcggcggcttctaccggaggaggacacgcgtgcggcggatgggagacgccgaagcgggaggagtgccgcatcccggcgacgctgccctgccccgcggcgccgaggaaggccgtgccggacttcgggaagaggcgcggcccgcccaagaacggctacttccagccccccgacctcgaggccctcttcgcgctcgcgccgcgccgccaggcctcctcgtgcgcttgattttgaagcttcggctgcggcggcggcggcggggagctctggtctagattaattttgggatctgtagatacttcgctatgtttctcttctgttgtactctaggtattagtagtggattagggatgggcaagaggagggtttagggagtaggaggtaggtatgtaggtgatggcggggcttgagatgaaatgagattatcagagctcataatcatactgtttttgtattccttcagatgataaaatcttttcctggcacctgcttagttgggcatttttgcactctctctctctctgctgatgttattggttcttgaggtgattgatatgaaatcatgtactcatgcagcagtagactttgattaagacctttaatggcgtcgacatcggcggcggcagcagattgttgcttgaagattgtggcctccgggacgtcgtgtggtttgctcttttctgaatatctgttacagcccacaggggaatagctgtataccggcagttcttttttttttgcttcactttcatccgcggcatctgactaggtaggaataggatagtgatcaccgatcatgttgtagtagcttgaaggtttgaaaaggtccctggttgattcattgattcataagcagtagtactgcagttcagtcttgtcttgtgtttactgcttgtaccagcaatggactcgcaaaaaccgtagttttactgctgagatagtccaggtttcgttttgccaaggaattaatacgggcgggaggaaagcagagcagtgtgtgcgttcgttcttgaatctggatgcagttaatgcggctgtgggagagagccctgcctctgcagcatggtgtgtctttgcctcctccctagctggagctaggtacggtgtaccactagtaggagaaattgcaaatgcatgtggccaatgcgtgtgactagtgtcagggcttcatgagaacaatccgtggtcctgaatcaagcaaagctatagacagaaaggagagaagggaagatcctggtgacacggacagcttcgagattctgtgaccgacgagtcgacaaggacacaacgtatgctcgccatctcgccgcggtgccgcctgttgggcgaacggcgggggcgcatgtgtggtgttgggtggacgaggacgacacgccccgtgaggccgtgacttcgtgagggcagcgagaggaggccggggagcgtacgccatacgtgcagcgtgcggggacaccgggcagaatgagccgggtgtgcaattgcaagcagcacggacatggccatgtgatgcccccacgacaagtgttgcaagtgagatcgatcgatgccagcaatttttgtttcttctctagaaaaagttttttttttgcccgtgcttgcagaatgatatccatacacctatgctcgcgataggtcgagagtagttttctcaacgactaacacttgcgacttgcgaaacgtcgatcagtcggggccttggctacaacaaggacagcaactcggcaccggccagcctcgattagtgcaggtaatttcgcccgcaatctatggctcttgacagaggcagagagttcgttgcagcaaccagtagtattatatagttaatttatacagaaagattgcacattagcacgaggaaagtgcagcaaaggaggccccctcaacaactccatgacggctgtggaaactttcgtcaggaactgttactttaccttgaagccaggcacaaattctgtcgtagaaccacatctaactggtgacacaaaagtattttgtcccatcgcaactaacacgatgagttgtgctaatctagtactcacaggaccataacgcacagtagctcgaaaaaactctttttgtcagccataaagaacacctggttcatattaaaaactagcaatgtgcagagttccatatcagggaatgcaaaggtttaggcgttgtggctaataatggcggttgcttgtgttctaatcaaacaccaacagatctccatgcaaaatgtcccctcttacctccagcctccaattacaggatgattcttctcctcgtgccctgaactcctcttgcttatgccaaacgtacttataccaaagctgacaacattcccaatatgagacaaaaataagcaattttttttcgcactgcctcatctaggtttccatattattgtccagataacccagctgaatgtttgtcacctggaagaagatgaagaaggtgccaaatttatttaatcctagttcattgagaaagcaggcctatataagcctacaccagcaaaaattaagtactgtaatacctggatagctgcttatggttggtttggtttgttaccatgccaaaatattgacactatcaaaacctgtcaagttttggctttgtcaagattttggcaacacatgtgtaattggcatatttgttgccatgacaaacaattcgtttatgctaattatatttgactgggccccaatttaacaaggcgacacaagcatgtcaagttaaatccatatcggaaaagccgcttggccaacagccttctgttcacttgatttggatgactggatgaaatgaatcatatatagaaaaaaacataaaaaaagaatgttctggctccacttcaacaacttgcacacaagctccaagcaacgtaacggcactatttagttcctttctttttccttttttctttttgttccgacaacaatctcccaaaaaacaaattcttgagaaacaaagaactagaggaaaaggttgatgaagttttatagaattgacctggagggccatgcatggttagcttcaaaggctcacaaataaaaaggcgcatgcaaggtaatgcagcggaagttgatctaagataagaaaggtgacaaataatgttgttttttacaagcaggaagcatgacctcctaaagcaagcctttcatgatccaattaggaattgatatttcaccttctatgccttctgtgaaaattaactggctctcaaagtcatatattattatgcttttttcatcaaaaagttatataggtatgcttcatagggaggacaacacactatactactagataacagcaccaatcttaacattgcagcttattacacacgcctcttggtttctttttccaaaaaaaaaacaccagaatatgttttagttaattaatatagtagtccattgtaaatcactaaattagtgtggtcatcgcatactcgcatggatgtagcaatacatctgaaaattagctgccttgccgaaaactgcaattcgatatactcaatagacagcaagcaggccctctgcactccctagccaggtgcacaaagcaggagcaaagagtggcccaatagcagtttttttctatggactcctaccaactcggccaaccactaccacgctgtgacctcccaccatgcagggcacgaacccatgatgatcccctatatagagagcccgtactcatttctcgccaagtgcaccacttcactcttgcttccaagtgcaaccacaaaaccagttcaaaagctgcgccccggcagccgcacggcttgggctgggcatccgaaatgggcactccccgtggcctacgaaatgccggctcctcctcctccgcatgccgcttcctcgccgcctttgccgtcctcctcgccttgccgacgctcaccgccggccttacccgtcactacacgttcaatgtacatctctaacgagcatgatcgatatacgtacatggccggccgtgtcgatccattcttgatgtgtggctgcattgatgtttctggccgtgttctgcaggtgcaaatgacgaacgtgacgcggctgtgcgtgaccaagagcatcccgacggtgaacgggcagttcccggggccgaagctggtggtcagggaaggcgatcgcctcgtggtcaaggtgcacaaccacatgaactacaacgtctcgttccactggtaatgccaaacaccatcgcacacattcttgcgcaatcccgcaacgtattcatgcaattcgatcgtgtgtgatcgatctcatgacgatggcaatgatatgtgcgtgcaggcacgggatcctgcagctgcggaacgggtgggcggacgggccgtcgtacatcacgcagtgcccgatccagggcgggggcagctacgtgtacgacttcaccgtcaccgggcagcgcggcacgctgtggtggcacgcccacttctcctggcttcgcgtgcacctctacggccctctcgtcatcctccccaagcgcggcgagggcttcccgttccctcgcccctacaaggagctgcctcccatcatgttcggtacgtgacgcctctcccctgtgtgatggcacttgaacttgaaattgtgacggtgtttcgtaatgcgtacacttgtgtaggtgagtggttcaatgcggatacggaggctgtcatcaaccaggccctgcagacgggagcaggccctaatatctccgacgcctacactttcaatgggcttcctggcccgacttataactgctcgtccaaaggtgagatgctctgtcctctcctgattggcccatgaattaatcacggatttgtctgtttatgtctctatgatgctcgtggcagacacgtacaaggtgaaggtgcagccagggaggacgtacctgctccggctgatcaactcggcgctcaacgacgagctcttcttcggcatcgccaaccacacgctcaccgtcgtcgaggcggacgccaactacgtcaagccgttcaccgccaagacgctcgtcatctcgccggggcagaccatgaacttgctcctcaccacggcgcccaacccgggttccccggtctacgccatggccatcgcgccatacaccaacacgcagggcacgttcgacaacaccaccgccgtggccgtcctcgagtacgccccgactcgagcgagcgccaccggaaacaacaacctccccttgccgcccctgccgcggtacaacgacaccaacgcggtggccaacttctcgagcaagttccgcagcctcgcgaccgcgcggtacccggcgcgcgtgccgcgggccgtcgaccgccacgtgctcttcaccgtcggcctcggcacggacccgtgcccgtccaaccagacgtgccagggcccgaacggcaccaagttcgccgcgtccatcaacaacaactccttcgtccgccccagggtggcgctcctggaggcgcactgccagcgccggtacgccggcgtgctgatggccaacttccccaccgcgccgccgcacccgttcaactaaaccggcacgccgcccaacaacacgttcgtgacgcacggcacgagggtggtgccgctcgcgttcaacacgtcggtggagctggtgctgcagggcacgagcatccagggcgccgagagccaccccttgcacatgcacggcttcaacttcttcgtcgtcggccaagggttcggcaactacgaccccgtgaacgacccggccaactacaacctcgtcgaccccgtcgagcgcaacaccgtcagcgtgcccaccggcggatgggtcgccgttcggttcctcgccgacaatcccggtaagaatctcggcatcacatttggcaaaatcttggtttgcatcgacttccgttgactccgaatgcagtgacgacagctagctgacatgtggtgcatgtgtgtggcaggggtgtggctcatgcactgtcacttcgacgtgcacttgagctggggcctgtccatggcgtggctggtcaacgacggccctctgccgagtcagaagatgttgccgccgccgtcggatcttcccaagtgctgatggctgatccaatggccgggccgggacagattgtttgcgaacgttttgctgtgtgcgccttcgcgttccgttgtgtttgacgtacaaaactctttgatttggaccgacttaattttaactggtgtgtgccgattttgtggcaagtgtttgggggttttgcccccgtgcttaattcctctttcaaaacagaataagatgtaagcaactcggttctgttggtattttttttcgtgggcatttgttattggtgtgtacacagtcgaatccataatgtaccagataacttctatatttaattgttttggtttttgatcatttcaatataaaaaatggcttaagctcgagagtaagaaaagcgatcacattatcttactatctgttataaaaccagccccgaaatcgacgtcggtagctaaacgcggaagaaaacgccataggagatccaaaacgacaacgtcaccgagatacgatatttggtaacggagttcagccgtagcctacatctccagggcactgattacgggcgctcctctccgatctagcatattacagcgtatcagagttacaacgactcacggtcggttgacgcaggcaaccgctccctctcgctatgctaagtcaccatgcggttacaacaagcacgcccctctatttatgagagatcttaggatagagtccgactcatactctagtcctaatacctattacaactccaagtcctaaattgtaaccaactacgtacacatattcgacacaaactctaacactatctacaattggaggaaaaaaaacgttgctatctactatacacgtaatcggagatgctataaacattactcaacatgctttttgggacaaaatcacaattatttctagcattgtgatctgttacgtgattcatgcttcagacgagctattaggtggttaggtttcaaggtaaggagggtgagggatgaggaagttcagaaatgctaccccccctctcccccttcctccacctggtttccttttttgacaccgcattactttcctattttagtaaatttatacacctaaagtttatacacctcaagtttatacatctaaagtttagataccaaaagtttatatatccgattcaaatttgaatttgaattcaaatattttttttatatatagtatttctatacatctaaagtttatagacctaaagtttatatatccgattcaaatttgaatttgaattatatccgattcaaatttgaatttgaattcaaatatttttcatatatagtatttcgatacatctaaaatttatagacccgattcaaatttgaatttgaattatatccaatttaaatttgaatttgaattcaaatattttctatatatagtatttctatacatataaagtttatagacccaaagtttataattcaaaagtttacatatccaattcaattttgaatttgaattcaaattttttatacataaatttttctaactttttattttttttaaatttttttgtggtgtactgtaataagaaaagaaggggagaagggagccgcggccgcgcgatgaagttggaaagtgtccccgacttagtgcaatggacggagcgatagtggaatcatctcagccacgagagaaggggcatgagtggtgggccaatgttggtactggggaaaactcattgttggagtcattacgaggtggtgagaggtgatatacggtgtatctaatggatggtggcgtgagggcattgagttgaagaagaaagagaagtgatgaaattgagttgtgagtagcaaatgctaaaggcaatactggcaaggcagagggcggcaaaagaattgtgacatgcggtaacggctaggagtgtaagtgggtcagccacgaacccacttatagatcaaaataagtgggtgtggtttattagactataagtggatttcgtgggttagctacttacatccctagtcacgacatatatgtcaaatgatacataaggatctattgtttcgcctattcgtagaataagccaaacgatatatttgtaaacgaaaagtaatttgtgaagaaaaaattatatgtgtgttcttagcgatctaaaagcaaagactgaaaaataaacttcaataaaatacctcaaaatcaacaccaaatttaaggtttaaaatttaaagtttagctgataagtataagcataagcgaaaagatgaggctctacgattttatttgtgatagaccataatgtaataatcttctttgattgcctaaatgaatatttaaaagcttgtagcatctagaaattatgtcccagttatgttagacatggaaattccaaattgtacttcatcagctacttccttcgtccatgaaagattgtacggacggaggaaatatgcatttactttggggcttaaacgatttgtttaacaactctaaccataggacgacaagctgttgttgggaccataaactaacaatttgtcttgttttggagctagtggctattaaaggtgatatgtgtaggctttaaacttgtactgatctatctgacaaaactgattaataactgaggcgttcagcaaatatataaagcatgcgttggcataggctaaatctttatatttcgaaaagaaaggatgtagcccaaatctaaggttacttaattaggtggacaaaagctagttaattactatgctaaaaatttgaagtcgtgcgcatacgtgcttataaattagaggactcaaatgtggagatgaacttggcattgtgagacgagtaaatcttctgatgaatttgatggcaaaagagtttcttggagatggcgcatcagtattttttttggtgttatctttttcttttgtgtttttgtgtgtgttttgtgtgggtggggcgctttgccacggccaacttcatggtatagagaatttcttggagatgcatactgactatgatgttatgccaaggcacatatacttaaaaactagctgggtggcccgcgcaattgcgcggctagcacctaaacaaaatcatatattttttaagaatgattttacttaaaatttattaaatagctatctcattgtcttaataagactttaaaagaccaaaccttatcatcctcgtgtttctaattatatagtttttaaaagtcacaccagttgctaccccttatgtcatctccttctttatttgcttgctcgatctaccactatttctattcattcttcttgtaatctttaaaaattggattttatagtttttagtgtttattgtcacattgggtttcatttttataatttctagatgtcctatcaaacgttgccattatacttctctacggcctatccactgtttcttctctttattgtcattgagattttaaaaattaaacatatttatcgtttgggttcatttttactttctagaagtcccgccaaaccgtcagcggctttgccattgtactcctctacggctcacccactgcctcccttctttattgtcattgagattttaaaatcgaacatgattatcattgctttttttttactttttggaagttccgaacctttaaaacttgaacttgtagtttcattttttataatttttagaagtcccatcaaacgatgccactatgcccctctatagcccgtccgccgccaactatttatcgtcattgtgattctaaaaatcgaacataactatcgttggaattcattttctattttctagaagtcccgtcaaccgttggcggctctgcaactatactcttaacaccgcgcccgctgcttctcctttttattgtcattgagattttaaaaatcgaataaaattatcaatggggattattttttttactttctagaagtcctggcaaccgccttacttatttgtttgcttcttggcctgcctgacgtccctccttttaatcgtcattaggattccatttggtgttttattaataattttatatgtcgtatcaaccgccaccactctactcctttataggcttgttacttaatttatctcgtcatgtgttttagatggtcttttctttcaatagtcttcatttttctcacaaattttagttatttataaattgtattcctaattgaaatcttatttttctttttctaatttcagaatttatttttaaaaaaaatttagttaataccttattgtgttcatttaatgattttattttttattttcaatttcagttgtttcaaaattgtattcctacttgaactctcttttaatttttctaattttggatattattttattttttattcgaaattttaattaatctcgtattgggttcttatatagattcttctttcaatattgcttattttaattccgaatttcagctaattttaaattgtattcctacttgaactcttattttattttcttttgctaatttcggatttatttatatttttattccgtattttaattaatctcgtattgggttcatatatggaaacttctttcaatattgcttatttttaattccgaatttcagctatttttaaattgtattcctacttggactttcctttccttttctatttttggattttattttttttatttcgaattttgattaatctcatattgggttcttatatggaaacttctttcaatattcattatttttaattccgaattccagctatttttaaattgtattcctacttggattctcctttccttttctatttttggatttaattttatttttatttcgaattttgattaatctcgtattggattcttatttggaaacttctttctatattgcttatttttaattccgaatttcagctatttttaaatattatttctacttggactattcttttcttctttttcttcgattaatgtgggaatttctagcctccacagcgaacgtggtgcctcctttcaaggctgttttaataatataatagatagattattgacgatatgttatagtgggttttgttcagacttaaaaaaaatgttagaccaactataccggttatctaatccatatacagtttctcctaattcgattcatatacagtttagagctgaggggttgtttaaattgtagccaaaataaatcttgttactaaaactttaaagaaaatgatgtggtttgaaatgccatcaatatgaacaacacataagagtctaaggtaagaagagtctacaaaagttgttttagtaacaactaaaaagaaagatcaatcgaataaagctacgctcagattgaatggttttacctacgaggaagcactttcgatcaagacctaaaagcacacacccactactgtttcccgacgcctactattttttctactccctccatttcaggttataatacgttttgactttaatcaaagtcaaactgttttaagtttggctaattttacagataaatatagtaatatttataatactaaattgatttcatcaaataaataattaaatatatattttcataataaatttgtctttggttgaaaatgttctttttcctacaaacttggtcaaatttaaaatagtttgactttgaccaaagtcaaaacatcttatatcctgaaacagagggagtagacaacataataaaatttcatctttacttaatgagttacaaccaattattacacaaattcacacaataacgagcacacaccaacaaatctaaaaaagctcgcccaaataacatgaagcaagcataaactaatatgcaccaatacaaggtaaagaccccacaagatggtgaaaagttgcataccatttgactcgagtttacgacatgcagtatttattagcttaatgtcatcatcacacctttatagttgagcctaaaaccggatccagcacgttgcccaaaaaaaacctacatataatatttgagcggtgatttgtcaaaaaaaaaacaaatcatttctcctaaaccatagaatccaacatatagcatatgctcctaaaataataagtttcatgttttctttatcaatacccacaagccaatccccaaagatatgagatgaactatgtggaggatataaaccataagaaacctgtaatgctctccagagcaaaatggcactccatgaataaatgatggatcccctcatttttattgaaaaaacaacatctcacactaatatttcaatttctcctaaccaaattgtcctttgttaacactatccctttaagcaaataccacataaaaatcttaatcttaagaggcatcttaagtatccagttaattttgttcctcccaatataagtattattaattaaagctaagtatatagaacgaaccgagtaactattttgatgaaaatttcatttaaatatttcactttcttctgtcaaatggatatgcacaattgaagccattgttatcaagtcgcccgactagtcgtgattagtcgtaaagtcggtcaagctagtcgactaaagagccatgacttgaccaaatagcaagtcgtgcgattagtcgtggttactcgtggttagtcgtagattagtcgtaaattcagccgtaaattagttgtgattagtcatagcaaatcaccaattcaccatgctaattggcttattgtgtttagtactttagttttatttcttgtcgacttattgttttgctttgcaactctatagtccatagtttatattatatacattccttagcacagtataatactagtaaagattatatattgcatccactgtttttgcatgaccaagtcgtgggctagtcgtggactagtcgaccaagtcgacaagttggttcaggggtacctcgactcgactttacgacttgacaaccatgatcgaagcacacaagttatgccaattgaccaggttatagcctactaaagctctttaaaaaacattcagcggaacagaactcataacatttgcaatcgaagagtatctccttcaaactatagaatacaaaggcaggtacctatctttaaaggaggtatttcctatccacttattcttgcagaatctgacttgttcactattattaattatctaggaacccatatttaagaatgtactcttaactttcataagtcccgacaaaaaataggaaaccccttctttcctctcaacttgatttgttgatagattatcgaagtatatttttttcaataaatcttgccaaacacattgctaatttattagcttaaacaaccatttgttcaataaacattggttttgaattttcaattataaactccaagtccaccctgattttttgtcagacatataatatcccatcatgcaagactatatttctttttatgttcatctccttgccaaaagaaacgtgatatgatatgtaataatcatttaactactaagtttttctcaattattttccagcctttgttgctaagatttccatgatatttttctcaggtatgaaagtttgagttgggctaattactttttgaacaacctcagtaattctatttgtagcaatttcgataaaaaaattaaaactaatattaagtaagcaaatagatttatattgttgaatctttgtaatctttttacacttagatagtaatataatattatcaaaataaacaactctatcaactgctgattcttgaactgcgtcgtacgcgatcgtatgtgcatatgcgtacgtgtcatcgggctgacctgacacatcgaaggcaatatggcagacagatatttgctgccccttgcccgtcacctactttcctttccctgtattctacgttaccgtggcttgatcacatacacgcaattattttgttcagaatttacggaagcaaattgctccacatgcatcattgcatcacccatttaagagtgtgtttagttcacgttaaaattaaaaatttggttaaaattgaaacgatgtggcgaaaaaattagaagtttacgtgtgtagaaaagttttgatgtgatgaaaaagttaaaagtttaaagaaatatttcggaactaaacacggtgtaatagtggggagagtacataatgctactataaacgagctgtagactatctactcgtattgttatactgtggactgcttcaacagtatcatatctgactcaagccacctgtatggctgtatagactatctgtccatgctgaacattttgcccgaagctctgtcgcacgtacgtacggcgtgcgtccgaactttcagcgaacgtgtacgtacgtaggcgaacgttgtgtttttgccacatcggagatctatctgatcgactcgtcgacgtgaggaagaaaaataaaaattaccgtaagagatctgggcgaagcaaagaagcggatcacgcatcctaggcactgtgcgttcatagtgcgtccgtacaccagcagttgatcagactccacagaggttcagagccagcacgacgagtgccgctacgccttggtcggagacaagcgccacagatgcaccaacgcaatgccaacatggctgtaatcagttccgctcttcccttcccttccctcggttcctcgcagtgagaattgtttgcagtactgttaatatagtagtagacattgacgtgtgagtctagacccatatgtcagccacgacaactgtatcagcgctactggatttgcatccggctcctcggcgaacaaaaaaaatctcgaggagaggaggcctgttccatctttgaccggccgggctccacggtcgccgaatcggatagccatgagcccgtttgatttggcccaacctggttttaatcattggccatggcgacgcagcccggcggcgagcgagctagcagtagctgatactgacatgtcagaaagcggactgtgacacacacaggagcgcccagcgagctctctcgttgttcggtcgctggagtacttggacagttggaccaaaagttgatgagcacgcatcgtggaactgcagttggggaagccgggacaaacacaaaaggcgagcgggcagcggagacaggaggccgatcgatcggcctatggacacgggactcgtcacgggtcacaccgggaagagattcgccgagatttcttttttgagcgcgagcgaatgaatgatcgatcgatccggagaagcagagcaggcagtacgctgttctttttttttttttttttttgaccgtcactacaccagatcctcacatctctgatgggatacctgtgacgggcaatcgaaatggtcactaatgaccgtcacctctgacgggttatacgggatgccgtcatcggtgaggcatccggctgcgacccgtgacaggtaactagttacctgtgacgggttaaaaatagaacccgtgtgaggttacctcacctcaaacgggtttaagtcctaacccgtcataggtgactagttacctatgacgggtcacagccggacagcccgtcagaggtgaggtttactcacctcaaacggcttttaagtcccagcccgtttgagatgacttctgccactgtatatatatgtctcctctcccagcgggacccacatgaggagataaggccggccggctccctcttctccacttctctatctcttccacttcttctctctatctctcctctctttctctgtgccgggcgaggggaggcgcggcggcgccgagccagcggggacggcggcggcggcccggccgccagattcggcaggggcgggaggggaggcgcggcggcgccgagccggcgagggcgg

SEQ ID NO: 8975 - DNA, 21899 bp, Oryza sativa
  unsure (1)..(21899): unsure at all n locations
cctgcaccccctagtgaaaccacaaacctgcattgcaaattcttggtatcaggatcatttcaagtttgacataaagatacaccatctggatgatgcccactaataaggaaataaatcaccagcatgaacgcatatttctatatatcatattttggactatgaatatgcacataacagtggtgttccccatatttctaaccatatattgtagccaattaacttacccgacaagcagcaaaacgaatgccacaacccacaaaacatattggtatgctttgtatttgggaggctgattagtttggggcaactcatgtcgttccatccaaccaaactgtggccttgccaacaaaacaaatcccaaaaggaagcccgtcacaaatccaccgatatgagcaaagttatcggcatgaggtagtatcccaatagccaagttgattgcgattataaatagaagagttattatggctgctgcctgcaagagtggattagcttgatcaaaacaaacatcaagcaactgaatagtgaaaatgtatgtgcatctatctcatttactaaccttgttggaataaatagtccagttcataataagctcagaaagcattgatccaagcagtccaaataaagctccagaggctccaacagagatgtagttattacgaaggaaaagcgcagacaacacactcccgccaaaaccagatagcaggtatatggcaccaatgcgaactagtaggtaaggaaactagtgtcagtttacagattattaacatgcacggagtggtgacatcaaaatagaataataaatagagcactaaagaaagtcttaagaagaagcaaaaggtgacacaactatggagacaattagaaaaatgaagtcatttatgattttattttcatataagaatggcaacccagcttcgactactagatctgctagaagtattgggatcctatccgtttgagaaacataatgtcatcagaacagaaaccatagccatgcatttcaaaccaggtcaggagtgttcagtgtatatcttgacattgaaacatccacaaaacagaaattctatgagatggcatgtattcaaagatatatgttaacactaagaacgtattctcatagttaaaaatgacactgaatcagcatagtaagaaacttaccgaacccaaattgctgttcaaggcggattccaataaacagtaaactcagcatgttcacaaccaaatggattaggccagcatggagccagatacagctaatgagacgccatccttggtgctgatgaacaactttgttccagtcaagagctcccattttctgcaaactgccaatcaaaaagagagatgttaataggatcaccaatcatgttgttcatccaagaaagctgggtgcatcatatgatgcagagtctgggattttcattccattatctaataaaaatcttgttcatccaagactatattagtcagacctatattaaattcgcaaataaaagcaaacagcagacttctgtggccaactggccactgagctattatgttccttacaaaggcgttacaattaaaataagcaggcagacaagtaccgtcaaagagaaagctccaacatttaccagtctttggcttacgtttttttctgacagaactagtacactatacatattgttagtagggtatcagtatataataacacatgatcctaggcctgtagcaaccatgtcatacaattcccagctgcaatctgataaaagtatcaatatgaaatgtactaggtctgtagcttaaatactgacagcagccatcacgaatatcataagagactgtcgaaatgagttagtattgtgccacaaaaactacacgatttaaggcacacgctctgttccgaggttatatcccaaggtgccctattagcaacaaattgcaccacagggagactgaagctatgagtggattaagaaaccaaaagcaacgaagctctagatcagtccaagctatagtccggattgagatctgaatggtcaccatcggagcacagagtcacagagttccctgtctcctgaacttaaaaacattaaaaggtgtgaaagattgaattgaaggaaaaggaagtttgttgcaaaatatccttgtttggattccccttgggcaaagcttcggccaccaaagaaaaagctcggagatttcctcccgctggtcatactttaagtacacagaatcgcgcgctttcagttcatcatcagtgcttaaagatgagagtacttttaattagacctccaaaccacacccgagaaattctaattttactcaaaattgaccagttaggcagctgaaaatctcgtcttcctattcctggcagcgcctcgatcaaactgcaagatccgaaactcaaaaataaaccccccaatctacccgcacaattccgcctcgagcgcacccaaaacgcccccaatttgagcgacaccatggacaacggcaacaagataaaacaaaaaaaatctcaggagagtggacagaacgtacgtggcggaagacgggccgaggagcgggttctcgcggagcggctggaaggagaagcggcggaggaagccggcgaacgcaccgccgagcgcgctgccgtgcttggggcagttgttgacgtacatctcgacgatgaacaccgcgatgcaggcgacaatcacggtgggcacgagccacggccaccacttcctgtcgtcccgcccctcgtacccgccgtacccgtaccctccccccgccgtaccccgccgccacccggctcttctcctcgccgccgttgctcgccatccctccgatccctcttccccttcccctcagtggcgaagaagaagctcaagtggctactagtggtttccccggagctcgggtttggcttcgaagcgaggggaagaagaaatgatgcggcggaggaggaagggagaggagacagcgaccggcgtgggccccgcggtgggtggagggcctgtctcgctggcgcgtggggtcccccgcgacaccgggcggtgagccgttgctgtctccgcctcctggccccgacgaggcgtcgagagagaaagagagagagagcagagtggttggtccggctcgctcgcagtaactgctccacacaggggaggcgaggaggcgaggggaaggcgagcacgcgacgcgggcgaaggcgaggactcggcgtacgtgtggcgtgtcgtggcgagacgaggcgcgaagcgtgtggatccgagaggggggatcgttccacgccacggcaccgcgacggacgcgggtgcgtgttgcgggcgggggtgagctgttgcactgtcgctcggcccaggtggcgtctcctcttgcatacttcctcccaaaaaaatatttagattgatcttattttaaatcataccaatttttataaaactgttaaatatgtacatacatttagtctttgtactaaatattgataaatagataaaaagttctgccaaaattttaataatattatcaattaccaaaattttggtattgttttgattacagtctaaacatcctcaaaatcaatctagataagaatgtgatataacctaagataacgaatctagatatattcgtatatagattcattgtcttggattatgtctcgttcttaatttttttgagttatgtctcattcttaatttcttatttagggtcatatttttgagacggacgagcatagtatagccacctgctctgcacgggcgcccgcgccgactgggtaaacggcgctccgccaccactgtgtcaccctcaccgtgccagcgtagccaatgtacagtacaaacagtctacagtagatgctacgtactactgtactactactgggatccgtggaaaaggtgactgacacgtcgtcgacgcagccgcatgcagcagcagtggaggctgtcctcgtgtcgcgcattccgcgttagatctgggaagaactgtggtgggatcatatgcaagctgaccgcgtcgtaaatggaacttttttgtgtgtgggtgcgtactgtgcgcgtgtacggccggtgttgcatttaaccgcgccgtgcgccgcccgcgtactgtgcgtgcgtacgtacgtacgtggtggcgcacgcaacgggagaccccaagtccccagcctcggccacaccacaaccccaactctccaaggctgtgccttgcacgcaccgacgccgtgcgacggtgcgagggcgtactactcagttgcattgcatgcgctcgcgtaggcgtagggctcacaccgagctggtccgtcacgtatgagtacgtgctccagcttacccaggtccccccaccgacgagggatactacgactgcaactttaggagttacagtgcagccgatggataaaaaatcaacggttcaggtggcaggaaaatactgttcagaaaatactatagcaaatctgtacggcagcgattactgtagcatcgatggtgcaacaggatgacagagcgaatcagggcgttggctccatcgatccaacggctataacgtgctccgactggtaaagttagagtcgttactactacagcaccggatctcaattcaatgcaagcaagctcatcactagtgatgccggagaacgcccgcgaaacggtcgacgcattgctatagtattttctaaacagtattttcctgccacctgaaccgttgattttttatctatcggctgcactgtaactgctaaagttgcagtcgtagtactgcaccagatcttgatccgcttgcattgcagctggctgcaagccctgcaagctgtgtacgtgccttcaatccccgtccgtctcggcgtctcgatcgatcgccggtgaatcggcgatcgatcatggctctgcgatttctgcatgcattcaagtgtcgcaggcgaattgctagctggaaaatggagttagcaagcatgcatgatggatggatatgctgccaatggtatacggccgtggccaacaaatccaactgtacgaacagggacggctcgctcactttctttcacctcagccttcgtcgtcctggcctcctggcccgcatccaaagggcatgaattgaccgagcaactcatcagccaagccagacccccaatccattcctgaactcgtggtgactggtgagggctccacatgtcggatcccaagcttttgggtatgtttcgttagtgattggttactagccacactataccacgcctcacttttcactgccacaatttattatgtatgtagggatgaaaacggtcggaaacgatcgaaaaacagcctcaatcatttccgtaaccatattctcggaaacgaaaacgatatcggaaatatcagaaaaccggaaacggaataatacggacggaaacatgtcggtgcagatcggaaaccagtaacaaatatggaaacattaaactataaaaacatatatttaactttacataagtatgttatatgtatacataaattcaagcttatactatataaattataaattaactttattttagccatgcataaaagttagagatttgattgaagagtcagtcaatctgtaagctgtgggccaagtatagacatgctctataaatatcgacatatttagaatacggtaattaccatattataagaaatggtaatttccacaagaatacggtagatacggaaacgatcgatataacagcaaaaccatttccgtttttatttccatatgttttgccatttccatttttgttttggtcgactaccatttccatatcgctcggccggtagaaagtcgaaaacgaacgctagtcggccggtaatttccgttactgttttcacccctatatgtatgtgtttggttagcttaacttccttaccaatttcaccatacttaatgactagcaatttattcatcacattttatggttgtcacaacttatctaacattagttgtggcaaagtataaccggtaaccaaacatatccttactactgtagttaagacttctttcaaaatcaccagtttttaaaaggtcaaagaataaatagttaccccccttcataaaaaaaaactaatatatttgtagtagtattatatttgtttttaggcagaaggagtatatagtcttgacaataaattaaaagccagaaatcgaagaatcaaggttattcagattttcacaatttgcttaaaattccaatctctgtacttagccctttgccttattttacaaaacacatgacgccattgtaaaagattccacataagttaagtggctattagaagctgtggtgtcacgttgtctcgatggcaaaatcattttccgcagggcagctgtactgaccccatatgtcgcctctcgctaccggtggtaccgactaccgacgatgccacagcatttgctgctgaaagggaatcattggcttgccaagttaattagcagcagcagcagcagtatattttggtcctaatcaaaagggattatgctacttggtggttatctccatattgtcattgagtttactcctaaacaatctgatcttacttcctacacgccaaaggaacctcctagtttattgttgagctgcattacgcaaagctaaacaatgttggattacgcaaagctgaactatgctatagttctctttgacaggactgaactactgtaatattttcttctttttttttttgaccggactgaacttgcgttgttcatcactccaacgtccattttctaagaatcgatgtgaatgatgtgatcatttcagccaatgggccaggctccgatggcatatccatttcattgccaaaataaaccctatcactatttatttcaatgggccaggctctaaggacatatccatttcgttgcaaaaaaaaaaaaagtgaatgtgacgggacggcatcccgttcagacgggatgatatatctgagatatcgcctaataccttagtatcagccgatacttaccagtatcagtatcaggctgatactaaggtattaggcgacacctcggaggtatcataccgttcaaatgaggtatcaaacaatacttactagatatcaggtgatacatcaatgttatcattatgtccgaacggtataccttcttgtatcatttccaaaaaaagaaacttattattattatttattggtaaaaccaaagattgataatgccaaatgttgccaatataaaagatgcaaatgtgttgttgtctggtttgattccctatcaaaatttaaatttggtgtagttttgtaaatagatggagttcggtaaagttgtaatggtgaaatcatgttcagtttattgtcgtacaaaaatttggttgacaacaaagtgaacaaatcttaaatataattatgtaccgtataattggctgtatttagattggtccaaagtttagaatttggttaaaattggagacgatgtaactgaaaaattatgtgtatgaaaggtttgatgtgatggaaagttggaagtttggaaaaaaactttggaactaaacacacgcacaaacgtgacgaaatatcttataggccttgttgcaatgagccttttcggtcaaagagcccaattgtgtgctacaaggcccgcatcacgaaccacttgaacccaaagatttctcatgccaattcggcccacaccaaccaaccccgcaaaacctcccctaacaccccgatgctccgccgcatcgccgcactccggccgccgccgccgccgcagtcgcggcgggatatgcatccaagtccaccactgctgcttctgcgggaccacgccttcgacggcatcatggagtgcgccgctttctcgtcctctactccgtcctcctctatgcggccacccccaccgcgctcgccggcggcggcggaggggccatgtccgtgcccttctcccgtcttggcgccagctccgcctcgcgcccctcgacgccggccgtttcctcctgcgccacccgcacgcgttccaccgcgtcctccacgccccgcctcaccccgcgcgccgccacggcgctccgcctcgaggccgacaccatcgcctcctcgctgccggcctccatcatccgcatccgcaagctcctcctcctcgcccccccccccgcgcacaaccgcctccgcctccgcctcgagcacatcctcctcctaggggaaaccagggtaagctgcacgctgtgttccttcgggaggcgtattacaaaggtcaactcgttgagcccaatgagatttatgcggcgaggcggacaatgtaagagctgctcatgtggaattgaacccgcagaaggcgaatttggaccggatgttcactagcacgggtcgtggatgggatgagcttggtggcggtcgtcgtgggggagcagaattgagggaggagttccttggtgaggcgagtgaccggagagcgaatattaaggctgatggtgattatggtggagattgtggccatgactcgggagttgagtcactctacattgagtgaggactgaggagcagaatcatactgtggtactaacatcaactaaggaagcttgccttctagaacaagtattgacaccatctataagctctctttcttctgatggtgaattaacagtcggatgcagcaatgctgattgaggagaagatattgccacccgaggctaaaactagtgagatatcttgtgctaaaactgttgatattgtcaaatgaagactctgggtgtcggcatttaacttcactgcaatggtcggatggcatcttcgttttgcactccgttgtatgaagaaggaacaaagagagaggcatgggaactgaaaacccctcattattttgagcactcgttcttctgataatttttactgagtcttgtgagtactctcagtctctcacactaggagtgaatctctctctctctctctctctacctattggggattggcattgccatctcaaaattctgtgactatactacctatcatttcttatacatcgtatagaaacaattgaacttttatgtgtaataagtgttgcacggaaactccacctaaactgaattgtccgatgtcagtgttaatgtcaatatttaatcttattaattgttttatgttttccttgctatgtcttgagtcttggctaagaaatctggaaatacagtccaaaagaattaatttccagagttgatttcaaggaaaagtaagactggccttttggatcctgttgtcgtatctactcatagactggcactaatctttaccttctacttagttaacgaaggatcattgcatccgactacgatttgatgcataatcagtcttgaactatacattgcagacatgttatgtcttctgtccattgtgaatttgtgattgctgaaccttactatttagtatcatattttaccctgccagttttgtagttctcagaatgtttaacctgactgcaaggtctaacctattagatatgtgtttttcactttaggtatggtcgacaaccatacaggtagtgttctttaccatccaaagataataagatattggacttttattcagagcgtcatggttgtaaacagcatgctgattaaacaaaaagagtttctatttccatttccacttaaagtgactaatccagcttngactgttcttcaaaacattgttcaagtttggaacttctgcaatcccttgattaataatgattcttctatgcaaaacaacaaattttcacatgtgaatgtaacctcagcggctttcatatctgcaatgaaggaacgcggtacagattgaaagggcaaccaatgcacagtgcaaaagacattgatgaaaaatcagaaaacaaatattacaggaaaagtccattcagtttggaacagaatgatgaaggctcatgtagcactgcagttggcatgccttattgaggtctgcagcttgctcactgtttcaaatgcacagtgctggaatgtcttgtgttgtggttgtgagttgtgactgtctctgccatatgcacttttataaaagactttaactcttcaatatgcactggaatgctgaatgtaatgaattggcagtctgtaggatcaaagttcccgggtcgatgggatcgaggaacagggtcgagaaacatggtacgctacttacaagatgggaacgaaaatgacctcgtgttcctggacggtgttcccggattgaggatcgctgccaccgaccccgttttctgtgactatgggatttgttcttctgaatatcatttgaaacctctgaatttcaacttgcatgatattgtgaacccactaattggtacgtgatgtcatcatggttataatgtctgatattatctgccaaatatgctgctatcattgggctccattttactgctttgcagatgtttttactttctaaataacctgttttaggattttttttatgtcattgactgcctactttttttagtttgagtttttaagtgttaacacccaattatactttaattattctgaattctgaactaacttattgtcctcttgccacctgaaattgtcagctctcccttcaaataataatactatgatcctcaagtaatatcaactagtagtagcattctctgtacatatcagataatcgtgcttgtcatttttcttttggccttcttgtgtgatgggacttagttctgatttgtgtctcctatctagctttatgtccttttctgaaaatttatttgtttgatagtgtcattagatgcttatagtaaatggtctattcttgtaacatgtattgatgacagcatgggttaaaggatataggtctagtttagcaatcgagcataacctcatttatgatgttaagtgctgatgaagattgaaatgtataaaaacaatctatgttgtccacaatccaacagacatattaagcaggtctctctcgctctatttaattcaattgatagtaagcttttctatcagcttttgtacctctgctatcattttcgggtatatcttttgtcctctactttctgtctgccttgttgttgctacttcttatgggaaaaacatacaggattacttttgtgcgccaaacccatattccttttttttttctcaaaccattatgcagtgttttgctatttgtgctcttacatgggtgttttgaactgagctaactatttttcttgaatgatacagagcaaagagaggtgatatatggtctctacattgcacttattattctggaaatatcatctctatcatttatgttgcctatattagctggattcttttggcccacaggtatgttgacatcacataaacatcttattcctaattaattgtgctgaatggaattaagagcgtatggacgaattacgtaagttacgtttggtatggtgtgattaattgccgttgctgttaagcctttccagttaggtgtgctgggttgatccaatgcaaggccgtatttgtatcatcaataattgccattgcagccgccgcacgcacgacccacatgacccatccactcttggtcactcatatcagtgtttcagctttcagccttcagcctacagaaaaaaaggggggtgttattacaaacagctttttaactaattagtaccaaggaataatcatgtgggtaatagtaacaatttttgggaacaggtccacgtgaagattactattgtccagctctgtaggcacagctaacacatgctgacatgcaatactactgctgctctgcttctccctctcttggggttaaacaggatgtcatcagcattaggccaggaggtcgacgccaaacctaatatcccagtccagtgaacagtggccgacagaattagagttagagatcggattagattgaaccctatttagtggtaaattcatacaatcgatgacagtaaaaggttagtatatccttaaaatatagctgagctcaaactgagcgtgcttaaaagctcgaagacacagcttgagctcgagcccaaacataccagcaatgtagagggatgtattactccctccgtttcaaaatatttgacaccgttgactttttagcacatgtttgaccgttcgacttattaaaaaaatttatgaaatatgtaaaactatatgtgtacatgaaagtatatttaacaatgaatcaaatgatatgaaaagaataaataattacttaaattttttgaataagacgaatggtcaaacatttactaaaaagtcaacagcgtcaaactttttgagatggagggagtatctttttactcctgactccccgatgctagctttggacatggagggagtactaaagtggttaagtttagcatcactttgattaaagacaatagtactctcgtatcatctagttgtaaacctaacttcagaaagcaatgtttggcctaaagcaaaaaatatgtggattaaaaattgtacacgcgtgtccttgacgatttaaaagatcacattgaaaaataaactacaataaccccctccctcctctaaaaaaataactctaattgttttgaatggaaaattaactctaaaactatgtttgaaaatttatttatttattggctaacacttataagccgaaaggcaactgatggccacattcctcttttttatattgttcataggttaccaacccatttggccatgcacagatatgctaagctcaaaccataattgcccagggcttgttatctaacaccagtggtgctaattgtttgctccaagttgatttgcatccgacatggtttgaaggggaaataaatgctcagatggatgcttcaaatgaaatttcaaagagggagaaacgtccaggggtcttccggttagctccataaggtggtgggctagacggcctgngttcgaagtccccttctaattatttaatattagatcattccctaatattcatgtttttttaaaaaaaattcaaagagaaatgctttgttgaatttgttgaaagaataactgaagatcccccccgaaaaaaagaataattgaaggaagaatttatgtacaacatccgtcccaaaataattgtaatccaaattgtttagtaaatattaaggggtctgttcgctgcagctaaattgtagttgttgtgtagctgcgctacagtgcatgatagagaaaatatatgcactggctgtacagcgcagccagttacagctgcatagcagcgttgccgaacagagccaaggtttgagaagaaagactgtaatgccccttattaaatggtatatatagatgagatagataggagtggaagggtagttgagggtaaagtagagagaagtgatcaatgggaccattagtactctactgtgacaattattttggaacaaatttaagtcctttaaatacaattattatgggacaaagttagcagttaagttgtgcatgctcaaacatctttcttggtttgtcaccatgcaaacttatatgcaaacttatgtttagggatgcaagcggggcaggcaagcttttttttagcctgcttatctcatttatacttcattttttcttctaaattttgtattaccatgtggaaaatgaactcgcaagcgaatttttatgcggatagcgggactacccacttgcatccctacttatatttggcgaatgacctagctttgcaagtagggagtaatttatccaatgatcaaccggtgatacaaatgtgagaaaaagacacagttgtcattattagtatcgtcttgattgtcatcttttacaaagaaggctttttggacactacctccttttctaagtaataagccatatgtagtaccactatactaagattcagtccttcaacccatagtagaaaaaactagaaccagaggtgaccacggttcggtttcctttaaagaccggacatgtaatcgaactgctctgaaccggctgaaccggcggtttttcggcgaaccggacactaaaccggcactggttggaccggctagccatactaatgggccacgatgggctgtctaaaggcccaatggtgcagctagtggttttttttttagcaaaaatagcaagaaatggtgcactgggtgggattcgaaccctctggtccgggggttgaaagagccaagtgctagccatcaggccatccaacgacatgtgtacatgagcaaatatgtaatatacatgtagtttgtgaaccgcagttcaaccgcctgggtcaccggtcggaccgacggaccgctgaaccgagaggtcggctgggtcacccaccggtccggctttttttactatgcttcagcctccttctaatttcatagtttcattgaattaaaaggtaacctcccccctcaacaatttagtttaagtttcaattaacttcatttataaatgaactagtaactcctttgataagtactactcctatcaagcattggtcccctcctcttgtttaagtccattccaattaaaccttgtgcatctcttgaaaaaaaagagaagaaaaccggactttttttctcctctggcagataagcatttaggcccccatcgtttggcttacttcctaataagccaataggaaataaaaataaatttgtagctaaaacttttataaatatgttcttggtgacttaaaagctaatgttgaaaaagaaactacattgaaaatatatcaaaatcaatctcaaaattaagcttgaaaatttaaaatttggctttttctttagctgattaggctatccaatgtgagccttactctctagaagccgattgaaagaaaaagaaccttccaaaaggacgacaaacaaaaacgcacaaataccaaagtactccagtacagtgtatacatacacgaaataaaaaaaaaggccacgtcgtatcgtagacgagataaaatcttatcccactcgccatccgtggccgagcaatcgacacgtgtcccgtctaccgtgggccccatccagccccgcccgcgcgcctacctgaaccttccagaaggccgaagcgcgaaaaatcgaccgaaccttctcgccccttccgacccccaattgccccatccccatcccatcatccccccgccgagaacccaatcccgcggcctcgcctcatcctggccatccgtgccacctcggtgggttccgatacaacggcgtggatgcgcccgccgcgggggcgagagatatctatcactgcggccgggcccacctgcaccgccggcgccagcttggctttctcggtacgagtggtgggtcgcatcgaattcataggccatgttttagttccacacaacctatcacatcgaacgctaaaacacctatataaaatagtattaaatataagcttaaaaaaaaactaattacataggttgtgactaatttatgagataaatcttttaaatctaattgctccataatttgataacgtgacactacagtaaatatttgctaataacaaattaattaggcttaataaatttgtctctctatttacttatagattctgtaattaattttttattagtacccaaacgtacagtcaacgatataatacccgatatacacgaaaaaacaaaactttacacaactgaatcttaacacccacatacgtgcgttttctctttaaaatcgttttttcttttggtgctttttttccctcttttttatttgtttctctcttgctttgcttctcctcctcccgttggagtataaattttcctaatccgcaaacgaagtttccagaagacttccggtccgtaccttcgttttcacacgcgaaaactgcctttcttccggcatctggaagctactactactacggtcggtcctcgccggatcagatccggccgcctccccggcggatggcggagcagggggcgggcgaggcggatgcgggcggcggggagcccgccgccggcggcggtgatgacggcggcggcggaggcgttggcggggcagaggtcgctgccgacgccgttcctgacgaagacgtaccagctggtggaggacccggcggtggacgacgtgatctcgtggaacgaggacagctcaacacctatgtacgcgcccccgggattattcctcctcctcgtcgtcgtcgtttgcttgggatttagcttggtttggtttggccatgtcggtgatgtgtctggattttgcttgcttgctgtatgacgtagggatttaggaagatcgtgccggaccggtgggagttcgccaacgactgcttccggcgaggggagaagcgtttgttgtgtgatatacaccgccggaaggtggtggcggcggctgccgcggcgccgccgccgccgtcgccggggatggcgacggcagctgccgcggtggcttcgggagctgtgacggtggccgcggcgccgatacctatggcgctgccggtgacgcgggcgggctcgccggcgcactcctcggaggagcaggtgctgtcgtcaaactctgggtcgggggaggagcaccggcaagcgtctgggtccggctctgcgcccggcggcggcggcggcggctccgcgtccggcggcgacatgggcgaggagaacgagcggctccggcgggagaacgcgcggctgacgcgggagctcggccacatgaagaagctctgtaacaacatcctcctcctcatgtccaagtacgccgccacccagcacgtggagggctccgcggggatatcctccatagcgaactgctccggcgagtcgtcggaggccgttcccccgccgccgcctctccccccggcgatactcgatctaatgccctcgtgccccgccctggccaccgccgccgccgctgcggggctcgccatagacggcgagcccgacccgagcgcgcggctgttcggcgtctccatcggcctgaagcggacgcgagacgacgccgccgccgccgccgacgaagacggcggcggcgaggatcaggccgagcacggcggcgcggacgtgaagccggaggcggcggatccgcatcccgccggcggcggcggcggaagcagcacggaggcgtcgccggagtcgcacccgtggcccatataccggccaacccccatgtaccacgcggtcaggcccacttgcaacgggccggacagggccgggtccgaccaagacgggtccagctccaggtgagttggcccccccaaccctgtagaagcttctagacccctatattacttaattgcccctcccctacactattataagcaactaattatgattagtacgtaattagcggcgaaataataattactaccactagtagtactagatgctcttttgcttcttggcgaggaagaacagatgagagctcaccttgtctctcgatcgatcgccttgtaatccgtctgcctctttctcttgattgtgttgttgtaaatcatcagcgtaagatccatcaggatgccggtaaggcggtaattgcaacctgggtttaccagtgtattggctgcctgctgcggaaatgagaagtgcatttccttgatggtgtggtgtttattaagttgctcacctcaaactgttgttttcttaggtgcacagtttggtcagttttacaagtgttttaggtgttagtgccaaaaatggtggtgacatagggcggaagcactagcatatgttttgtactagatgtatgtattaggtttgatgctagaaatagtggcgatatatactcccccttctttctcctgtcactattcaagttcctttttagcaatttttttagttctttatttacccaacacagtttgattacaatccatatgagtaaacacattagaaatcatccaagggctaacactgaaatcatccaatagcactagcatgcatgttttatactacttgcatgtataagttttgctgctagaaatagttgtgaaatttaggggttattcggatgctagtgggtagccgcagtcaacacgaacaatgcagcaagctgccctcgcctgccgaatagccccgtagagtagaaagcctcaattaaccgtgattttgttttagagaagggatcatattagtacaacttttggaaaaagtcataaccaaacaaaggccttccaaacaattagccgtgatttgcatggttggctcctggaaatggaatcgtgtgttcacagaatccactaatcaagttatcatctccaaacgccgcgtgtagaagttgagtcaattcttaattttgaccgactgggtcgtcgaccacagagggtcgtgtcgaacacacgtagtgaaccacatagcgctagatttggctgtcaggcaaattaatcatgtcaatcctaggggggggggggggtccatgcagagagggattgattactcacaatttcgtatattttctggcttagccaacgttaggcagcggacgtcatcgccactagaaggcactggatgccctttgttccccatttttcttcttccaagctactcgtattttgtactacatggcatcagacagcgacgcatcgtcgaatggttgtaggtcaggtaagcacggcccggcctattttttccccctctgttttcgatcgatctttcttgctgcgtttcttcaacgagtagtactccgtactaataattttgtccacgacattgccacgtcgaggcgtcagagatgttgcgtaaactagtgggttcttacatgtgttgcccatatcacggagtattcacgtttgcctcgtcctacatgtgtcttaaaattgttgaacatcccaacacgaaacttgttacactttctcacatctaaaataaaagaaactaaagattgattcacgtaatttcgtactctccattctacaatataaagatgaaggtagtattggtatcaaaatgtatgtttccacgacatacccacccatatttgaccatagccaggcaaggatgggaaacggcggtaaaggcaggtgtatgtcattctggtcggttccatgtcattctaggagagatggtcaacctcattttttcgcttatacttattcttagtagtcaaaatttaaattttcaaccttaaatttggagttgattttgagatattttcatcaaagtttatttttcagcctttgcttttagatcgttaagaacacacatataaaagttttattcacaaattatttttcgtttgcaaatatgcctgaataagccaaacgatgggacctggtgaattcgacgatctgcaaaagatgatggtggtgcaacagagcaacttcgtgatgcactggggacgctcggaatgcggtagtggcgtaaggggttttggatggtgatggcagacaacagcaaatggtgttgtgatccacggaggcggagatggtgcggtgatgggtagctgggactagttccaattctccctttccatcctctcgggttgcggcggaaagttcaagtcatcgttgaaggtttaaagctaactcttcaagctttgtgtgtgtgttggtgtgtttgtgtgttttcctctgcatgaggattggagtctaagaacttgtatgttatggttgtgtgatatagaggctagattaataaaaaaaattcattatctaaaaaaaataagttgagatgctaacttcactatttagaaccgatcttggtaatttctaactatgtgcattaatgtacataaaatttcaaaaagctgcaactattttatcaaaataataatatgctacagctttagctaagtatttcaaaaataaatcaccataatatcatatgattttaccagaaaggtacaactttatatcacagacaagtgtgatccacatgtcatacccatgtgaaggataaaattactgttcttttaattttttttctttgcttttctttttgcagttttcttaaatacctagttaaaaatatcaacgttttcacaatgaagtcattattgatgagtaatttttttaaaaaaaggggtttactgcaagctaatcacttcctttgctaatatgtggcctactttggtatctgcacagagaaaagagcatgacgaaatagagaataacagtacttttttgcaatgatggaaggtgattatttatgtgtagaatatagtggaagcactatactatgtggatccaaacacattcctacttccctgtgccgatgtcatcaaatactgtgccgttagattaattatgaggggattaattttggtgtgtggtggagtgttggtgtaaagtccgctcacaaaaggattctcatcccagggtacactatgaacaggttagcatgaactagctattctatggttgttgatttatccttgactgcttcatcaaatgctcgcgtacttaggtgtgtgtgcatatggactgagcagagtgtatgatggtgagctgtgcacgcatttgcttttcttttgtagcgaaaaaagttttaatcatgtgtgatgttgtaatggttttattggtttgtatttggttttttgtgttccatcgctaaattttccaaacagctgaatactcaactctagatacttgagacaccaatttgagctgtgaaatcaatactccaccaatccctaaaaaacacaattctaaagatgaatttgaacctacactttcagtattaaactcttttggacagagggagtaataatttagagcaatctgatcagtcaagcatggtttcatatccgagcctgcactctactccactcagtacgaagtacgaacatacagagttacaaacaccgttcaaattcggaggttcaaataggaaccatggaatgatggaaacaatatcagaggtcatctcaagcaaagaaaatcacgtccaaacataagtccacccttcagtgcttttgtttctctcaaaagaaaataaaacttccagtttggcttttccagttatgtttcaaaatataactgggcgctcctaccgtgcacgcgcggcgataggctaagttgcgtgcgagggcaggaatcaacgggtccgcgtcacgacaaagaaaatcctccacatgtttttctatttttttcatcttttctttttctttcgggataaaacaaactttcaagtcaatattttttgaaacttttaaatcagatttgaaaacttttaagtcatgatttgaaaactttcgactcagatttaaaaactattaattcagatttaaaaatattcatcttaaaattcaaaacttttaactcagatttaaaaactttcatctcaaaattcaaaaactcaactcaagtcttaaaagctttcaattcaaattcaaaactttcaactgaaatttaagatgaaatattcaacttcgaaaattaaaaaattgtgaaaaaatggcaaaaagaaacaaaaatgacgcgtggaagttagcttttccaaaaaaaaaaaaaagaatgcacgtacgtggacgccattaaaaacatgcatgcacttaggctaagcgtgggccttatgggcctaaaacgcacgtcaccaacgcgcgcgaattagcttctctcaaatatacctttaagtgaattgaatactaaatatattctaaaattacgaatctaggcaaaatttccaaattcatagttctaaagtatgttctatccacatttaaaaattgctactccctccttccaaaagtctaagtcctatttctttttcaccaagattaaggtgtagttaactcatttatcatgtaacaaaatcaatgaacatgtaatcaataagtattaaaatgacttcttgagttttgataaaaaatttaatatagcatatagtgactacaaatacaacttagacttttgaaaaaaaataaagaatgaaatatgatttagatttttggaatgaagaattatattttaagacggataagccagctctgaaagtgtgtcatgtattctgcgaaacattccgtccaatggtggaagacacacgcatgacgcatgccggtcaacacggggtaaaagggttaattaaccacgccccacgaccaccacgacgataaaagttaaactacttggtactcaaaaactaccaaaaaccggcgactcgcaggaaatatcgtccacagtt

SEQ ID NO: 8976 - DNA, 2176 bp, Oryza sativa
cggccaccaaagaaaaagctcggagatttcctcccgctggtcatactttaagtacacagaatcgcgcgctttcagttcatcatcagtgcttaaagatgagagtacttttaattagacctccaaaccacacccgagaaattctaattttactcaaaattgaccagttaggcagctgaaaatctcgtcttcctattcctggcagcgcctcgatcaaactgcaagatccgaaactcaaaaataaaccccccaatctacccgcacaattccgcctcgagcgcacccaaaacgcccccaatttgagcgacaccatggacaacggcaacaagataaaacaaaaaaaatctcaggagagtggacagaacgtacgtggcggaagacgggccgaggagcgggttctcgcggagcggctggaaggagaagcggcggaggaagccggcgacgcagccgccgagcgcgctgccgtgcttggggcagttgttgacgtacatctcgacgatgaacaccgcgatgcaggcgacaatcacggtgggcacgagccacggccaccacttcctgtcgtcccgcccctcgtacccgccgtacccgtaccctcccccgccgtaccccgccgccacccggctcttctcctcgccgccgttgctcgccatctcctccgatccctcttccccttcccctcagtggcgaagaagaagctcaagtggctactagtggtttccccggagctcgggtttggcttcgaagcgaggggaagaagaaatgatgcggcggaggaggaagggagaggagacagcgaccggcgtgggccccgcggtgggtggagggcctgtctcgctggcgcgtggggtcccccgcgacaccgggcggtgagccgttgctgtctccgcctcctggccccgacgaggcgtcgagagagaaagagagagagagcagagtggttggtccggctcgctcgcagtaactgctccacacaggggaggcgaggaggcgaggggaaggcgagcacgcgacgcgggcgaaggcgaggactcggcgtacgtgtggcgtgtcgtggcgagacgaggcgcgaagcgtgtggatccgagaggggggatcgttccacgccacggcaccgcgacggacgcgggtgcgtgttgcgggcgggggtgagctgttgcactgtcgctcggcccaggtggcgtctcctcttgcatacttcctcccaaaaaaatatttagattgatcttattttaaatcataccaatttttataaaactgttaaatatgtacatacatttagtctttgtactaaatattgataaatagataaaaagttctgccaaaattttaataatattatcaattaccaaaattttggtattgttttgattacagtctaaacatcctcaaaatcaatctagataagaatgtgatataacctaagataacgaatctagatatattcgtatatagattcattgtcttggattatgtctcgttcttaatttttttgagttatgtctcattcttaatttcttatttagggtcatatttttgagacggacgagcatagtatagccacctgctctgcacgggcgcccgcgccgactgggtaaacggcgctccgccaccactgtgtcaccctcaccgtgccagcgtagccaatgtacagtacaaacagtctacagtagatgctacgtactactgtactactactgggatccgtggaaaaggtgactgacacgtcgtcgacgcagccgcatgcagcagcagtggaggctgtcctcgtgtcgcgcattccgcgttagatctgggaagaactgtggtgggatcatatgcaagctgaccgcgtcgtaaatggaacttttttgtgtgtgggtgcgtactgtgcgcgtgtacggccggtgttgcatttaaccgcgccgtgcgccgcccgcgtactgtgcgtgcgtacgtacgtacgtggtggcgcacgcaacgggagaccccaagtccccagcctcggccacaccacaaccccaactctccaaggctgtgccttgcacgcaccgacgccgtgcgacggtgcgagggcgtactactcagttgcattgcatgcgctcgcgtaggcgtagggctcacaccgagctggtccgtcacgtatgagtacgtgctccagcttacccaggtccccccaccgacgagggatactacgactgca

SEQ ID NO: 8977 - DNA, 4788 bp, Oryza sativa
tgggggggggggggaggaggcagccgccctgcgtttcgccagcgtgtgccgccggctgggcgagcagcggcgtgcgtgtggcggccgtggccaattattttttagtattactggagtattgcgttcaggtcggctttcggtttggttgggttccagaggacagttgcgctgctgtgttggcagaggatgtactaatccatctcggattttgatgagtgtgtgacatgggagtatgggactactcgagctctacaagacatccaagagctttttgatgcaaccacgtttgactagccctttgtttttttctgccccctttgggcaaaaaggtttgttggtgcttgaccggcttcacgccctcaaaggcatgagacgtgtcagttcgtgtcctattgcagagtgcatactgcatgctccctccgtccaaaaaatataaactttagttttcgtgtataacatttgaccgtccgtcttatttgaaaaaattatgaaaaaaattaaaaagacaagtcacgcataaaatattaatcatgttttatcatctaacaacaataaaaatacgaattataaaaaatttcatataagacggataatcaaaattgaacacggaaacccagggtttgtccttttttttttttggaacggagggagtactactcaactacttgtacgagcaaagtttttaagaatagatgaagctgcttacttccttttaagaatagagcaagagtgggatcttattggacaaagaacatatctagattatttatagtcctagcaaatatccagattttagttttacatatttttgaacatccagattttagatttttatattttaaaatagaggtagtagtaattaagaaaatagagcttcgcgtgttgtaatcttgcaagagagcaaaatgggaagtaaatgcttaacacagtccaagcaagcaacatttggatatacaccgaaaaaaaatgatgggtctattaatcttttgaacagtttctaatagcgcacagcagcaatccacaaaagcacaagtgacagcccactgtgcttcccgtatggcccatgtgacaccagtcttacaaccacaacacgagtacacgacgataaatagcgtccacggcatatggcatgccgagttgacatgaactcgttcaacttcagctctactagaatcatactactagcgacacaagaggaccatgtaataacacatattctgcctggctgaagaccaaagctaatccaacctcccggagagctactgctatatagcagcaaccgaagaaatgtacatcctggtgttacggtatttatttgttggcttctcgttcgaaattacatgttggcaccactcctggagaatcatgattgttgacgctaacatccacgccctgagtctggtttgtcatcagtaagggaagagcatagaccagagaggaaaatgtgagtgatcggtaaaggtaataatagatgagcccattgcattaacatggagaatgtgatgtacctgtgagtttgaaccttgtccatgagtacggacgggtctcatattaagatcaatcattttggaatcgatgttaccctggtcatcgcagttgccatctgaggctggatcatcagacacattatgatggtttgccatttgctcctttgttactgagtgaggggccttcttttgatccgtccggttttcaggatctttctgttgcatagcaacatcatccatatgacctggtttatctcctggaaactaatcaaaatttcaaacttcaagcactagaaaataaggcgtgagattacaatacgaagttggtttctaaacaataacctacttcaacccgttgccttaggagcaggtatcttccatgggttcgtttcccaccaacatgaacagtcatatcacaactaaggcaaagtgatgtaccatctatctcgcaatagaagaaggctgcatggacagcaggacataatcacaacaagctttaacaggcaaaatatgataagaaactattcataaataagaaagaataccgggggcattttcacatatatcacagcgttgaactttattagggtctgcaagcccaactctcacgtgccgcctagcaagcttgttacacatatgcacctgcatcacaacattggaagaaatatcagaaaatgcagcatgaatatttaatgggttattgagaccaaagctgtaatatttgtttttcttcatgctaatgataccacatgaaggatattgcacagctactaaaataacttgtatagactgattgttggtcaaaatctacaaagtttggcctcttcaaaccaaaatacatcttataacaatcaatggagcgagtaattttgttgatcgaagttctcatagagctgaatatggatatgcatctctaacatacagagtacaacaaccaatctggcaaactttcagtaaacaaatccatgcaaaaatgtcagctttattaacagtatctgatttcttatgttgcctgcacataatcagcatacatcgtgttcttcagcagatccattactgacaaaccttattaactcattaaacaggtgctcaactgacataaagacataagtaaggactaagaaccagaaaagatgacctttcatagttggaagagaacttaactgctcaaaacatagtcgtaaaacagaatagacgtacaatgttttaatgggtaaatcaatataatataagaatgtgagagcacaatgggatatttgaccaaaagatctgcccacgaaggatgtttcataatgtttggcctcattagggatggggccacccacatacaacaattccatttccggttggaactttcatctacaacctggttgcacttttgcacgtactgatgatttttaatcatgtcatcagttccaaatattataaaaaaccaaagaaaccagtgtcatagcattggttacggagcgcaaaactagttgagcagctaaagaatgagtaaaggatgctctcatgtatgtttttattagcaattgaaggtagcgactggaatcatgtacagtaacatagtataagacatactactctgtcccataaaaaagcaaaccctagctacgaatctggacacgaatgtgttcaggattggactttttttgggacggagggggtattcattaactctagaaaatctgcaattcagactctgcattctgcaattaaagtgaggcagaagcataatcttggctacaaataacagtaaacatatggactgaaaaatcgtgtaaacacaagtgcaaaatctatacctaactatttctttactattgaagaatttcaacaagggaaattcaatcattacttctacagaacaatgatcgacttaagtattacacatagccaataaggttaacagaaattccaaccaaaatggcaaaatcacgacaagctcatctcgcactgtcccacatatggccatgaatgatgatgcctggaggtgtctaacgaccaccaagctagatatagaactcagggtagtgtgatcttctaagaaatcccgttccgaagtaacccaattgctggattcaagtacttatttgaacttattatgtatgttttatgctgtaaaagtgcctccttcgataacaacatcatagaattatgctttgttttccagttctaaagttggccagctttaatttcaagtggaattctctaggcaataggcctcattttgaagtcagacaagaaataagtggataccccataaggcaatttctcggttactacccaaacaagcactacagttagtcactatcaatgcacgctggcatcctattataccataacttcgtttggtcataagtccacaatactcaacgaatgaaaaaaaaaaggccttaatgaatgaattgctccaggccagtgagcagtacgcagttgattcgcagtcaaaattaaatggctttctgtacccaaaaaagaaacacgcagatccacacgctaattcgagcgtagtaaaccatctcgtgagatcttaattgcacaatcaaacaacccgatcgcccagcgtgaaacaagcgaccgcaattgaagcatcgcataacccgatttacgattcggcaagcggactccgacgcgtgcgcgttgtagagcagaggacgaaggcagggttagagagagggggcaccttctcgtcgcaggaccggcagagcgcggcctcgtcggccacgcagaagagcaccgccggcgcgctctcgcacacgtcgcagatcgtccgcatcccgcccgcgccgagccgcgcccgctgtcatcgccccccctcccccatctccccgcccccccactccctcctcctcctcctccggcggatcggtcctccccgcctggctcttcgccgtcgtagtcgtacacacagcggcggcggcggcggcggcggcggcggcggcggcgacgaggaggagcagagcgggagtcgcggggcgagaggaggaacgaagccgggagagagattgtggcgagcgaggagggaggaactcgagagaaacaaaaaaaaatactagaaaatagaagtaatagtttttgatttcgatgtggtggtggggcgagcaggagctagcttggtggtggccccaccttctcgagggatcgagccccaccgtcgctagacccggtccacgaggaccacacgtccaactcaccgcgcccgcgggtctaatcccgtgagccgggttcatgccgccgtagacccgaggaaagcgaaacatactgtgtagtggctactttcaccagatccgcacggtac

SEQ ID NO: 8978 - DNA, 12736 bp, Oryza sativa
tactccatccatttcataatgtaaaacacaactattttttttcatatatttcataatataagatgtgcatacatacaattaattagtatcttctcaccaccaaattattattttttttaaatcctcaatcttcaacatctctaattttgttggatgcagtattatatttatcacgatgatttaacttaggagatgataataattgtttcttggtttttagattaaggttgttgttctatatattttggattgtagggagtaaaatttaatttgaatatagtaacttcttcacctatttcagagtacgagacttaactgctgtgcaacagtgctagggcattttctttttgtttttgaacttaaagatgagaggaaaatcaagataaaaagatgtcgatttcatttgggctctccatatacggagtacatcttgaattcctgagatatcctctacatcggatgagtccagatgagtcaaacatgggatcaatcgtcgtcatcgatccgtccgacctgcaggataggagaggtcgagatcgaataggccggcgttgacgcctcctgttcattcctggacatgtcactggtccgagaaaccatgtccattccacttctgctaaatccaagctttttctctgcacatacacatgtactgcatgccaatgccaagcatctctgcattcacgacacggatgcgaccctgttcttttctccaacaaaatttattggataaatttttaaatatttgtgacacgtttttcaaactgctaaatgatgtgttttgtatgaaaacttgctatatgaaagttgttctaaaatatctaattaattcatttttcaagtttgtaataattaaaatttaattaattacatgttattgccgctttcttttacgtgaaacacttaacctttattttatctttagaagattcaaccaccatcgcatcgcaatgtaccgccacaaagagagatcactgttacactgtatcagtctcaagaacattgggatggagaggggaagaaaaagactgagatcactgtagtggtgcatatatatatatacacacggaggagaaaaaggcgatgacagagatgaacattggatgccagtactgtatctactagttgggtcggcatggagcgtagggctcaccggcggtggccaccaccacgacgtacgtacacgacgccggtcgtagcaggtggccgtgccgtcgtagcgtgaccgtgcacgcaactccggccggccggccgtccgcgacactgcagtacgcagcactgcactgtagctaggatattggtaagatcggtatcactttggcgtgacaggataccatgtatcgtaagatatattatgattagtgtcaagatactgacaaacttggtaggcagcattggcactgtggctagtataaccacagaattcttaggtccgtttgcttttcgattaacacatactccatccgtcccataaaaaacaaactttattactgaacatttgaacatttttttagtacaacgaattttgataggctcctattcggatttactacctccgtttcaggttatgagatattttgacttttcagagtcaaactgcttcaagtttgacttaagtttgtagaaaaaaataataacattttcaatccaagacaaatttattatgaatatatatttaattattgatttaataaaactaatttggtattataaatattacaatatttgtctataaacctagttaaacttgaagtagtttgactttaaccaaagtcaaaacgttcagtaataggttggtttttttaacaaaaagtagattttacctcaatttacattagcacatttttttaaaaaaataaatggtgtatttgtgcgaaaactctagacaaatattttttaagtttaaagtaattaaaagtcaattaattattcaacaatgattttctcgttttacagtgcactaatgactattatgcagtaggattggctaggatatgcggtaaagattggtatcattcagcttgataagatatgataagatactaggatacgtgttgggacatggtaaagagcctcgcaacactgttacttctttcatcttaaaaacaccataaatctaaatatagactacatttagggttgtaagcgggccaacccgcgaacccgtttatagacaaaatttatgagtaacctgtgggttgactcgcgggttaactactaatttggcctgtaaataggtttatgggttgatctacttgcatctctacgacgcggcaagccgagccatgacgtgaaaacctgcagattaccctttatttaacatatatgtaggttcacggatcggcccgcttaccttcctacctacctatattagaatttagtattttatatatgcgacggagggtgtaaccgtgtaagcggccgcagttgccagcaattctgcatggagggtcgagggatagaagcagtatacaagaaggtcacaaagctgtagaaggagctagggaaggttggcagcagcagggcggcatggggggggggggggggtgacctgaccaatggggtagagaaaggtggacggcgacggcaacggcatcatggaatggcgatggatggggcggagctaatggccaaatccacgcactgtggacggggacggctgacgagatggcgccacagtgccgccgcggcaatttgtcagattccccgtcctacgtggaccatccgcgcacggctcgacctcctcccaacgaccaaactccctccgtaaaaaaaaaaaaaaaaaaaaaagaaagaaagaaagaagagagaggagtaagagacaaaccttgagtttccatgtccaacatttaaccatccattttatttaaaaatattatgaaaaaaattaaaaagacaagtcacgcataaagtattaattatgttttatcatctaacaacaataaaaatactaattgtataaaaaatttatataaaacagacagttaaatattggacacggaaatacaggcttactttttttttttttttactacgaagggagtacacagctcgatcgacgcggtcgagctctcgcgttgctggccgattcctcgcctctcgttcgattgtcgtcgccgttcgcaacgcaaaagggagatttgtatatagtacaattttggttagtacggagtattagaaaatcttagcagtggagatcttacaaagttcggtcgactaggttacaagatgcgatcgggagtcaaaaaccgattcctatttttctaacagtttcatcgatatctatgataatcaagcgtatatggaaaagataagataaccgatgaaactttttttagtagaataaaaaaccgatgaaacttaataaatattgctactccgtcctaaaatataacaacttatatcatttaaaatctaccttaaaatataataacttttcaacctgtcgaggggtgaccctctctagcgggaggctgtgagatcccctttgtgagtttagtcgggggaccgggtgcaatactgaagagcgtgttctcgtgcgagcgaagtgagtcggtgggggtcaagcttgcgaggcagaaggcgagagagcgagagagagggattatacaggttcgagccgctacggagcgtaataccgtactcctgtttatatgatgatcttcgtgtggttacaaagacttcagatcctaggagtgctagctagggcttggccggtctcttcccagaatccggttttctaagagacgtctctttactcgttgggtacggtcctcctttttaccatatgcaccgcccctacgctctcctcacaggaaatgggcccacattgcctatattaacaagcatctcatgccttgggtcggaagcgatccacgcggccgctcttgggtggctcccactgaagcttttcgtctaacacgggagacatcccctgtcattccctattaaatgtttggcaacttcgtaggcacacgcgcgtgggaggtggcgacctgcatgtccttcccttgcgcatgatgggacggggcataccagctcccacgccgcctgacacgaaacgggacatggatgcgttgcctcctgtcccatccatccgtcgccgggtcacagaccggtcaaaaagtggtcgccaggcgcacgtctatcggcgtgcggcgcacgacctgccacaccgtattaaatgcaactggggcggttagggcgctgcccataaatgcgcctggcggacggtactcccgcccgctcaagccctcacacagctgccacgtggcagccgagcgagggcttcggggcgatccaacccctcgggcccgaggggtgtgacggggcacccttgatcccgagagtggggggggggggatggccgctccttttccgagggcgcgactcactcgggggaactaggcccaccctacgtgccatacggaaagggatttctttccccctagaccggggaccccgtgcccatatcaccgacacaacctatatttttcttctcaaccaattataattttctaccatttaagttcttcgtccacctccttccatcagcaaaccacaaactctttctatttaatttcacatatttattgatatccgtgtctaacataaaaacccttatattcttgtaagaggtagtactaaattttcgaaatttagtttcttttacttttaatttttttgccattttagtaagcgatttctaacatggtaatattaataacaagtagttctcgtcgcattttcaaacatgtattcttgtcaagttataacctcgttcagattacctgcacgtgcgacggtggtgttatcgcgtcgtgtccttcttataagtgtcgcttaggaggtttgttattgcctcttcgccataagatagttggatcgatgattttggatgcggctggtctatacaaaggatgagtggatctttttctctcttgctctctccagatgcgatctttctctctcgctctctttataagatagttgtttggaggcgttggtggacggtttagtggcggctgtgttataggtttggcagtgtccatctcgcattgtcaccacaaattggtggtttttcttttctttttcctgttaacaatctctcaaggatgtagttttcaaaaaaaaaaatactatatcgatataaaacattgcaccatcttatactatttgttttaaaaaaaaacactaagatgcatatacataccactatacatgcaagcacccatgagtgtgcacactttaccatacataataaatgaagactagcagtaaatttctaacctccatatctcacaaagttttgattgaaaatatatatgcatgtgtgcaggggcgttcctacactatactacccgggtaatgaccccgggtagaattttaatatttagatggtttagtctatattaactatattattagttaaaaattaactaataatatacatgttatgacaggtaaaagacctcggtaattttcgttctggattcgtcctgcatgtgtgaaattctaaccattaggtttttttaccctgatcaatgtactcataccatcacgaaatttaccactgtcgcttcttctcttatcaaattttcgaggatgagaaacatgttagtaaaccttttcttgcttgcacaaatgctcgaaaatgacatggatgagacatatgttatttcggttgtgtatgaaaagcttttagctactgcagcttatccaaaatcttaagcttcccaaatagtttagattattacctaaatcctaaatcaatactaactacaaaatccaaagaaacaggctagtgataagaaaccgggaaacacaaccttttagattcttactagctggctttttattatttcccgtcccaaaatataacaacttttagccttttaaatttgtcccgaaatataacaaattctgcatcaatattcacttctcaaccaataacaacattccactgttcaatttacccacctacctattatcaaccaatcacaatctcccaccatttaattctacttactttctaaataaccgtatacaactctaaaactttttatattttgagacgaaaggagttattgtttttcataatctctagcttctcaaacataaccttgtaaaaaagggcagaaaaggaggcatttccttttcttagctgtccaaaatgagagcaaaataagattaaacacggcagaaaactcaactatatgagaagaacatgacacctaaaggaaaccttcattgcggctggtccataaaaaacaaaaggcaaaaacacatgttcagtcaacgataagtaacttgccaagacacgaaatttggagtgtggcgccgataactgataagataggaactggaaaagcatcaaaccagcaaatcactaatcagcaaacagtccagctttggttagtggatctaaaaggaccaaacccaagtgcgtcgtcaaacttttctgcttaacgatcacacgctgcccaaacaaaactcgccagcggcatcgctgggaaaggacacctggtgacatgtgcgagactaacagcaaatgtggctatctttcactgaatttccaattcaatagtaacactggaagagtgagagagcagcctaatccacctgctcactctacctgtctttttttatgtcagggataaggtacctgtgtttacaaattacacatcaataaactgaaaattaatgctccacgtgggcaccgtgtccacataacatagtgtcagtcaacagagtatttgatgttgattacacacaaagatgattttccagagtacagggatgattactgcacggaacgtacaaggatcaagggctaattaagtttggtactgtgccaggtagtacttgagggtatatttggttgccaggcaggttgtcgcaatttgctgacagaagtagacaaacttactcaaggtttggtgttcagagttcttaacaagtctaacagaatcttgtttcttttttaacataagccagcaaatgcttatgttatattgagcagatgagtagtagaaatatgtataacttcaccaaagatgaagaaactgactccagtagcccgaagacagccgagaaaagaaaaacgcacacatatgcatcagttttgtaagttattgatgcctagtaatttgttggaagtgaattttcctacaaatatggctaaccaaacagctaatgtttcaaatcacttatcatccaaattttgtttgaagttaaaacatttatatctttgactatcaatatttagatattaatatgatttaacattacaatatttatcttttttcatcatgacaagtatttttcataaataatattacaattcatatgttgttaagctatataatttttttaaagattgatagtaaaaaagataacatcttttacttaggacaaagctaaaaagataggtaattgaaaaaaagagtatttaaattagtttaactttagacgcatcagattgtgacaagttagcaagcaaacatcccctagctagtgagcctgagtgtttgctcaggtggttagtgtcgccggtgggcacactacctgcgagcgttcgaaccctacgttcgatggctcgtgctctcctggggaggttttgttttccctttttttcccgagactgacttcggttggttccggttaggtataagggtaaacatacacgtgagcgttcactggtactgcacgtttccggtgcctccaatttcattcttagcgtgtgttagggatacgcaaacgtgtgtgcgtgtggcgtggacttgtggtgtatgtgtggtgtgtgttcatgtgcatcctgaattttacttccctctaaaaacacatcccctagctagtagctgctggtaaactaccgtcctgagcaacagagaagcaaagcaatgagttgacgcgaccgaatccgcgacgccgccctcgcaccgcaagggccacgccaatttggtgctcgatcgatcggaacgcgcgcggcgctccacggccatgtcccaccgcacgaaccgcgcggccgcccgccaaccgagctagcgcgcggccccggccgccgccatgctaacacacacccgatgcgttgcattgcatggccgctccacgacgcctcccgcccgcctcgcgccaccacggccacgcggtgcaccagctatagctagctagctaggcgcatggggagacgctccacgacgcccactgcactcccgacacgtttcccccaaccaaccaccacgcaccaacccaaaaccatccatccatccagccagccaagccaatctcccggctccctccgctacgcgccccacgacctttttcccatcacccgcccgcgcgcgcggtcgagcgcaacgcaacgcaactccaccgtaccaaccgcggcgcggccgatcgatcgacgcgaatcccgcatgcgtatacgtactattctacgtgaagtatatgtgtagccgatcgagccgtctcccaccgcgcgctccctccctgcccccgcgacagcgacgccgagcgagcgagagcgcgcagctagccacagcctccagagctatagctacagcgcgatcgagagagaaggggggagacagtgaggccgagagcgagagggccagccacgcacgcacgcacgccaccgcgctccattggccaccccctcgccatcgccacgattaaactactctcttgctactccccctccatccatccacacactccaccatttcctcttcttcttcctccatatcacacggttttcgtccatcgatcatcagagctcgatcgggcgccatggatggggaggaggacagcgagtggatgatgatggacgttggagggaagggcgggaagggcggcggcggcggcggcgcggcggacaggaagaagcggttcagcgaggagcagatcaagtcgctggagtccatgttcgcgacgcagaccaagctggagccgaggcagaagctgcagctcgccagggagctcggcctgcagcctcgccaggtcgccatctggttccagaacaagcgcgcgcggtggaagtccaagcagctcgagcgcgagtactccgccctccgcgacgactacgacgccctcctctgcagctacgagtccctcaagaaggagaagctcgccctcatcaagcaggcacgcacatcgtcgtcctcatcgattcttgatcgctttctttcttgcttgccttttgcatcgattctgacgcgtgatcggtgcgttcttgcagctggagaagctggcggagatgctgcaggagccacgggggaagtacggcgataatgccggggacgacgcgcggtcgggcggcgtcgccggcatgaagaaggaggagttcgtcggcgcgggcggcgccgccacgctctactcgtcggccgagggtggcgggacgacgacgacgacgacggccaagttgatgccccacttcggcagcgacgacgtcgacgcggggctcttcctccggccgtcgtcgcagcatcatccgccgccgccgcacgccggtgccggcttcacgtcctccgagccggccgccgaccaccagtccttcaacttccactcgagctggccgtcgtccacggagcagacctgcagcagcacgccatggtgggaattcgagagcgagtgagcatccacactgttactactaggctactcatggatgatccatcgatcgccacagatcatgcatgccacgatcagaatttcaattcgccgcgaggacggatcaaacctgtactagatcggatcagagcaaacatagcagagaagatgatcaaaccaacagtgatgtgtacatagctttctgtagatcaaaaccccaggcagtctcctctccatccagccatcagcatgcgaaaattctctctctctttttttcccctccaagtcttactcgacttcgatgttgttatcacaacaccacatcatgtaatccagcaacacgccgagatgaaaaaaaggttaaaaagcttatagagttcgttcatttgatggatccaatggccgcttcagttttcgcctttatgatttcttccaatggatggatcaatgaatctttatgctttcttccaatggtggatcgatgaatgctacaaaaaaaaaaactagataggttcaagaaagaaagaaagtgaagagaggaaaaggatgtgtgcatccatgtagatcaagattcccgagcaggtgaggggatgagaatcgaacaacacacattcgctcactcacacgtactacgctacagtacgggacaatacagagtggcacagatcacagaacatgcgagccgccattgttaatttcaagcaaatgtaagaggcgcgtgggattagtcagcccaaatatatatatatcataccatttgatcggagattgattttgtagtgtagtgtagtcctgatcagtttagcacaccccatttagacacaaacctttgcagagttgggacaaattaacccgaactcatggcacctttggaacctaattaagatttctacagagttttcatatatagtagtttgattcctacgaaaatctttcaaaatcctcctgttccaaacgagcccttcagcttgctgcgcttacaggataaacgactgatgagtagtcgcatttttctgcaagatcagaaggccattttttatgactaaagctagaattttgtgagaaggctgaagagtgcaaggctgagtaatcaatccggatacaagcagtagcagttttagtcaaagacaagacccacccaggacaatgacagccaccatgttaatccttcgtttatcctaggtagaagtgatagtaataatttacccggcatacttcttttccatcctgacagcgaccagctccaacgtgtcaacaatccagtacatgctagctcacccacaaggccacaaactaaaatggtgatccaaaaccaaaatttcacttatcaattaagcaacttatttacttacagtaattaatggcgatggtatcacccactgtttcttgggcacgtacgtaaccccggacgaattaggttgctttctctggcgaacgatcaggtctctttctttcgtcttcaactgttgtgtgggctccatggcataattacatgtcactgttcagacacagtgacgatcagaatcgttgaacacaaattctatgttcgatgggcactagccaagcagccaagagtatgaaactctgaaaaagaaaaatggagaggaaaaaatattgagttgagcttgctagctccagaatatcacaggcgcttgtcgtgttatcttgagggtggttagcattgcttccatctaaccgatatgggttccactcaaatgtgacaactcatgagcccaacatattataagcaaattgcaatcctgtcaagaacaaagaccccatcagtgaaggcaaagggcaaagcaaagcaaatataatggactagcaatatataaaaaaaactcttcacctagtcacagaattgtagccacttgtacaccctgtgatgtgaatgcaagggttctgtcatcaagccgttgtccacgtggattgcttatcacttactcgtgtgacattaccttggatgagttagaatatacagaggcttttctcagtggatgcttgatacactccaataagagactgaaagactccaagcacgcagtttcaatttggatattcaactttagatgcgattaggtgtcaactccagataagttgcagatcattcaaaagatgagcaccacgcatggtagtacatcaatttactacatatctggaacacatgatttacgtaatactagtaataattaaaacaaagatttgtatggaattcctagagatgaaactcagtggaacaaacagggtcttgcactctcatcttcatccatggacgtgttgtactgggagtttgaaaccaatagcatctttgacttgattactgatgcacaacgactaaatgatttggactaaatgatttggatacatagcttttgggacttatctgggcaggcgtgactcgttaatttaaaaagctcccatgcttggaacaatccaaagactgagggtagtacagccatcaaagaagaaatatgagaaaatgatctcaaattattctcacatatctttcaaaataaacatatggactacatcatacgatcgctcgctacaagtcactgttacgtcctaaagatactctgcatctcatatatgcttatatacataatattccaggctgatgtcaagatcaaggtttacttctaatttaatgcagtcttgtattcataatatatcttccgtccccttaagttccattagaccatagcaaattccatggtagctcagtagctcaccatcatagtatccacgtcactttaggagaaatcaccaaacgatttaagtacctgaattaattgcattcatgtgataaactggtgataatagtcaaaatcataaataggaaagattagacattgaagcgccccaagtatacagatgaatttcctaatttcaactagctgacttcgaaagggaaatcgaccagccaacacagcataagacaaccgtttctctgtttaacaaaccagaaggcaatctatcctatgtactatataggaccatagactacattgcagaaagaatctaggggcaactgccaactggattagcaaatgaatggagtacacagcagtatccagtaggaccagaatgaggaaatggttatcagatcagacgaatgataagatat

SEQ ID NO: 8979 - DNA, 12949 bp, Oryza sativa
ggggggggattttgggggtgtggctccgaatcaattgcttggctgctctgccgccaatgggcgccgtcacgactccctgtctttctctttcttcttctctccctgctggcctccgggctccggtaccctgtgtccctgtccgtgggccaccaccaccgtccaataggagtacctgttggacctagatctctgcaaaggaatactagagttcttgggctggttataggccggcccagctatcctttgcagaactcctccagtgatccggtctctaggctgagctgcatgccctgtgcagtccagtaaaccatcttttttttaatgctattgtctctattgtaaaatcaaagtccactaaacacattattctaaatccagtactttattataaatccatcctcacaatcacattccatcaacacctccaatcatataggtctaggcgtattagcccgttgaatagttgcatacttatactccattcacttcatattataataagtcgtttggattttttttccatagtcaacctttttaaaaaattgactaagtttatagaaaaatataggaacacttctaacacaaaacaaacatattattaaagtatattttgcatctaatgaaactaatttggtgttgtagatattgctatttatttttataaatttagccaaacctagaaaagtataactagaaaagaagatcaaagcaatttataatatgactaaacagatttaggaccaaaataatatagcacagacgtcactatatgctactagcttcgtttcaggttataagacattttgactttgatcaaagtcaaactgcttcaagtttaactaagtttatagaaaaacatagtaacattttcaacccaagtcaaatttattatgaaaatatattcaataattgattgaatgaaactaatttggaattataaatattattatatttgtctataaacttagtcaaacttaaattagtttgattttgaccaaagtcaaaacattttttaccctgaaacggagggagcactatgcaagcacataacaagcctttgaatgtcacccttgccgttatagtccctcatgtactaatcgttttttttaacgtaaagagagactttgagcttgtttgggggagtttctagctgctgcagattcttttagaatcagaagctccccaaacagtccagcttttgatctagattctaaaaagctgtagttgtagaatcaaaaaaatgaactagaagctaaaaactaggaaacccaacttttccatattctcagaagctggctaccaaccaattgcttctcataattttaagcttttcaaacagaccctttattaattactaaaatttggattacattccttatttaatagctcaagattttctgctggggcacacaatcttcactccaagcaaattcttgaactaaatgccagctgagtcaatgcatgcaaatgcacactatctttatgtggatcactttcacttcttgtagacgttgcatcgctcacagattattccttctcacggatgagcgtttcattgtcaagctagccacaacctctacgttgtcagatacggagtacattactaatcgtattttcacctgtgaacttctcactccttcccgtattttcagcgtaaacgattctatcgtcacatcgacaaaaacctttcgattgcactttgcacatggctggtccaatgcaactgcattttcattcatgcacaacgcttgcttggccacgttaatgtgcttgtgcagcgtcactgtgcagagagaacgtgcgtcctacctgctacacgaatgaacgatattaattacttagcgtatgtatatatggcgtaaaccatgtatcagccgtacatagtacgtggattattactgtgcgcagcggcgcttaagtcttaagtgccattttgccgtacgtacctggttgttgactgtgcgtacgtgtctctggtttagtttattatgtctcgtccgtcggccgtcgctaagactcttgctgacaactgactgactgcaatcagcggcggagctagaaaattaattcatcggtatcaccgagatcagaatacactaatcttgtttaacttttagtgtcatatataacacacaattcattgggaggattgactcaacgacgacaaagctaatatggaaagtatggacgctgtcaaaatgaaaaaaaaaaaaactttacatagctcctcattcgaaacaaaatctggatgacagatcggctgcaaatccgtcaatgtctatcagttttgctatagaaacctttaaacggcacaacaccttttcaaggattacactttcgtacatcaaatctgagagaagatctttcaacagccgagacacaatacactaaacacacacgatggcgacgagccactgcttgactggtggatcaagggacatcccaatggaaaaaaacacaaacgaaagcaattaaatcaattcatatggtggtgccttggaaaacctgatgcgaatgacacaaacgagtgttccacaatcaggagactcaattgtctcaactagtgaccaaaatcacagataagaatgcgaggctgtcggttttcttgttgttctccctcttgttcggttctttttcggctttgtctctttcacctttggtgagtctgtaaataatttctatcctacctaatataacaccagcaaaatgctagctacggtttcaaaatataaaaatttatagtgtcatcttgattgcctaaacaatataaccatagatttcgccacaggttaccggggtcagctgacctcgatagttctactgtaactccgcccctgcctacaatctcattatcatttttattatttatcatgtcgtgatttgtaattcacaataatccgatccataatgtttgtaatagttgactgtacattatttaaattaaagactggaaactctataataattaattgtggtctttttaaacaaagtccaaaatgaattaattacatatatcttaaaaaaccctcaaaaagaacacaaggaaaataagcgagatttaaccactgtaccaaatgttcagcaatgaacagtgaccatataatccctggaaatccgtgcttaaaccatcaatcatattctctccgtctaaaaaaactcaacctataagtgtatgtgacctctcctacgacaacgaatgtgggcaaaggatagtccatatttagggcccctttgatttgtaggaaaaatgtaggaattttggaggatttcaatcctatggaaaaaaaatcctatgaaggcctttgagacaaaggattgaatcctatccaatcctttaaaattcctatggaatgggtaatcctatgcacattttggaggaaagttagcaagaggtctaacctcttggaacatttcctctgagtctatctctctcatctgattcctgcgttttttctgtggtccaatcaaacagccattcctgtgtttttcctgtgttttgcaatcctctgttttacaatggtattcctgtcagaatcctgtgtttttcctattcctctgttttttcattcctacgatttaaaggggcccttatagtcttaggagagatcacatcccctattaagttggattttttctgtgatggtgggagtatatcgcaccccagactggacgatgaggcactgattgtagacaggtgaaagttaaaagcgagaggctgaatgtttggtaggtaggttggcaccagtacttggccgggtacccatctgcattcttctgccttcactagttcactgccaatataatgcgacatctgcgacacagtactgtacgtgcgacgggctctgaagcagagcaatggcaaaagcaataatgtcactcatggacatggacggcgagcgatctgccggagcaaagcaaagcctagctcgcccccacagggacagcattcatggcgctctcgtctcgtgtgccccccctcaatcgccattgccaaccagaaagatcgtactcttcccgtggtttctactgctgctctccggtggccgccgccgcctccatattagggccatcgccttcctggcgcggccaccggtcaaaacggttatttttggtccggtctctcctttttcttttccttttcttaccaagtcttttttttaaccattccgtgagcttcacatggcagacaggtgggccccgtgggagttagccccaaccaccgtccactctgctgcctttttcgcggtaaaaaaaagcgagtaaaacgaaaggggaaattcacctgccccattgtgaatagtcccgtcgtccccttcctcctcttcctcctccctctctcctttttcttcttcttcttctttcgaggagaggaaggaggcagccgcgcgcgcgcggaggcgggcaacctctcctcgactcctctcccccaccgtttcgtcgtccccgcgtgagaggtaaacgagctcctcatcgatcgatttctctctctctctcgccgcgaattcgcttggtagccatgcacgcgcgcatggagggaaaccttttctcttttgttgttgtcgtcgtcgttggtgcatgtagcttcgccgtcgttagtacgtgacaacctccggcgacggatggatggatcggtggcggcgaggcggccgcgcgccggccggcattttgctatttttttttcatcatgatgacatgagcgcgactgcgtacgtgcttggtggtgcaggaaggggaggaggcggagatggcgggggaggagcggccggagcggatcgtggtgtcggtgcggctgcggccggtgaacgcgcgcgaggcggagcgcggcgacggctccgactgggagtgcgccggcccgaccacgctcacgttccgcggcgccgtccccgagcgcgccatgttccccgcctcctacagctacggttcgtacgccgccgccgccgccgaatgcaattgcaaaccgctctcccgctcaccttctcgccgtggtttccagacagggtgttcagccatgagtgcggcacgaggcaggtgtacgacgaaggcgccaggcaggtcgccatgtcagtgctcagtggaatcaacggtaaccaaaaaaaaaagaacaaatccattacttgtttgcaacgacgagctcttcgtcgtcttcttcgtcgcgatgaactcactcgcgagaatctgctctgacattgctgcagcgagcatattcgcgtacgggcagacgagcagcggcaagacctacaccatggttggcatcacggagtacagcatgtcggacatctacgactacatcgagaaggtgatcaatcgcgttgactgaattactgttgattttgtttgcataattgcgttcggtttttgatttacgagtctctgctctgcagcatcctgagagagagttcatcctgaagttctcggcaatggagatatacaacgaggctgtcagggacctcctgagctctgacgcaacgcctctcaggcttcttgatgatccagaggttacctttttccttgacatggtttgctgattaccttcaacaaaaatcctgcaaaatttatcacattttgctgttctttctgaatgcaaacagaaaggaacagttgtagaaaaactcaccgaggagactctgcgagacaaaggccatcttctggagctccttgctgtgtgtgaaggtgtggaaatgaattttctttctttcttcccagtgaacctggatatagcaataagagtagcagctcatttgtttcttcagtctggtgatcattttgtttttgcttgtgtgacagctcaaagacagattggggaaactgctatgaatgaagcaagctccagatctcatcaaatactcaggatggtttgtgctcatatcaagctaaattgtttgcaacagactttttttgtaaaaaaaaaaccggttcttaacctgctttgttaactgtagacggttgagagttcagctaagcagttcttggggaaaggaaactcgagcactcttattgcttgtgtggtattgatgaaatacctgcatcttgtaagctttgtattattttgcacatgtttttccatagaatctgagtttcttgtggacagaattttgttgatttagcaggaagtgagcgtgcatctcagacggcatcggctggtatgaggctaaaggagggcagccatattaacagaagcctgcttactctaggaaaggtcattcgccaactcaggttcacagaattctcttctgtgtctttcaaatcattctacaagttcatttttctctctctttcttttgaaacaagacatcttcatttcatttaaaatgatttctgaacaacttcttggtggtgtagcaaggggagaaatggccatatcccatacagagattcaaagctcacccggatactgcagtcatcactgggaggcaatgcaagaacagcaatcatctgcacgatgagcccggcacactgccacatcgagcagtcgaggaacactcttctgtttgctaactgcgcgaaagatgtcgtcaccaatgcacaggtcaacgtggttatgtcagacaaggcactggtgaagcatcttcagagagagatcgctaggttggagaacgagctgaagtttcctgcatcagcctcttgcacttctcatgcagagattctcagagaaaaggatgaactaattaagaatgtgtgtactgctcttggatccttctgttttgatcttcacatcgatgataatttacagttcttcactttcaaatgtccccaagaaaagtactgaagttcttttttttggggggtgaattttcagctggaagaacagttgaaggaactgatggagcaaaaggacaccgttcaatctcagcttgataatttccgcaaagttgcgagcgacggggatatcaacaatcacttagcaaggcgatgggtacttctcttatgcactaatgtgttatctaaaaaaaattaacaacgcaacagtgttttagtatccaactaatttaaccttactctgatgttcttcacagagtcggtcttcagactcgattccgcgcattgtgtcagaaggtgcattttcatcttcagatactcaagacattgactatcaagatcaaacaatggatgaactgtcagtacctcactcgtttccaccaagcagccaaatttctgacatcacagaggaacacgaagcacagagagtagctcatcgagctgaatctgagccccctgaggagcactgcaaggaagtgcagtgcatcgagacaaacaagctcaggagcaggagaagccaagaattcttccaaacacctgaaaagaagacacacactgatgatcaaaagcatagcgaaagcatgtcaaattcagcagaaaatgccatcaagctatatgcgtgtgattttgagccgtcatttgatctcgagaagcctgaaactgaagaatctcttgccctgaagaggtgtgtggttagctccagggacagtgcgcttactaggagtagaagctgcagagctagcttcatggtcattccgaacagctggttcgatgactcggcgagcacgacgccgtcgtccgaaaccttcagatattctaccagaaggccagagaaggtgaggaaaagcctgagtcctgatgagatcgcagacaagagcacgggcaacgctgaagaagacaagagcacctgcaatgctgaagaagagactgctgtgaatgacatcggctgcgtcacagaagtgaagcagaagacagaaatgaaccatgcaccccaatcttcagagcaacaccaggtacagtaaaaatgggaaatctctcttgagaattctctctccataaaaaccattgactgcaacatttacatttctcttgtcaagccgatttcactctggtgtactgtctgtctactattgattcatgcagccgaaaattgctaaagaagttgccacggtctccctttcgaaatggcacatcgatttcgagagaaagcagcaggagatcatcgagctgtggcatgactgcaacgtctcgatcgtacaccggacctacttcttcctcctcttcaagggcgatcagacggacagcatctacatggaggtagagcacaggcgactctccttcatcaagaactccctcatcgcagacggcgagctccacgctaccaccgcatcaaggttcagagacgcatctctgaaagtattctgaacaccgtcttgatgagcagcatgacaaacaacattcttggtggtctttgcagcttgaggaatcttcggcatgagagggacatgctgtacaggcagatggtgaggaagctgcacctggccgagaaggagaggctgtacggcaagtgggggatcgacatgagcaccaagcagaggaggctgcagctgtcgcggcggatctggacgcagaccgggatggatcacgtcagggagagcgccgccctcgtcgcgaagctggtcgagcacctggagaaggggcaggccatcagggagatgttcgggctgagcttcagtttcaagccacgcagatctttcagctgggtcggcgtctactcccgagactgaattcttgcccggccatggcgatgaactgatgatgatgtctcagtggtagatggatgcgtagtggaggagacgatgctgcatgtcaggaaggagaggagagagattttgccgccggaattgaactgatggattgccccgttctatctatgcatgtgaattgtgattcagattttttgcttctggcgtgagttcctgagttgtggaaaagaatcggcgtcgagctcctctccggcgaagttgtggcacgccgccgccggaaccgcgtcgctggcggcggcgcggcttctgctcggcggcgaggcagcaacaacgacttgggccggaacgagcttctcactaacgtgtgggccgaaatgataattgggccgggcagccgcatggacctaactgttaattctaagtaataggagggacctagtgaaaataatgcagccacgacgcttcctattcccaagcccaatctgatccgcacaatattagatcggacagtacagatagtagcgatccaaaactggagggtataaaaagacaaaatctaatattacaagggccttatgaaaaaaattccaaccgtacgttctttgacccgatctgagccgcacatccgagatccaacgtctcacagaacaagccaattcatattgggccaatggcctatcagattcgactgggccgagaggacacggacaagtgggcctttgcttaactcgacgtgggcccaaaaacccttcgtccctctcacttcgcttctcttgtcccctcccccatctctgcgatccaaaggcggcggcggcggcgagctcggtggcatggcgatgcggctggcggcggcggcggcgttcgtgcgacgcctcgtgccggcgcgaaatccggtgatctcggcggaggcggaggcggtgacctgcgggcgcggggacaagaagaccaagcgcgggaagcggttcaagggctcctacggcaacgcgcggccgaagcgggagaagaagatcgagcgcatcaaggaccgcgtcgaggtgccccgctccaccccgtggccgctccccttcaagctcatctgagccaaagcccagcgcgagctcccccccgtcggttcgtgaggctacctagggttttcctttccctttttcgatttggtactcttgtccaactcttgcgcctgcgcccacgcttgcgtgggcacgcatcgtttttttagttcctcatattgggctgtgtcagatatgtattgtcgaatcaagctgccatatcgcaacattgtagaatgcagtccatatggacgaaaatatcatcaccatgtttgtttgtccagtgtccttttgctgggtgtcatctggatggtgataatacgcagtttatgataattggaaatggaatttacggttttggattgattgttttgtgcagttgctgataatgtgatccacggttgttaatacgaacacaaaatggatgggtaacaaacgacttagccaattagccttgttttgtttcgtttggcagttgattagcatatattcagtgaattatattttcttttaagaaaatgatgcctggtactttgatcaatttatgttgtaaactgaaataggtccgagtagtagcgagcagccaggcactcgaatcactagtataagtctttgtttctttgttatcgtcataactggattaatatgtgtggattcatggtgataaaaaaaatgttttggccgaagccaacatttccgtgcattgatgtttattcataactggattgtatcaaacttctgatcttaggttattctgcacatcgcatcttgatattcctaatgcattcctgatagattagacttgaagcttgccctgtgttgagattggtggatttcataatgataaaatatgttgactggtgtttaatataccatcatcttctagtgcatgagcttacgctccgctatattggtaattggtgataacttgtcttgacattcatgtcgggctaaagagacaaccttactgtttattaatactacttacttgattgtctttacaaagtcagggaaatgtatattattttgttgcacgtttctagctggagataggaccccgacactttatactcagctctcacatcatgcttgaagaaacatattcatctcattgcattgccaatccgaagctctggaagaattttagtgactctggcagtacaaagctctagaattccatgacattcctctttgcttagcgatatctgttgccattgcaaaatagacaaaaaaagaataatgctatgtgatgtgtaccaatggcttgctttgcacgtttcacgtggtgaaactttgtagcgacaagctgacactctaatgttagtttaagctatgctgcgagataaacaaattttttagtctcctttttcagtgctagatagggaaatagggaagagttccagaagggtaatttgttctggtcttttggtagatcaacttttgtgcatgcaacagcttacatatgcagatatatgctcatattagcaagtgttcctttatgcttttctttattgttatttgagacatcataatgtatactaattactgtaacagtgttccttttcaacaaatcctcatcacaattgtgtttgtacaagaataagagctaatagatctaaagcataatgaagaatcaacacacatattagtgtctttacatctataagatatacatggtatggagattttaaagaaattaaattatgtttataagttcagattttcagttcaatagcaattaagaatactaatggaataccccccccctctcctttctctcttttttaatttctaatgggtaacacagactggctgcactttatatagatcacaattgtgtttgcttccatctctagttacaacgttacccctatgtagatctattccctgctgtcggagaacctgttgattctgcatgtttattatgtaagaaatagtaaatcatactcgaacccgtttttccttccaaaactctacttggtacctatatgggtttgatgctaacatggacaaggtactggagtggcagagcccggatgataattggcactagtctatgtgttactttttatgtgctgttgttatcagtccatgtcatttgacattcacatttcacgctgaagttgtcggtaacaaattcggtgcagtgaagattaacatcttgaatgcacaatttgggctactctgacatgttggcaagttgttgatagtactagtaaattctactgcaattttctttgtgaagttgacaacttaatgtttagaaccaagtcttaatttacaatttatagatcatgctgtgtcaaagcttctgattacatatttggctgtgtactactgttagcagtcatcaccacatgtccacacactgttttgttgcttagatttgcaataattatatgctaggatcccaggttatccgcatggaaatttaacacgcctgtggattagcctggttctgaccaagaatccgaccaatcctgttcaagtacttactcgagtgaagtttagacattacataaataaaactaataacaatctgtctggttttgtcaatggataatggaggtgtattactgacgagtgacgaaccaagatggttgccgtcaggtatggatcatagatcgatgaacagctcctgaccatgacaggccagcgaccacaatggaaagattacgccgtacgtacgatcagtcttcattcctcataatttcattgttcgtactcctttttgtaacaccatttctcgtagcaaagcaaagaaaagcatcatgcgaattgactaacagcagcacacaccacataaattctgctcgatatttcaacgtcaccattgtcacctgagggccaatgtaagggggtgtttgtggttatcagtcacattttgttgcatctagtattagggaagtttaatcacactggcagttgtttagttgtagctatagttgtgacaagatttttttttaatatattgggtcaacttaaaaaagtttggtaagattcacttagacttgctaatgtacgaccaagaatttaattgtctcaacttaaacaagtgtaacaatatttattgacaaatggacggagctcctcttacgtaaagtcagagggacataggtccctgataggtggggccggcccatacgtcggtgaccatgtccctctaactttacgtcagaggagccctcaatggtgataaagtatgactgggaaccaaatacaaatactccgtgctttctccatcctaaaatataataacttctaatatttactccatccatttcataatgtaaaacacaactattttttttcatatatttcataatataagatgtgcatacatacaattaattagtatcttctcaccaccaaattattatt

SEQ ID NO: 8980 - DNA, 90633 bp, Oryza sativa
  unsure (1)..(90633): unsure at all n locations
cccccccccccccccccccccccggggcgcgccacggcgggaggcaaaagaaatcccacgagatatccccgtctccgcacggcaccgccacgtacgtacttacgctgcctgcgctcgtgcgtataagagcaagtttaatagcagagttaaatgttagctccaaattatttataggtaatataataatctatttatataatagttatctataaaaatatattacaccattaatatttggtttcaccttttatatatacaatgtattaaaatcaactgaatgtaacccgttttcttctgactttttcctcctttcttgatacgcgaggctatagtttcttctgtctctttccttctcttctcgatactaggttattgttagcttacagctgttattgtacttactctaaatgctggagtactgggtttttgtaaccgagaatgggcgtgtgggcgcgcgcggggcacgatgctcgtgcttgcctccccggtgcgcggctttttgccggcgatggcgaggccgcgggccgggcgggcgacggggcgcaccgcaccggagcgtgcgatgtgtgacgagactggcaggggtgggtgaggggacgccacggcacgtacacggtacaccactggcagagtactgggcttggtcgtctcatatgtttgctgctgctgctgctgcgtgcgttgcacctggtgggcaggagggcgcagcggagcatcacggcgaagtcggcgagcgagcggaacaagcacgtggccacttgcgggaaccctgtcccctacccccctcgccagaatccggatctactgtgcccgttcgctctccattggtacggagtaacagcctgcctggctgcctgggtggggtggcaatggcacggcggctatttttttttaaaaaaaaataaaattcagtttagtgtaagctttcgtgcgaacttggaatatttccataacgctgtcacaaattccataatgagttgtacgaatggtgtccttctaggatgatcttaacaacccctaaatcatgcaccctaccaattacttcctccgttgttttaaattataattcattttacattttagtcaaactaaaactgatttaaatcaatagaaaaaagtaataacaaattcaacaaaagacaaatatactattaacacatattcaattatagattcaataaaactaatttgttgctgtagatattgactgcattctttggtgtgggttgggaactaatctccaagcatagaaaacggagcgatagattaacgtattattaattaagtactccctccgtttcgaaatatttgacgccggtgactttttagcatatgtttgaccgttcgtcttattcaaaaaatttaagtaattattaattcttttcctatcatttaattcattgttaaatatatttttatgtaggcatataattttacatatttcacaaaagtttttgaataagacgaacggtcaaacatgtgctaaaaagtcaacggtgtcaaatatttcgaaacggagggagtattagctaaaaaaactaaaaaatggatttatatgatttcttaaagcaacttccctatggaacatttttgagaaaacataccgtttagtagtttaggaagtgtgcgtacggaaaacgagtaaatgtaggttgataaccaccacaaacgaactcaagaagtggaggctagtatatctctctgcaaccttaattaaaatcaaaatgccttataatttaaaatagaactatggagtactctctgtcacgtagaaaaacaacttctaaagatatatttgtccagatttatcactagaagttagtatttttttttaagaacagatgatgtattatactagtcgtacttgcaagtatcccatattgttctattcgcttagatttgcaattcaagtttgctacgtccaccagaacaagattcacttgtctaggagtactattgacttgcagaatgcacattgaacagtagtggcggccacagattataagacggtcacacctgattccccgcgcaaggcagccacgacgcaggagaccagggcgtccacctggcgccccgccggtcgggtcccacggcgacacggtgccatccccctcgccggcagcctccggtgccaacccaaccggcccaaccgccgatgcgccgcctgtcccagccgctgcaccccccccccccccaccacctccggatcctctgctcccgcctcgccctcgccgcctgacacgctgacacccccgctcgcccgcagaggatcccactccgctgccgcctccgcgcttgcaccaacggtatatatatatagctcgctctgtgcagcccacagctcgccaccatcagcgtcttcttcgtcgaggtcagcggcggcgacacggtgttgggtcatggcgagctacggcgacgacggcgtggagctcaccgagctgacgctggggcctcccggagccagcgctcgcagggccaggcgcggcaggaagaacggccatccgccgccgtcgtcctcgatgtaatttctagtgttcttacacggctaatggttttgtgatgatcgatcaatgtcgcgtctcctctgatggatgggtttcgttgttcggtttaggattcaggcagcgtacttcgtgaaggtgagcatggacgggacgccgtacctgaggaaggtggacgtcgcggcgtacggcgactacctcgagctcgtcgaggcgctcaacgacatgttctactgctccaccattggtgagctgctagtttcacctcgctgtatatgcaagagtaatctgccaaacattgatcagtaatggcggttaataatgttttgtgtacggtgatcgagcaggactgatggacgggtacggcgagtgggagcacgccgtcgtgtacgaggacggcgacggcgactggatgctcgtcggcgacgtgccctgggagtaagcaccgctgaaaccgcatcgctttttttatacattactgaaactgcgtcattgcactgttcatcatcgtttcaaaattatgcgaatgcaaaaactaaaggtaaacgtggaaatctcaacctgatgcatcttgaattgcaggatgttcgtgtcttcgtgtaagaggatgagagtgatgcgagcttgtgaggcgagaggcttgagctcaaacgcgtgacagaaacaattgcaggtgaggaggattaactccaattcgatcagattggtaaatacagaatagtgcatgcagtagcatagtttcctttgtctggaaaaaaaaatctgcaatatgatcaaactaatccatatagagaaccaattaagaacaaccgagtaatcgcactaagttcactaaccactaactgatcagactgaaactttgacttcttgagttctttctcactgccaagagtttcagactttcagtccatttctttactagggatgaatatacaattgattcagggtttggcattgttcagttcttttccactgataaactgatttagagttttcgttgttaattcagttcttttatactgcaataaactgatttggattttgcgtggttccaggttgaccagtgcgttgtagataactgaacctggacatcgatcgctcatgcaagtggtgaaagcgctgacgaaaaggatgacgcaattttctgaccgaccaaagctatgctgcgcacacatgattgatgcaacaacatctacagaaagaccagcatatcagcatctcactagctagcctggaataaatgttagttaagtagttgacactgcagatgcggtcaatctctccagcttgctgcttgcttctcacatgagcctgaatgcctctgatacggttgacttccctgatgagatcccaacattttagctcccttttgcctctagctagttgtaagttgtttcggctgtatatgtatgtatgtcgcatcacatgtacatggatcaagagttgttcgttgtacctcccaaattttgatacagctagcacgaagatcttttgagtctgagatgaggttcaattctgttcatgggtgtggtttctgcagacaggatcatggtgctcaactgctcatcacgtttctgtttttgctgcaccagtgcagaacccagttcatctgtcggagcagcgtgcggcaaggactgcgtggaattgatcttcatggaagatgttgctaattgcagcagcagcggtagtggtatccatccaagtaggcaaatgtaacagctaccgatgagcaagtggccatgttgttttcaggatttgtggatcatacataggtaggtagttatgtaccagttgccattaggccaactggagtggatggatcaaaaggagtccaaaagcttctgcgcgtccatttgttcggctcatatggctgcttgagctgcagcaacagtacccactacacaaaagacaacacgatcgctgcagctgctgctatgtacagccgcacttagggccggtttatttcgtgaacgataattcctggcgtgtcacactggatatacggacacacatttgaaatattaaacacagtctaataacaaaataaattacaaattctgccagaaaaccgtgagacaaatttattaagcctaattaatccatcattagcaaatgtttactgtagcatcacattatcaaatcatggcgtaattaggcttaaaaaattcgtctcgcaatttcctggcgaactatataattgattttctttctacatttaatactccatgcatgtgtctaaacattcgatgtgatagcgtgaaaaattttgtttaggtactaaacatgcccttattcagttgatgcagcagaattgcctcggtcaagaataggaatacgaataacgtcgctgaacttctgttgaaataatgtgtttgtttcatgaggatgggaattaattcctttcgtacggaaaacgaaatgatctattagcacataattaattaagtattatctatttttttaaaatatgaatttttaaagcaactttcgtatataaagttttcgtaaaaagcgcaccgtttagtgtttgaaaattcgtgttcagttcagtaagtcgatgattggaaatgcgaccatggactagctcatgttcatggcttcacggtaaaacaccggcaaagcattgctggctgccgtgccatggcagacagctgctcctagttgctggactgaccggtaagaacgggttgggcaacgaaaactccggctccggtgggtcggggattaaaactccgaacctccttgacctccacaacactgtcatctccacacaaattaatggagtttttacgtctcgatcagtcacccacgacgtgctcggtgctatgctcgtcggagacactcaatcaccagttcgatctttaaaaaggccaacggggtcagaaatgaaaactccggcgccagcgtttggagttgattagtaactccgaaccctttgacctgcacaacctggtcatctccaactttctctgggccgaattctggtgttgggcctagctttctagcccatacagtgaagaaacggcccaaatatggcatcacgaggccacgcggcccactcacaggtgcgcctgaatggtttgtatatgaaataggaaaaagtccacgttgcgcttatgtggcattagaaaaaccgagctagcttgctctgttagctaagcgacgaatcatagcatcacgcacgcgtagataatcacagtcacagatgaagaatctaaaccatttcttgtcaatcaccaaatttacaatgttttacatgcctaatccttctctataattgacaagaacgcgaggtgaaatgatgtgaatgtgtaataatcgatatgtcgaaacaaaaacattacacgagcgaacatccagtctctgtgtgtcgctcacgagcaggagcactgcgagctcttcttcatggcgctggtctccatgatggagccgacgtccagcgtggtccccttcagcgacagcacctcgccgccgccggcgccgccgtcgcgcatccgccgtgcctcgtcgagctccagcgccctgcgcgacacgacggcgaagatctcctcgagcagcgtgaggaaggcgcggtccacgttgtcgcccgacagcgcggacgcctcggagaagaagagcccctgctcctccgcgaaccgcgcggcctcgtcggcggcgacctcgcgccggcccgccggcatgtcggccttgttcccgatcagcgccaccacggtggagccatcggcgtgcgcccggagctcctccacccaccgcgccacgttctcgaacgtccgccgccgcgtgatgtcgtacaccaccatggcgcccagcgcgccgcggtagtacgcgctcgtcaccgccctgtacctgcgaaaccaaaaagaccaaacttcgctcaaatttcctccaaaaattcaaatatttccgccacgaacacatcagtctccctcgggaacacacgaattgcacacagaattcccgctttgttgcattgaaaacagatcaaaatcttaattaggcgacaactgcctaatccaagggcaggttagattaggcaggtaatgactgatttgctacatgacagtttctatcaaatcttctcctgcaaaaaggaggcattagtggttcttgcagggatcactttcggtggtcggcgtgctctgttctgacgcgttgtctttagcagaagctactagtagtagcatcgcatttcatagctttaatttcagctggcttcatgaaaactgacagccactatacatgcatccttatcttcccaaccaatacaaatccaatcttccacgagtccttgtaccgatccaattagctcccggcttaattaatcacaatgaaagcaaaatgaagctggtgtcttggctgacatgcatgtgacaccatctccctcgcagcaagcaacagaacatgagtcattgacgctatgtaagtatatggagtaagtatatggagtaccaaattactaatcaaatgcaagaacagccagatcagttgggatagcttgaacacgtaaacgctaacaaaaacgcagcaacgatcacgatttcgcagcgactatcattgcgttgctctattatatatactatcagtattatcacaagtaaaaatgatctttccagtatttctaagtcatgagtctagataactgcgtatgaactgatgcgtttgcgaggaaagaagatgatcggtgtgtgcatggatggttaccgttcttggccggcggtgtcccagatctgggccttgacgcgcttgcggtggagggagagggtgcgggtctggaactcgacgccgatggtggacttggagtcgaggaagaactcgtccttggtgaacctccccagcagctgcgtcttccccaccgccgagtcccccaccaccaccaccttgaacacgtagtcgatctccccctccttctccccctcccacaccaccaccacctcctcctccgctaccatcctttccttcctcctcgatcaccttcctctcctcttcttggttcttgattacttcagctatatatgaactctctaattaactttctttctcttcggctaagaactgtggtgatcgagctagatggatggctagaggctaggcttatgttgaaagcatgcagtgcttgcttttgagggaggctcggtgtgctggtggtctactaccctagtgatggtgtgtcctgcttttggagaggaggattgctgcaatgctgcagtgcagtgtgtgctgcacaaagggaggctgcagctatcatcgctgccttttgctgtccattccaaggccacctagcttggctaatacccaggccttcttttttgtttaaaagaaacaaaaaaaaatcaagatgagtccttgttttgttgccttttgcttttaacttttgtgcagacaactggacatattacaaaaatgtttatatgttgcttccggtttaagaagggtacaatagatagatatcatactttttttctttagatctcatacatgtgttaataataaaaagccagaaattctttaccatgcactgtggttaatctccattaatttaccattagtagagtagtactagactatcttttctttctgtttagattacccggagtacgtatgttattaaactgaaacagtgccaggagactgtttgctttttagaaaaagaaaaggaaagaaaaagtagtgaaggaacagggcaacatgaagaccttttgttattatgattaaacaagtgttcgagactatagctgaattatatagcagtggttgaccaacttggcttattactactacctccgtttcatactatatattccatccgtttcaaaatatttaacaccattgactatttagcacatgtttgactgttcatcttattaaaacaaattatgtaaaactatatgtgtacatgaaagtatatttaacaatgaatcaaatgatatgaaaagaataaataattacttaaattttttgaataaaatgaatggtcaaacacgtactaaaaagtcaatggtgtcaaatattttaaaacggagggagtaagactttctagcattgcctatattcatatggatgttaatggatctagacacatactccctccgtcctaaaaaaaagacaaaccctggtttccgtgcccaacgtttgaccgtccgtcttatttgaaaaaattataaaaaaaattaaaaagacaagtaacgcataaaatattaatcatgttttatcatctaacaacaataaaaatacgaattataaaaaaatttcatataagacggacagtcaaagttggacacggaaaactagggtttgcttttttttttaggacagagggagtaaacatctatataaatgtggacaatgttagaaagtcttataacctaaaacggaggaaacggaggaagtagttcccttagccgtgccacttcacatcacattttatgctattcgattcgatcgaaagtctgaaatgtgattgcaagttgcaggagctctcaagaactgaaagacccaacatgatgacgtatcaagaaaccagatattattagcagtctcattgcttcacttccaacggattataagtgcaatacttattactccctcctatctatctcgattcattaacatcaataaatgctataatgacttacattgtgaaacggaggaagtaatgatcaaaatataatttgtagataaaaaaatatatatttcccatataataacgtaatccacaatgctactgtgccacgctaaaatctctctgtggttatggaagtgacattttttacatgtaatccacaaaaaagtatcatacatctgtctcaaaaaaatactcaggctcttttggaacaaaagaaaaatagagaaattttggaagattcaaatccattagaaaaatttccctacatgatcctttggacggaatagcttccccaaaatcctttaaaattcttatggaattacccattttgtaagaattttagaggaaaattaacatgagactagacctcatgttttctcatccttgtgactcaaagtccctttaccttttctacggtgctaccaaacattttttttttgcaaaatcctatgaatttatttcttgtggtattcaatatggcatgacattatattcctatgattttttttttattttcagaatcatacgttctaaaaggagcccttaagagatgcacttgatagtacaagtcccgtatttaatccttgacatactcataattttttcttaaaaaatatttaaaaaatatttgaaaggatgtctctcctttcaaatctcattttttttaaaggaaccattaactgtgttgatgaccagaatgaaccagtgaagaataccacaccttcttgagtgtttagcagtgaccaattcagatctttgctttgtcaatcagcagtggtccatgcagaccttcacactgtacgtatgccgtccaagaacagaaaacaccaagaaaaatccaggtccaaacaaatcggcagtttcctggataaaccgatcaacaaatcacggttggaattgcgacagggccaaggtttcttctcctctgaatctctgaagtctgatccggtctcatgcaaggccttccaagtgtgccgtcgctgtcggccagtatgttacgcaattgcagcagtagtcatgcgtgtcatacggtattctcttcctgaatttgcaagcaaaaggaagagacgggaccaaccgagatgttgggtacgtgatcccggtggaaattctgttgatttcttggcaggtttctaaatttctggtcaagtagaatgtgtcaggtgcctgcgactgggtgaaaagtctgaataatttctttaatttgctgaatattagtagcagccaggttgatttttcccctattcttttctggaaattttgagggtaatggctagtgtgcagagatgagaaattgatcggaaatttcagtgtcacgcttaattaaggtgaaaactcagcaaatgatcaaagtccttgatgtacaagcaggtgtcaggactagttggatgatgtcgctatacaagagatagtgctaggaccagcaaggtttgcatcaatttatcatatacaaagtacgtgtatgtttaatgtccaatcaaattaatgccgactaagctcgacactgtagcaaaactatcatgctgacattatttgagcatcaactttattttttgatagaaatacatgttctggattatgaactactgataccaataaggacatgtacttaccaagttaattaagctagaatagacaagatatgatctatctttaaccaacacgctttgtacgttcaagcagttgcatgattagggcttgtttagaggaacttaaaattccgagaaacaaacaagcaactaattggtagtcagcttttgataatataaaaaaactgagttttccaatttctagcttctagtttattttttggattctacagttacaacttctcagaatctgaatgaaaaactggattgtttgcaataatttctaattttggaagaagctgcagctgtcagaaccttccccaaacagacccctaatgtccttgcagagcatttcttcactcaatcacaacctgcaggacagttatgcaatgcagctttcttcacatgaagagaagctatgcttaccgttgacggtacacatcaattctcttgtaccagatgaatgcataaaaaatgtcaccaacaggttttatttcaaagtaatccaaggacaatcatccatgactccatacttacagtactactacatggtaagtcaaaagttacatgttacaacttcagtatcagggagcacaagcaattggcttacatgtcctgcagatgcaacaaaaatgcatctcaatctgtgcctacagagaaaaaaaaactgaggcccagaaaccagtattgaacaactgctaagtacatgctgaaattcccatacatacagtagcttatccatctccagaaaacacatgcatattgttgtttctagtaatgctacaagtctataggtgtgccctgttgttgttgctggggattcagtgacatagcatcttccaggcacaacacaacatttttcagccaacattgccatctgcaaaagaacacatagagcctctgaacaagatatcagcttatttgaaggacccattccaatttgattttgtcaaataccaaggatataggtggtgagatactcttgtccttacgaatcactgtaagactatttcaggcaagaaaaactactatgaaaaaccaatgaaactcaccgaaatcctttttgtaagaaatggtacaggagcagtcttgcaccatgaaatcaacctgcaaacaatctaagccagataacacattcataactcactactatacatgtgccgatgcaccatgtatgtactcattgcaatcatccacagaagaatagatgtaattcagatcacacagcacatgattaaacaatttttcagccccatctactttgtttccatccaaccaatagttatcaacacatccataccaacctacacggcagaatctttgcaaagcaacaacatacaacactaacggtgcatcagagtcaagtttggtctagcattgtatacaagtctccctagagattctccacaaattttgctctgcattattaattcaactccacccaagaaacttagtttctaacacgaggcccaccaattggcctcctgcgaggagtgagagagaattgtatgcgcaggttggaagactcatggtcatgttcatcaaacttatagcctgcaaagcaaaacgtcatagtttcagagccaaattcaagcttataacctgaacaagtattagaagctcaaagtttattctctccctaccaatgaaacgtctagttttatgatggaaagcactaaagttgatgtgcacacaaatattattacatatgatatagcacacatagaatgacagtaagctggtttcaaagtggaacaaggaaaaattatgatatttcgaaataacaatcttagttttcagcaaaaaaataataataatcttagtttagttatctatggactacactctacatagttcagtcatcacactaaaacctactggatgtgggacaaagggaaaaatattaagaaaaataaacagatttttaataagactaaaggcacacaaacataaaagaatgaaactgcgcgcaagcactatctaacgaaattggcaacataactacaatgcatatggatgcagaaaatatgatgttataattaccttgcagagtctccagagcagcacgagcttcaggaggagatgaaaaatcaacaaaacacaagaggttacagcttccagcctgcaaaacagagaggggatttgacatgtaagcatgcttggctttgcaaaaaataacagggaaaatttggttcacaggtagcatttaacttacatgcctaatctccttgttgaccaatctcacctcacggaaaccagaaaaggggcgaaagatatctgcagaagaaagagttaagggcaaaagcacctaggaggtgtaatatgaattacatcgcaaaagatacctacactaattatagctaggaaaatgtgattttagtttacaagcatagaaaaggatacgtgcaacctctctctttgtgcagttcgaaggtagtccttccacatagagagttcttgattcagttattgtagcgccatggtttccactgtccatgcctgctgaatatgtggccatcccaccaagtggaatagcactttggttagcaccagcagcataggacatctgcaaccagcactatgttagtaagaaagttgctatcctcaaattaacaagcttataattgatataatacctgattgttcaagcgatggacataatgggggctcattgcttcgtggaagaggctgtttccctgtccagaaggcatgtctgcaaacaaagtgtaaagtgttaaaatatacaaatgcacatcttttttttttgactgaaacaaatgaacatctcacttggagaaaatacattaggaagaaactactgaacagtctcgtcaatattttttccctgtccatttaagaagcaagctatgacaaaaatggggttgcaatagaagcaaacatgtgaagaattaatgatgtgcggtaattacaacattatctaacaactaaaaagccgccaaatctatgtgcaggtaggcaatcctgatacatagtttcaggtagctgtgcatagcaagcaatcattttcccaataaaatgatactaaaaaaggactaaactttattgttgtgatgatagatgcattcagaattggcggcaaacaacgtaacggcatgcaagcagcaaattcctttgtagagattattagaacctttttacacaacaaattcctttttttttctcttgttttagatttcagaatttacaaaccatttagccatcaaaatagtcagaccgactactctataatagaagccgaaaccttttgcctagagcctaccaatgatagtgaaatattagcctaaccagagattaattcaatctaacatatcatataaaccatgctacaccatctaactttaaagaaaacaaagaatcaatatgatcttgtagattcacatatgaaaattactagttcccatcttacgacattgaggctttatcaggaaatgaggaatggtttcatttttatgtattcatttcaaacaaacatctaccattggaacaattcaaaactacaagcctgcaacttctcctaccatttccttggacaggttaatagtacagcgtggcagggaaaacacaaggccggccctgagtcagggcagtcagggccccagaccacacacgtattgtttggaagcccaagcctcattagcagatgtccaacaagcatatcagtctgcgcaggtcacgaagcatcgaagctatctcattcccctcgacccttatctattcccgaaactacgctgggttagctagcatgactaaagcctaattaagtgtgtcatttgctgcatgtaatcccgtcattcagccactgcatatgtcgtactctttaagttttttagatctcactcctttgcttcagggttgaataacaccccaaagaagattgacaaaaaaaagatggaactttgatttcttttggttctaaagattgccattagagttgattggttatgaattcctcattcctgtgagttgttcataataattagtttctctagttagtcagcaagatctccttgagttgagtggttggttggtttatctcatagctttgcactgattttctatagttggtgtgtgtgtgtgttttccctttttaggagtcctctaacagattatacccttgaggagattggcttccacgagttcttgatgatatttcggtttctacaagatcacaaaaatccaggtgattctgctccctattattcagagtttcagacttataactgataatatctggatctgtaattcaaacatgagggatatttgcaatttattaagattactgatgatgatacattcaaataaaaggcctctgattttttctcgccctgaaccccaaaagttcaggacaacaagatctgcttataaaaaaagactagcttccactatcatcatctatatgttctatagcctaaagccctaaaccccatggatacccacaacaaagctacctatactttcttacgactaatctagcaggcaacacaaaattaacaatcaagaagaggaggaatgtgtgggcgagcacgaaccgaagtactccgggcgctggcgcttgaacgacggcggggggccggcgggcagtggcggagcagccatcgggggcgcgaccggcgccacggcgggctgataccccgcctgctgctgctgctgctgccacatgagcgcgggcgtgggcacaggcaccggcgccggcgcctgctggcgcgggtcgacggcggcgtactggtactgccagtagctctcggcggccatcgcgatcgggagggcggcggcggcggcgcggtgggggctagggttcgggaggggactaggggctagggttcgagagataggggaatggggaatggggaatgcgtgcgcagccgcggtgaggggaggagggggcgcgtgttttgtagccagcgagcgcggcttcggttactggtgctgacgccagtggcgctgtcgctgccccccacacagctgtcgtcgcgctccggggcagcgcgcgctggcggcgagcgcgggcgcgcgtggagcgcgaggaggggggagcaagcggcgcgcgggcaccgcgttgcgccgcgccgcgctggtgtggacgcgcgctacggcgcggcgcggcgcgcgtgacggctggagggagagagaagttgtgcagtgtgggctgccttcgacaagcgtgtcgggcctgcatgggccgtgatgatgggctgggtagtttttgcgtggggaaaagtatacctgaggtccctcctatggcggcattgactccggttttggccgacgtggtagctgacttaacgtgggacctacatgtcaatgacataaactcttctcattctccccgttctcacatcaggccggtgcagagcgacagatgccggcgtgacgaggcagccggtcgtagcaacggggagcggcggagaggcggcatgggaaagggtcgtcgaggtagataccggcacgggtagtcagccggtcgcggaggtggcgggggagaggcggcacaggaagagatcaccggggctggtcgctaggcaaagcagctcgggaggaggcggtggccacgcaacgaccagccaaccacactgatgtcgccgccaaactactcctccctcttgctcgtcgccgcccgatatccaacaccttaggccactcctcctcctccttgccgctacgagtagtgaccgatggagaggagctacacattggcggcggcagcgggcctctctacttcccctcctagatcttcgccccctcttctccggctccatcaagctctcgctgacggcacccctgcccagacatccttcgtgagcccaccgtcgttggggggatgggctcccgctttcctcgccattaccggtcaagcttagtgacgctgctgactcctagctcctctccaccggccaccgttcttctccttgctcgtcgtcaccaacaagcgtcgtcgctgtcagcgagggccaccgtcgggcaccgcgcgcctccagttctccccgcccgtcgccggtcgcgctcgccgcgctggcccttctcctcgtcgaccgttgcacacctcagatggagaggactggagaagagatgaagagaggtggagagagagaggaagggaagtagtcactaacatgtatggctcatatggggtccaatactgactcagctatcacgtcggtaaaaaccaaagacaaaatcacctaaagacctagagagcctagttttctaagttgagagatgctatatatctcgttttttggttcagggatgattttgtaattcagcgacaagacgagggaagtcaggtataacttttttccttttgcatgggattcgctgggtattgggccgggcctttctttggaacatggtggaggcctgcgcctatagggctgggccttgccttcagccacagttggttttgggccgggcctttctttggaacatggtggaggccagcgtctatagggctgggccttgccttcagccacagttgtcatcggagcgttggatgttgagccggccaagcaaaagcctgaaaaactaatggcaaattttgccacatgacatcgtgactttgtggttttagctgtaggacatcgcgcgaagtaattttttggggaaaacactctcaaaatgtggttatttgatggtggacaccgcacccattaaattaatgatttcggtgctgagtagacgagatggctccacttttttacatgacttaccaaattgccccttattcctctttctcttcctatcttcttcctctctctccctcgatggcgcggctcgcgatgaccgtgcggcgcaacgcggcacgcgatgcaggcgactggcgacgcgacagagggcggtgggtgatgcgatggcacactcgtctaggagcagcggccagcgcgaaggtggagcagcggctggcgcggcttgcggcgaccgtgcggcgtgatgcaggcggccggcgcgcgacgcagggacgcactcgtgcaggagcggcggtcggcgcgatggcggagcaacgaccggcgtggctgctcggcatagggcagcgggcgatgcgagcggccggtgaagggcattgggcgatacgagcagcccgcggcacagggcattaggcgcacttgtgcaggagcggcggctagcgcgaaggtggagtagtggacggcgcggctcgcggcaactgtgcggcgcgatgcgggcggccggcgatgcatcgcagggcagcgcgcgacgcggtggcgcactcgtgcaggagcggcggctggcgcgatggcggagcaacggctggcgtggctatgcggcaccaggtacagcagaagaaggccgccgccgccgccgtacacgactgccgccgccgccgtacacgactgccaccgccccgcccccacgcccagctcttctctgctccgctccctgaccccacggcgtcacccagcgcgtggcgctccctccctcgccggcgtacgactccaatcagctggcctccctcttcggattcctgcttgtgggttagcccagcacgagccatctccttcgcgttgacatagaggacggagaagcgctagccattgcagtgtggaaggaggggatagagagaagaaagacctgacatgtgggccaaaggacattttagaaatttcacacaatttatctctcctattcaaccggaaattactaatttaatgggtgcggtgtccaccagcaaataaccacattttgagagtgtattcctccaaaagtcacttcgcgcggtgtcctacggctaaaactgcaaagtcacaatatcctgtggcaaaatttgccaaaactaatctacacagctataacagcaggtacaatagcaagctataagccagctataaacatattttaaagagataaaggaagagagagaagggcagcgggctacagaactgtagccagctgcagtacgaactccaagatgtaatatgtgtatgataggtgagaccagatataaatagtatagtaagcaactattgtatgaattggctattacattagctaagatgatttagagctagtagtgggctgcactattgaccttgctctaattgttggtggtggtgatgacaaaatgttggtagtcggtgatagtaaatctgccacaacaactgcctatcactgatatatttaaccctctatcattgacatatggcgtcggtgtaattttgtgctccctaattcaaacactcccgatccctaatatgtccgttgattccgtagatcagtaacctgttaatatatgttctttaaaaaggaccttggctatttgctgcggcattcattcacactaaaatactaacaaggccatgaaagatacatatggtaagaagtacaatggtgcctcgagcaaatctactagtaagaagtaaaatggtgcctcgtttacggtattccaaaacttgagcatatgagccaaattcaaatttgcttacaagtttaagcatatgcataagatgattaacgaagcaggtccgagttgaaacgaattcgacagtaactgaaatctgtcccataaaaagttgaattttcaaggggtccaccaagcaattaacgaaaggtcgcaaccaatcaaggggcttattggatggcttcgacatcttttcatcatgatgctaatttgtccggaattttgtaaaaatcaactcttcgtggagcggagtaaacttcatctcatccgctcgaagtagaaaagaggggcaaatcaatatacttctgtagttacaatgtctttgtaccatagccatatactccccgcgttgcgtttcataccataagtcattcgttttgacatttttcctaatcaactctttttttaagtttgtctaagtttacagaaaaatataacaacattttcaatacaacacaaacatattatcaaatatacaatgttatatataatgaaattaatttggtggaatagatattgctaattttttctataaacttaactaaacctaaagatgtttgactataaaaaaagcgacttataatatgaaacaaagggagtacttaactcaaacaaaaagcaaaagtttttaacttaagacattcactccaagcattacaatttaaattcagttacagtttagaccttgagaaaatacaattcacgctagaatacacttgcaaccatacgaagcagtgtttctgccaaactgaaaaaagaaaagtagatagacaagcttaaatatgtttaggatgaatggagtacatcaaaacgatcataacataagaaccattccaaaatctgtatgatgcataagctgttgcaccatggaatagaccactctaagaagggtaccacttaccaaattcacatagctccgaagagcaattcccctttgccctgaatgagaacctcagtgaaacatgttccattgcctttgcatcgtccctggaaccatgatcttagtggcatcaccgaacacctttccttagtagtaactggtgatcactgcaaaacacacagacctttgagcgtatcaggcagaagttgaggtcacatcctatgaatagatttcgtatcaacatgtctgatagttacaaccacattagtgttgattttttttcaaaattgctgcaggtagtgacaaaactgtgctataaatggtagtactattattacactacgtccattaaacatttcaagtttgtctagtcgaatgaatttatattgtcatgctggaacttgaagaagcaaataatgcagcaggagcaaaaaaataaatttgccttattcttctagtcagaaattaatgttgcaggatagattttagaattttgctatcaatggcagttcttttaccgcaatatccatgtcagtttatttatggtggaaagctggatggcaatggccatttcgacaatcagaaagaagaaacgatcactacccacagttaattgctagaaaagtaatatgccgtgtttatcttgtctaataggaaggacaaaattcttctctcttgacaaagaaggaaaccggcgtttcatttattagtcagtgagtataaatcaataaatgttctattaccctgttgctacaaacagccagaggttgaataacctagcatcagcctacgaagatacagccaagtaatggataatgataacaggtggtaaaggtggttaaggttgcaggataaccaggaccccctttctaataccatctcgtttgtttaaacctctaacaacaatgttcagaacggcctttcttcccaacttaaactttcaatttattgcaatagtaaaatacaaaagatcattaaactcacacaaccacactgatttctactcctgcttgccaacacatctataaaggtaattaggccctttatctagcatgcacgattcaataaactggaatcacgcttgcatgttttggcagccatatgtggttctcacgttcatgaaacattgagactaggtgaatatccacgcaagattaaaagtatacagcacaaccaactactgttcctggtaatgaagctcaaaggataaattaggataggttcattcatgtcaaagagcatgatttgtctaatcacaccagcaactgatatgagcctatgtaacaacatcatgcttctactcaccaagaatcgcaagtttgcaatactactaagggcgtgctaccacataaaaaactccagtactttaattagcagttcctcaaaacacaaatgcattggtagaagctgtatacagtcaatgccaatgggaacaagtgacagaactaagattttttaaaaaaaggttattacttttatctttttttaacagaaatataccatgggggccaaaaaaaacaaaaacaaatctagaccctgctgacttacaaacggttggaaggggttacaggttgttgtagaatttaaagggtattgaatgtataatttagtaacaaaatagaaaaatgtagtagtaattttgccatttcaacggccaattgacaaattttactgatgcgtagaaatggttgatgtacctttggggaaatatgagatgcaaattagacgattgttttagaaagttataaaggaggataaacccccttctccccccccccccccccaagatcaaaaggactaaaaacaattgcctattgccaatgggaacaagatcaaaggaggataacaccataaggacggactaggtgactattgtgagcgaccaaacaagtagctcacgaagtgcggaggtgccagcccagcaccacaggctgctctcttccgcaatagaatgcagaaccacctgaacattggggctttgttccctcaaacacacatgcattccggtgcttctatatttcctagcttactagaatgatcaaggagttgagcccctttctttggtctttaggaacacctctgttaacttaccaccaactagagagacacgcggtagaccgaggcacggaggccaacatattcagcttctgtagaatacatgtccagacatggcggggaaatacacatgagatgagaaagtgccgaatagattcatcatcctggtcgcagaagggacaagcattcgggtgcgataaacctcgcttagcaagcctgtcaaccatccaacaccagttgttaaacagctaaccaagtgaataacttgcagcgaagctagcccaacttttccaaattcacttccaaggagcaaacttgatagaccacatgaaataagcattataggccaacttcctgatgtagatgccttctcaagtgaaataagcacttgaacaataaaagcaccatgtggcagccaaccatcttctgttattcagcgcttgagccacagtgcattgtttaaaggtgcacttagagatcagctagcacaagtttggagctaattcaaatatcgttttgccatgcagacaccgatccaaccaaaacttggtggtttccctgttaccaggggtgtatccaggattttggggcaccggtgtcaccactcacttatacttatgcggtgtttggaagggctccatttctaaatatttctaagctaaggtgtccttgagctgatctttttagctagagttgtcggtagaatattgctgttgtttcaatgagcatgttcatttgagactaattaaagtttaaggtttgaatcacttaattttagacttaattctgtattgagcaatactttgagagttagaacctaataagacatacaaatcctttattcttttggtcagacaagcaagttattgaagttgtttttactaatagctaaaaatatggttaacttttaatagttgataatagaattattggcctaattacatggatagaaacattagctaaaagaaataattatagtcaacagatcaaatattttaaactgcgacattagtggtggctgatggtaccaaaacatatactccctccgtttcacattataaaaagttttggtctttttatctcttgtctaaattcactaacatacatatgaagttgagcatatatatgtagcgcatgtggatgcatgaatgaatctattcaaaatctaaaacatcttataatgtgaaagaggaaggatgatggatgcatgaatgaatctattcaaaatctaaaacatcttataatatgaaagaggaaggatgttggaaaatagattcgggctccagcacctaccacaccagttaaactgtttaagttttcaaagatggagctatattgtttagcctctgagctgctgcaatttagcggctggggtcaacaagcttgcacagttgcactgccgggggtaagtgcgtaaatgcgtacaaatgctagcaatacactggattggttggatggcatccatctgagaccagtgatactactgtacatatgcccctgcctgtttccaacaatggtttccatagcaactccaaaagcgcactgacattgtataattatattttaactgaattactgaaatgacaaaatagtgcctggtttcacaaaaaatcgtgaaagtagataagcctgttggcatgtggtttaagatagaagagcttgctactaagttgttcagaatagcaagcatatcctttaatagtcgtagacatgcaacaatggtctatatagggtgaaacaaaatgacagaaaaaaaatgtactaaccacaaatgaagatggcatacattaatcattgtatatagcactttagttggcagccacacttttttgccatgaaaagtgtggctggcacaactgtggcaatttttggctgaaagtgtatgacgggtgaaatgggtgcctatgaaaactaaactgctatacttcaatgcatgttaaagcacagcaaagaaaagcatctaatgcaggtgcagagacattaactagagaaattggcagcataagaaaatgcatatggatgcagacaatcataaatttcataggtaaaaatgatgttgtaattaccttgcagagtctccagagcagcacgagcttcagaaggagttgcaaaatcaacaaaacacaagagattatataccttccacctgcaaaagagaacaaaatataagcaatgctaggctttacaaaatatgaacagggaagttttggttcataagtagcatttaacttacatatctagactccttgttgaccaatctcacctcaaagaaaccagaaaggggcgaagaatatctgaagaagacagggttaagggcaaaagcacctaggaggtgtaacatgaattacatcgcaaaagatacctagactaattatagctaggaaaatgtgattttagtttacaggcataaaaaggatatgtgcaacctctctctttgtgcagttcgaaggtagtccttccacatagagttttttattcggtccttgtagcgccatggtttccactgtccatgcccgctgaatatgtggccatcccaccaagtggaatagcactttggttagcaccagcagcataggacatctgcaaccagcactatgttagtaagaaagttgctatccttaaattaacaagcttataattgatataatacctgattgttcaagcgatggacataatgggggctcattgcttcgtggaagaggctgtttccctagagtcaagtttggtctagcattgtatacaagtctccctagagattctccacaaattttgctctgcattattaattcaactccacccaagaaacttagtttctaacacaaggcccaccaattgacctcctgcgaggagtgagagagaattgtgtgcgcaggttggaagactcatggtcatgttcatcaaacttatagcctgcaaagtaaaacgtcataatttcagagccaaattcaagcttataacctgaacaagtattagaagctcaaagtttattctctccctaccaatgaaacgtctagttttatgatggaaagcactaaagttgatgtgcacacaaatattattacatatgatatagcacacatagaatgacagtaagctggtttcaaagtggaacaaggaaaaaatatgatatttcgaaataacaatcttagttttagttcagtcatcacactaaaacctactggatgtgggacaaagggaaaaatattcagaaaaataaacagatttttaaaaagactaaaggcacacaaacataaaagaatgaaactgtgcgcaagcactatctaacgaaattggcaacataagtacaatgcatatggatgcagaaaatatgatgttataattaccttgcagagtctccagagcagcacgagcttcaggaggagatgaaaaatcaacaaaacacaagaggttacagcttccagcctgcaaaacagagaggggatttgacatgtaagcatgcttggctttgcaaaaaataacagggaaaatttggatcacaggtagcatttaacttacatgcctagactccttgttgaccaatctcacctcacgaaaaccagaaaaggggcgaaaaatatctgcagaagaaagagttaagggcaaaagcacctaggaggtgtaatatgaattacgtcgcaaaagatacctagactaattatagctaggaaaatgtgattttagtttacaagcatagaaaaggatacgtgcaacctctctctttgtgcagttcgaaggtagtccttccacatagagagttcttgattcagttcttgtagcgccatggattccactgtccatgcccactgaatatctggccatcccaccaagtggaatcgcactttggttagtaccagcaacataagacatctgcaactggaagataattactatgttggtaaaaaagttgctagcctcaaatcaacaaacttataatcaatatgctacctgatcattcaagtgatggctatagagggggctcattcattcatggaagaggccatttccctgttccagaaggcatatctacaaacaaacgtgtaaagtgctaaaatatttaaatgcacattccacttggagaaaatacattaggcagaaattagtgaacagtctcgtcaatatttttctgagggcaaaagcaccaacgaggtgcaatatgaattacatcgcaaaagatatatttttacctagactaattataggcaaatatgatcttagtttagcagcacagaaaaggagcaatccatgtgaattgaaaaacacattcctagatatcagatgcactaaatttgcaaaaatacagtaatagaaatgtttacatgaaaggacacgtcaatcctctctcctcgagcaatgctaaactagtgtacatcccacttggagaaaatgcattaggcagaaactagtgtaaagtgtcattaacatttttttccctttccatttaagaagttacaataaatgggagtgcaacagaaacaaacatgtgaacagtcccctcaagcgagaggggaaacggaaagagaaaccttaacggagaaacaaaaaaccacagaacccccacttcagctcacaccactgatgaatcctgcaagactgcaacaccaccagcgagcagatcaaccaccagccagccagccagtaagacgcaccagattactagagaattagggaaatctctgacaggttgatcctatattttgtacatagcagttaccatggcatctatttataaaaattgacgggttcaccaatataattttgtgaaacaactaaaaaaagcaaagaaaaaaaatacaagagaaatttctttgtctgggttatgaaatcaggcaattgaggtaaccattcattttaaagaacaacaaagattgaaagccattagtgagaaatgttagtgttgtactggggaattgccattatataaaaacaaacaaataggtaggaattgcccacaaacaatgacaggtaaaatgaatgctaaatagtgtcttatgaaggaagaactgataattcactggattacatgttactccaaagtacaaactacactataactttccatcatacgtaacacctcaataaagcaagaataattacacgaagcaacagaggcccagctaacaataacaatcagcatacaacatttacactaagaaagaaaaaggataagaaaccagaaatgttgtataaacaggtgacttaatgcagatataggccacataattttcagggtaacatgggttgattagtcaaaactattttggatgccccaaaaaattgccggtattgcatcatccattgttattaggatcgatatttcttctcacacttctctttctccgccaaactttatctcccaagttgcaattttgagcattgaagaaacaacaacaacaacaacaacaacttagtaccaacaaggcaacaactgctacaaacgcacgcatcaaatgcagaacaatgagagatcaaactgcaggtgcatggtagaagcagtggtggaaaacattgaggtgtggccatggccaaatatcagagggcataacaacaagagaagaaacaaagtttaaatccaaaatttctgttccatttctcacctaatttttaattcttgcattctgctctgaccacaagaaaagaaactcaaaacggcaagaaagacaaatcggaagcttcttctccatcatataaccacataaaagacataactatgtaaaaaaaagtaaaagacataactatgtaaaaaaaatgtaaaagacataactatgtaaataaatgtaaaagacataactacatagatactaaataaaatgtgaaggacacaacttagggacataatggcatattgtagtaccacatgaaaaattaataaggccaaggccaaccaaccacctagctcaaaaaggcctacttagttggtgaatgaaatggtggatgcagatgaagagagcacctctaccagatgcccacataaaaaggcacagataagatgagactgagatggggacagtggtgtggtcagtaactggggaggcattaggtgagtcacaatttaccggtggtatatgttttttaatccatattcgtatacggtggatgtttctttgatagaggtgtgttggtgtggattgaatgggcttaattgtgcaaaaacatgtagtgatttgttggcagttactattcatgtgttgtttgtcagttacatgtgccgggtggtgttgcatgacatggggttagagtgtgtccatcaagatggaggtgatcaaataatacatcatgaaagtgcatatacattaatgtggagaaaaagcctaggtcaagggcagagccagggaggggtggagggaggtcaggcctcccccaacggcgaattttttttcttaagtaccggctaattaatcatcaaatacatgattatgtcatgtacttggtgcattggcgtattcaggcttccaatgctaccactaccagctaggattgcatgcaaacaagttatttgggagacatagcagtatatcgtttttagatggtgatgactgcttcctaggctaagcagacctaacaagctaacacgaagaacacaacacacttggacagctcagttgttccaatgtccgcataccgtgttctaaatatgcatttttttgtaagccctaatacttatttttatttacctcttcactttaatttgaaatactaaaatcttcaaaacaaaaaatatgtatgtagccaatgactaaataataggcaggaaaacatccttttgtatggtcaaaactaacaaatatattcatatgatttattatccatgtcaaaatgtttcaattttgtgcgtattatgatgcaacttttttatggtcattgtcactcggtaatgagcttaagttggccccctcaagtttaaatcctagcttcgccaatggcctaggttctctgcaaatcatggtaagaatgtgtatggtgcatatctaaacgagaaatttcagaatttgccaccgaatatgcaggcttctaaggatttgccacgcaatccacactcctttcaaaatttaccacttagggtaccaatttcttcgttccataccactccgtttgcccgtgaagtcatgccgtctatcttttgcattggctccatcatcttccatctgccaccaacgtactttgcgagcccagtgtgcatcgccaccatctatgaccacaaccgatcccaagctagccaactgtgtggaagaagcaccagcccgtcgaatttctagggtttgggagggacatatacgccgcacttcacatgtgaggagccagagaatgggggtgaggggagtccgtgcaccgccgctgccgcttcctattcccgcggtgcaccacggatgtgtgctctcccgcgtcgtaactcgagtgttttgggggatgggatcgacgagagggaagagggaggatgggaccccatgcgtcgcagcttggtttctcctgcggtggatgctgggaggtgagagccgttagagaaggagggaacacgagcgtgtcagctccaccttgcccgtgacgtccgcccacgcgacaccctcgaagcggacagattacgctgacacaggcagcggatggatgacgttggcgccgagctgggttcgcgtgtatggcggatggacgaggatggagccagcggaaggacagaaggctcagctgcacaagtggacgaagcggcacggaatgaagaaattcgcatcctcagtggtaaattttgaaaggagtgcggattgggtggcaaatccttaaaggcctacgtattcggtggcaaattctgaaatttctctctaaactacttaaaagggcaatcgttcgtccgccctccccttcctccaccgcatgcaatgcaagaagaaataaacatgcagggcacatccttgcctccccccccccctcccccacccaccacaaaaaaaaggttttaaaaacaacccaaaaaaccatcccaatgggctaaaaacagaaacatgcacaattaatctttcacaaatccattgcaatacacaggcattgactagtattgggaaaaccacaaccatttctttcgaatatgtatggttcatttttatcacataagcatatggctattgagttgaaaaattaatagatggccatctgagaatggcaagttatttgaaccatcatgctgtcagcagcgctataattgtgtacacacaaatttccaaacaattgccaaaatggcaattactaatgctcttgctcggttcgagatagcaagtgtaacaagaaaacatcctatcgataaatgatactccaatattaaaaggaaacaggagattgcattactgcactttcaataactgcatgaagtaagagcggcaaaaaatgcagtatcatgcaaatcctaagctaaccgatcagatctacgtgaaatcgccatcaacagattataaattgcatcgtctctttggtccaaacagacattccaaatttcttcacaagagcagttgaaaacatttccctaacccaaaattgaaactctacaagaaaaccttatgtgccattttgcttaacaaccgaaaagggtaggctacactgaacaaatgtttaaaaactgtacaagccaaagcataaaaggaaaaggcataacctcaattctaaaacaacaactgttcctaagattatcttgaagcttaccagaaaaacatagattagagatcacagatcaatgatcagtgatcacttatattctaaagttcattaacaaagccaaagatcacagatcaatgatgatcagtagataacaccaagcaattgcagtcatgcttaagaaaagctacaatcaaaacaacgaacaaaacattgcatacctccatgttgaaactacatccaatcactgggttacatcttaacattacaaggaatataagaggctaatcgctgatgtgctatgcagctcacttcatttcttgcttatttatttatttatttatttattttagacaaaagaagcttatatcaacctgacaataataatagctacgactagcaacattaaaaatatctcatgtcttatgttgccaatgtaaagtacaggggaggtggagtgttagaacgaaccaaagtagtccagatgttgaagcttgagtagaggagtgccatggccaaaggcggctgtgccaacaatggcatcataggtccagcttgttggggctgcaataccatgtcaataaggtggaaggcctgcgcacaaaggcagcagctccatcgcagctctggcatgtgggtacggcatcacagcgacatcgcagtcatcgatgaatgtgctatcatactatcataggctgcatcatcatcacaaattcgtcttgcggaggaggcggtggcaaggtcacaagtccaccatcacgaatgaaccaccaatcgtgggcaccgaagccgcttgcaggggcatcagtgccaccatcgtcgccccaagcatagccaagggcgccatcacagcgacaatcgcgcctgcggccacatcccatctcatgagttacttcccccatggcgcctgcgccaccacggacacccccatcacaggcgatcacaggctcacagcagcgactcgcgggggcgccgccgccgcagcgatcgaccagctgggtcggagccatcagccctccaccgaatccgaggtcacccctccagctgacgcgtaagcacggttactccggtaaacggcggctccggtggagatcatcaaacagttgtggatgcccttctctcgcatatagcaggttggcgtatccgacaacggaggagcgggctagggtttgggggtttagggaatgcgggtgcggggacgatgtggggtaggtgaggtacacattcccctaggtcgtcgcgcccgccggtcaccgtctttggctccggtcgccgtggaagggtgggagcggcgaccggcgaggcggcgcggtggccgtcggcaagagcgcgaggcggcggcggcgtgaacgaaggatgcggcgtatgacgtgtcacgtgcggcggtggagtagccaggagagtttagtggacttagaatgatgggcctaaactaaactgcaagtgtgtttggcctgtttgttgaggcccatctagaggagatctccacgtgggaatccgttccggctcaagtagttacgcccaaggttggcaaggttggcagtaccctgattcgtattagtatcttacgatactacgatcctatcaagccgaaacaataccgatcccacctagtatcttatcctactattcattactacacgatcatacgaaatcttaggtagtatcccgattctacgatccctacgatactacaaaatattattttaaataacatggtttgaaaataatgtaactaaatatgctcaaatttatataaaaatcagttaaatatatcaaaaccaacgtggtttctcttgataaatatctctatttacatgatatatatcattactatatttttttatacaaaatggctatatataattaacataaatattaattaaacttaaaaaaaatctcttagtatcccgatactacgatacgatcctacgatatgacattactttgagcaaaacgatactgtctagtatctcgattctgacaaccttggttacgcccatatatctgctcccaaagtttgccggatcgagttatcacggttgtgcagtgcagctcagatcgagtgaaagaacgcaatgctggagtgttttcactgagaaattctatctctcgacctctgaatagtaagctccaaagtcatcgaatgtaacccagtatcttctaattgcttgtttttaatatgtaaatcgagttgccagttgccaccaaggtttatcttcccgtttcagaggtgaaaaccactctttgacgaaaacgggtgaagactgattactttcagtcaacttgctaaatcgatccgtcttttgtaaaccgaccattagcaatttcatggaaaatgggtcgtttttgttaacccggttttcacactcgcactggtggtagtgtatttcttcttccgttatccactctctccaattaatccatatctgttttgttgggaggtaactccgggctcggatgtccaatgttcggagaaaaatcggacactgacgtcagcatgacgtcagcgcccgatttacgtgaaaaactagtttaaactgatttttctcttaaattacttatccaaatcatgattcgattgcaccattaaattcgttgcaattaaatcttcaaaacaagaccacacatggatatattccgatgaaattttttttagcttattattaaattatttttaaatgttgcacgatgtttcaccatgtatatcggaattgtttcactaaatatatcgaaaatgtttcactcgtttaaatcgggtgttatttcaccttatataaaaataatgtttcagcaaatagcgaaataatgtttcagttcactgcaacatttgatccattcatagtgaaacattataagtacactaggtgaaatattttttttggaacaaaaaatgaaacgaattcccttaacagggggtttccaaaatatgtgcgtttttttgttgcaatggaatatttcagttcactacatcattagatctatacatagtgaaatattgtgagtacactagatgaaacattttttgtggaacaaaaaataaaccaaattcccttaatagggggttttcaaaatatgtgggtgatttgtcacaacggcacgttccataatatcaaaatccactgcaacatttgatccgtacatagtgaaacatcgtaaagctactggttgaaacatcgaaacagataatatgcaatattcaaaaaaaaaatcaatagagaagctaaaatatttttttgtcgaaatataatcatgtgtggtcttgttgtaaagatttaattgcaacgaatataacggtgtgattggatcgtagattggataattaatttaagagaaaaatcgttttaaaggcgcaggcgtccgaggcgtccgatttttccttctaacgtcggacgcccggcgcgcagcatttaccgttttgttggatcaactgcatggctgtgcactcctatcgctcctacagtgtaagtgcgtgctatttattttgcaaaatctcagaaaaatgacagtgcaagagataagctaaaactgaatatcacatcgatcgactcgagtccttgacgcgcgctgaaaccgaatgatgttcagtgttgcaaattggtggctgcatgaaatttggtttgccgcatttttttagtcccatcgtattatatcgacattgttaggtaaaagaaagttttcgatgatttgatcgctcaatttaattatctcctgtttctcagctagactatgggatgctgacactgtttgcaatgaacgtccatgataataagagattagtgttcgatcggtggtcatttcaacttttccaaagtcatattggcaccatcattattcggttagctaaagtgcagtgtcgaaatcatcactctcattccgtctaaacaaacgtcagttcattttgatcaaatcttttagcatatgtttagtttggggactacgtgggatgggatgataccatccctagttttagggatggagtaatcccatttacttgtttgatttattggatggaatgatctcaattttttgtttggtagaagggatggatagggatgggatgaatgacatatggagtcacgttgcaccacgttagtgagaaaatgtgtcgcagctcgcaactcgcggaggaagtagagtggcagaaggatgagcggcgactagtggcgcaggcggaatgaggaggggcgaccggcggcgcgggcggaaggaggagcggctaccatcggcgcgggcggaaggaggagcgagtcagaggcaacgacgatgcggaagtggtggccggagcactcacccttgcccgccatcactgtcgccgccatcggagccctccacaccgccgcagccctcctcgctaccagattcgctaccaccgccctccccgcctccggattcgccaccgccgccatccccgcctccggattcgccaccgatgacgagccctccccgccctccctgccttcagattcactgccgccaccctccccaccaccggatctgccgccatcgtcatcactcacgatgggtggaggagcaagatgcgagtgagaggggcgagcgagtggcgtgcgacggtgcgagcgaacgagcgtggcgaagcggcgcgcctcacgccgtgcgctcgtcccaggtgggacgagctcgtccacgagatttttccggatggcttggttccggatctgagaggaatattcctgtccaggaaccaacccatcccactcacccctaaaccaaacacctttaaaagtgggttcgtcccatcccatcacatcctatcccaccaaccaaacactaccttaaagaaacatcagtgacatctccatcactccatcagcgagtccatgccagattgccaggtgcccggtactccggtagggtcagggcggatagctagggcttgagctctaggcctacctttaaattattgtttaaattttattaaaataccgtgtaatttttataaaggaaaatcaatgctccattagttaagttatatcttagctatagccttcaaaaaatttttgacttcgtcacttataaggtggatgttgtgagctcgtcatcagatcgtccacggcggatggcgtgactggagttggcatcctaccaacctgcacagctgaactgcacgagaacctcgcctgattgttcttcaccttctcatcaccgtgcagtttcacctgtagtaacatcagtaaataaattattcaccataggctgttcatctcaacaagttgtccgtgcaatgcagccgagagtaggcaaaataaaaaaaaaagaaaaaaaagagagagagggtaatttggcctttgggtcatcgcacacgatccgaggcttccccccatccacggctgccggtttttaacctcacctactccgcgcgcgccgtcacgcatgtgattttcgcaacatttcctcgccgttacccgcataatttcctcgagccgccgagcccggtggaaccgggtgtgaagtggaagcccagcgaccgaagccgaggaggcgacgcactcgtctcgacgcaacggcgggtgcggtgccttgtgcgccgtgacagcgacattctttacctgcccaaccccaaccccaaccctctcctctccgcccacgcctcgccctcgcgctctcgctctcgctctcgctcgcgcacatcacatgcgcctcctcccgttataaggagagccccgcgccattggccgccccactcaccctgccatggacgggtagaaaggtacagtggcggcgccgacacgcggtggaggaggaggcggcggcggcggcggcgatggggctgctgtcgaacagggtggagcggtcggagatcaggccgggggatcacatctacacatggagggcggtgtacgcctactcccaccacggtacgcgcgcgcccaccccctccatcctcttcctcctcggatgccatcccggttgcttgaattgttgtcgccactcgccaatggtggcggcggcggcggttgcgggtttaggtttgggaactaatccggcggcggctctgtggctctcctcctccggcgctgcttcgaattttctcgtgcgattgacgtctgatcaatggttgttgacttgaccgggaaattctggctcggcgagtcaacgggggatttttttcccccttttttttggtctgtgcggctactggatcggaaatttcactgcgattgctgggtcaggaacaaatgcgatcgaaattgcctagttggactggaaattttgttcggccggctcaatggggggaacatttgcgatctgaattttcgagttggggttgtctcttgcttagttcatcggtaactgaagggcgtgtcttcgtctcagttttccattctgtcggatttgggatttctttcgcctcatacttcctgcgtgatgttctcttctcgagcaaacccctctgcttgaagtacggatcacgtggttggttggacaagtgcgtcaatcatccaactctctgattgagtgattgttcagacttttaactgtttacagattcgtagtagaactcagcagtaacacgcaaatcatcgtgcatttgtactatcttcagttcataattaattctgtaggtgtagagttgacaacattagtatggtagaatgatggctgtaaaatagtggcaaaatgggtacatgcatgaaaaagatcgattcaatgtttctacttctctgtgtgggttatgcgtagaattgagggttcaactgaattgcccaaactctatccggaaatccttccagatggatctgacgccacatgctgtgtttgttgcttcccatgtagaacaaatggcacttgttgctgctcacctactgctgaccaacttgtctgtttgtatctgtgctttttttatctccgtgtggaaattagcctcttgtttttttataggaatccctcttgttaattcaaggttgctcgcaataaaataagtactgtaaggttggttctataatgtactgaacctgacaaatgacttgtttagtacactattgtactattagtgattcagtagctgaaaactcaagtcaccatagtatcctatgataagttgataactactttgattaacagttgatgtcaaacttatctacgtggctacgttcattttttatccttaccttcaggtgtatttaccacagtaattttgctatgcatctttgttcttttacagcagaggtctttcatctccattcagttcaggtgtatttaccatgggtattttgcaatgcatctcttttcttttacagtagaggtctttcatctccattcaggaagcgtaaaggacacttctgctctgtgttgctatgcactctgtagttctcctaaatggacagtatgtcccctcaagtgcattttattggcggatgtagagctccttttattgtagtggtcctgtgtggacatttgatcagggccacatctagggaggacatgctgtgggttttgctgtttttgcacatgacagcctggatgaaagggctgcaatatacaagaaaaactgtcttgtctgcattcaactccttaaaacactattttcaccatcaaggtgcatttttcatgcatcgataaagggattgacaggttaacagcatgccgattcattcagttatcatctagtgtttttttaaccttttgggatgataactatcatccagtggatttaattgttcaccttaaactttatagccttggtgttcccttaattgcatattctttgaaatgttttcaagaacttactcttctgttggtcatgttctactggcaaacaggcatttatgttggaggaagtaaagtggttcattttactcgaaagaaagaagcagaaggatcagattcatccaattccacctccagcctattattagagccttcatcagagtgcccaacgttcccagattgtgggtttcagctgcctgatagtggtgtcgtcctcacctgcttggattgcttccttcggaatggctctctatactgcttcgagtacggagtgccatcagccgttttccttgcaaagctgcgtgggggaacctgcaccattgcccaatcagatccatcagaagttgtggtacacagagccatgtacttacttcaaaatggctttggaaattatgacatatttgagaacaattgcgaggactttgcactctactgcaaaactgggcttcttcctgttgaggaacctggcattggaacaagtgggcaagcatcttccgccattggagtgccattggcagctcttctgtccactccacttaagctttttgctgctggtccacttggaatggccactgtcacagctgggatgtactgtgctggtagatacatcactgacataggagtaagaaaggatgtggcgaaaattgaagtggagaatttatcatcacaccttggtagacgcctgattgaagatgaaggatcagtgaacgtacggtcagagaaaccgaaaaccttgctgcctatgaagagaaagcgtgagaggtgatggcgactatataccgctcttcgtcgataattggttcagaactgtgcataatttaaactttactcttcgccataataagtttgatatagatatgtacctctgaagcgtgttctgattcagttaagaccacacttcacatgatcaattgagctacattccaaactgaatatgtgatggaaatgtgataattgaatcgttggagtcaaaagtagatacttactgttctttgaatatgatacctcacattctagtgcttttattttctgtttattttcttttatcaatattttttcttactggtcacaatataatgtaataagtttcagtagtggtgaagacttcttttgtatgggctgttttctctatgatgaaatccatagactgaatagtgcagagagacaaggcagactgtcggcatggcattgtttgctttcattttcatcaggtataatgtaccggtagatcctccctccaaacctgatcattgtaaaatgacagcttgtcaggactccaccatatgtatccatccaaggaaacttcgtacctttctgcatgtgggagagatctgcaaagatgcatatgcttttctctgggaattatcacactcgcatagcctttttaccattctctttgcgctcagcctttaatcattggattgatctggtagaccccatgatcagttacctttctcctgttttccatttgacattgtcctggatggttggatcaaaaggatggccacattgtatattcagatctgggtatggactgagacagaaaagaagtaaccagtggccattgctgggaccattgttgcattctagttgtactctctccgtttcatatcataagcgctttgacttttttttaagtcaaacttctttagatttgataaaatttataaaaaaatgcatactatcattttcaacataacacaaacatattatcaaaatatatccaatgttagattcaatgaactaattttggtgttttagatgctgctattttttttaatatataaacttgatcaaacttataaaagttaaactaagaaaaaaagtgaacacctaatttctggtacatcatctgcgaacaactgaacggagctaccatttcgatgcatcagcagcacgccagcacagcacaggaaatgaaaccatttctacgacttcagtaatcaacacttcagcagcggataaaaaactttagttctaccgggatgtactgtgtgcgcgcacgtacgtaacgtatgcttcctgaaagcatcactatgtgccggtcgcaaagcaggcgcagcgacggcgagcaatggcaagcttgatcggcaacgccggcgacggcggacggtggagacgccggcaaaaaaaaaagttagatgataaaagggctttacggcccatcaacatctcactggatgcacgttccagcccactaagaaagacagataaaagggctttacggcccatttgtcatccctggatgcacgttccagcccattaagaaacacagggaaagggcatgatagtaagttgttattacggcccacgtcatctcgctggcggtattttacggccattaaaaaaagcatcacagagaatcatcccatttaaaggcatcaaggaagtttgttctgattttgcatatcttctgcattgatagggaatcagttttcgtgtctatccaattattgttgggcatcaaaaccgtcaccttgcaattggtagtttttgtacctttgcttatctgcgattaaggtggtgttcggatccagggacttaactttagtctctatatttagacactaatttagagtattaaatatagactacttacaaaactaattatataaatgaaagctaatttgcgagacaatttttaaacctaattaatctataattagagaatatttactgtagcatcacataggctaattatagattaattaggctcaatagattcgtctcgtgaattagtctaagattatagatatgttttattaatagtctacgtttaatatttataatcagtgtctaaacatccgatgtgatagggacttataagttttagtccgatctaaatagggtctaagtcttggaatggtcaagtagccaaccatgatagaggaagagagaaaaaaaaaaggagcaagaatgtgatgccaggcattaaactatcgctgtggttgtttcttatactccacggctttctgaaatctgcacagtggggagtaaagcccaccttccttttgctctttgccttgctgtagcgctcctgtaggtttgcctatttataagccgaaaacaggagaacaaaacaatgaaaatatttttatggcaaaggcttttgtacacatggtttcaaggcaaaagctcagtattgaaagcgacaaaagaatctgtctaaattaaactctaaatcaaatttagttgcatcataagccacggttttaagaccaggtttgagaaactaccgacagaagatgccaaagaaacttacattatcactcaaatctgtggttataaatcttagaaaaaataataaactagaaaccaaaaaccaagaaaaaccagctattttaggattctcataaatgtctcggaatctcgatctcgctggccccgacaatgaccatccgttttgcgttatgtaatcaaaactctgatttcttataatataatgatgtccaattctttagtttgttcgcgaaaaaaaaaatcgatctccccggcccaggcctaaattgacccctttatcggaacacatatcctaatgacgtcatcaagcgacgtgcactctaaacaccatggataaacttatttggataaacttatccaaatacaaatgacatggacacgcaattatccttcgatcatactaccgcctactcgcagaataccgtgatcacgcacgcacgcacaagatacagtatatctcaccgtcagttagcccccggattctcactcatccccttccgtattaatctccgttgggatccgacggcgatgcgtgcactgccgatcgggcggacgcgccgatgcaaccggccattaccattgcagctgacacggctcgcgcgcgcgccgcgggatattccagcgttgatacgggtcaaaaagggcacgggcgcacggcagctgacacgggaactcgccgcgatccccgccgttttattttccaaaccagcacgcgatccatccatccacccggctccccacacacgagaaaaaacggacgccgccaccgccccgcaccgcgcgtgatccgtcacggtgcggtttccctttcccatataaatcccccccgcgtccgctgcgaactactaaaccgagagagagaggcgcacacacgaagacgaggcggcgatggtgagcggcggaggagtagcggcggagaacggcgagatggtggggaacggggaggggaggaagggtgcgggggcgagcgtgctggtgacggggggagcggggtacatcgggacgcacacggtgctgcggctgctggagaaggggttcgcggtcaccgtcgtcgacaacttccacaactccgtcccggaggcgctcgaccgcgtccgcctcatcgccggcgccgccctctccgcccgcctcgacttcatcgccgtacgtgactcacccaaacagcacgcgtgttcttcgtcttgcacagttgaattgaaccgagccggcgaggttgagattgagattcatgtttgtgttcgttttcagggggatctcaagagcaaggacgacatggagaaggtgttcgccgccaagaggtccggattggatcgttttgcttcgatcaaacaagccatctaactcaaatcctttttgattttgatctcaactcgttcgtttccacacgtaatcaaacgcgtcgtcgtcgtcgtcgtcgtccattgatcgatcaggtatgacgccgtgatccatttcccgggcnntngaggcggtggggagagcgtcgcgcacccgcagatgtactacgagaacaacgtcgccggcaccatgaacctctactccgccatgaccaagtacggctgcaagaaggtcagtactatacatctacacgatcacctgattgattccattccgatgcatgcttcgatcactgaaatcaacaaacctacgcgcagatagtgttctcgtcgtcggcgacggtgtacggccagccggagaagaccccctgcgtcgaggattccaagctgagcgctctcaacccatacggcaccaccaaggtataagacatgatcgcatccattgctcgtgataagcatgcacccgtcacgcgccattcggattcgcttcgccgattcggtgattacgatgccgaattgcgatggcgatgatcacaccattgcttttttgctatgcaagcattgtttctaacggcatcgaattcgattctctcgttggggcagctcgtcctggagaactacttccggcaggtgcaggccgccgacccggagatgagggtgatcctgctcaggtacttcaaccccatcggcgctcaccggagcggcgacatcggggaggaccccaggggcatccccaacaaccttcttccgtacatccagcaggtcgccgtcggccgccgccccgagctcaacgtctacggcgtcgactacccaaccagggacggcaccgcggtgagcactacactgttcaagatcaatttgtatggatgagatcgtggagcgaagcaaaattttgacaatttgatatatcgtcctcagatcagggattacatacatgtagtggaccttgccgatggccacattgccgcactggagaagctcttcgctactcctgacattggtacatcaatcgatgctacaaacacacatgttcttcactccataaactggttgatgtttgacaagtttaattcatccatgatgtataatttctttattttcttctgtcaggttgtgtggcttacaatctaggaacagggtgtggaacaacggtgctcgaggtggtgaaggcgttcgaggaggcgtccggaaaggtgactgatgtagtattatttatgcatccatgtgtgcatggttgatattcgcctcatctgaaatcccaatctgaaaatgtggtcgaaactgacgtttctggctgtgaaaccacagaaaattcctatcaagatttgccccagaagacctggagattgcactgaggtttacgcttccactgacaaggccaagaaggagctcggatggaggtaatttattctctgattcgctacagaacgatcacacaaatctgtctgtccatttttccagctcactgttcaactgacagttatagtttgtgcttatgatagagatgctgattgttttatgcttgtgctgattgcagtgctcggtttggaatagaggacatgtgcagggaccagtggaattgggccaagaagaatccgtacggatacagcgccaatgctgagcagaattagggcgatcatattaccacttatatagtactagtatcaaaattgtccatggtcttatgaactgtgtgactagaaaatgttaataagacatgcgtgcctcttaagtggagtataccaattcttatttagtcgaatccgttgtgattttagatactggcaaatgttaatcaggtttatttaaatactatactagtagcaagatcaaattgaacaatagttcactggctcgtttttggattggattggactgtgccgccctaagctgggctagatttattctatactgccaggagcatactaattagtttggcccatgggccacggtatgttgtctgcttaatagtattgactgctcaagtgctcagtttcctaatccatttgacaaagccacaaatccatgaaagatgaaacacaatcaggggtggaggcaggcctaacgcagataaggcttgagccataagctgaccttcacaatcaaagtttattttttttaaatcatcatgtaaattttacaaaaaaaaaaatcaacagtccatcaatcgagccctaccctagcctttagtaatttctagccacgcaattgtgtctaatgctacatgatttggtactcaaatacgaaaagtgttgcccaaatcattaaaatcatcgcaaaggaatgcaaaatttggctagtgtgtactataaaagtgtcaatggttactaaatatagacatcatcctggcaaacaatgagaaacgtactaacaaacgggatttgttctccattgttagttttgtatcagaaacgtactaacaaacgggaaacattggtcctccattgtcaattttgtatgcacagtacacttgcagcttttggaaatagaagtgtaaagaaagatctgaagggatataaataaccaaacaacttttgtcatctcattggcattttcaagttctaggtgaaacatttgtcttcaccccagtccgattgtccaacaacctttttgtctttaaacattagctagcacaatccatgcaactatattaccttgtttctatccaaattgagcaaatctactatattaataagtaatttctccatactgctcattaacacatatttctcgaattttcgttcgtgtgtataccaatatcaccattcgtcgccgctacacttggtaaatatcaccgcaactacaaatttcccctaatattgcttaacgccccgaatctgtcaatagcacgaacaaatcaggcttggctagaaggagtatcattcatgcacaagtgagatgcaaaaggataagggtcttgtttggatccggagggctaataattagtcctctgaaatcttgctatttagtagtctatattaataagttaatttctccatacggctcattaacacatatttctcgaattttcattcctgtgtataccaatatcaccattcgtcgccgctacacctggtaaatatcaccacagctacaaatttcccctaatattgcttaacacctcgaatatatcaatagcatgaacaaatcaggcttggctagaatgagttttgtcggtaatctacgtttggatccggagggctaataattagccctctggaatcttactatttaggagtattaaacatagattaccgacaaaactcattccataacccctaggctaatttgcaagacgaatctgatgagcctaattaatccatgattcgctacagtaatcattcactaatcatagattaatatacctcgttatatttatcttatgaattagcctaggggttctgtaagtagttttgcacatatactctattaaatactctaaatagcaagattttagagagctaattattatccctctggaactaaacaaggccaaggtacgttacgaaaatgtaggaacgtggggacataactctcacaatagttgaacaagctgcattctactttccatttttggagaaaagacttggtggcttactttccattttgacaactttactactcccttcttttctaaatgtttgacgccgttgactttttttaacatgtgtgaccgtttgtcttattcaaaaacttttgtgaaatgtgtaaaactatatgtatacataaaagtatatttaacaataaataaaataataggaaaagaattaataattacttaaattttttgaataagacgaacggtcaaacattttttaaaaagtcaacagcgtcaaactttttgagatggagggagtatctttttactcctgactccccgatgctagctttggacatggagggagtactaaagtggttaagtttagcatcactttgattaaagacaatagtactctcgtatcatctagttgtaaacctaacttcagaaagcaatgtttggcctaaagcaaaaaatatgtggattaaaaattgtacacgcgtgtccttgacgatttaaaagatcacattgaaaaataaactacaataaccccctccctcctctaaaaaaataactctaattgttttgaatggaaaattaactctaaaactatgtttgaaaatttatttatttattggctaacacttataagccgaaaggcaactgatggccacattcctcttttttatattgttcataggttaccaacccatttggccatgcacagatatgctaagctcaaaccataattgcccagggcttgttatctaacaccagtggtgctaattgtttgctccaagttgatttgcatccgacatggtttgaaggggaaataaatgctcagatggatgcttcaaatgaaatttcaaagagggagaaacgtccaggggtcttccggttagctccataaggtggtgggctagacggcctgggttcgaagtccccttctaattatttaatattagatcattccctaatattcatgtttttttaaaaaaaattcaaagagaaatgctttgttgaatttgttgaaagaataactgaagatcccccccgaaaaaaagaataattgaaggaagaatttatgtacaacatccgtcccaaaataattgtaatccaaattgtttagtaaatattaaggggtctgttcgctgcagctaaattgtagttgttgtgtagctgcgctacagtgcatgatagagaaaatatatgcactggctgtacagcgcagccagttacagctgcatagcagcgttgccgaacagagccaaggtttgagaagaaagactgtaatgccccttattaaatggtatatatagatgagatagataggagtggaagggtagttgagggtaaagtagagagaagtgatcaatgggaccattagtactctactgtgacaattattttggaacaaatttaagtcctttaaatacaattattatgggacaaagttagcagttaagttgtgcatgctcaaacatctttcttggtttgtcaccatgcaaacttatatgcaaacttatgtttagggatgcaagcggggcaggcaagcttttttttagcctgcttatctcatttatacttcattttttcttctaaattttgtattaccatgtggaaaatgaactcgcaagcgaatttttatgcggatagcgggactacccacttgcatccctacttatatttggcgaatgacctagctttgcaagtagggagtaatttatccaatgatcaaccggtgatacaaatgtgagaaaaagacacagttgtcattattagtatcgtcttgattgtcatcttttacaaagaaggctttttggacactacctccttttctaagtaataagccatatgtagtaccactatactaagattcagtccttcaacccatagtagaaaaaactagaaccagaggtgaccacggttcggtttcctttaaagaccggacatgtaatcgaactgctctgaaccggctgaaccggcggtttttcggcgaaccggacactaaaccggcactggttggaccggctagccatactaatgggccacgatgggctgtctaaaggcccaatggtgcagctagtggttttttttttagcaaaaatagcaagaaatggtgcactgggtgggattcgaaccctctggtccgggggttgaaagagccaagtgctagccatcaggccatccaacgacatgtgtacatgagcaaatatgtaatatacatgtagtttgtgaaccgcagttcaaccgcctgggtcaccggtcggaccgacggaccgctgaaccgagaggtcggctgggtcacccaccggtccggctttttttactatgcttcagcctccttctaatttcatagtttcattgaattaaaaggtaacctcccccctcaacaatttagtttaagtttcaattaacttcatttataaatgaactagtaactcctttgataagtactactcctatcaagcattggtcccctcctcttgtttaagtccattccaattaaaccttgtgcatctcttgaaaaaaaagagaagaaaaccggactttttttctcctctggcagataagcatttaggcccccatcgtttggcttacttcctaataagccaataggaaataaaaataaatttgtagctaaaacttttataaatatgttcttggtgacttaaaagctaatgttgaaaaagaaactacattgaaaatatatcaaaatcaatctcaaaattaagcttgaaaatttaaaatttggctttttctttagctgattaggctatccaatgtgagccttactctctagaagccgattgaaagaaaaagaaccttccaaaaggacgacaaacaaaaacgcacaaataccaaagtactccagtacagtgtatacatacacgaaataaaaaaaaaggccacgtcgtatcgtagacgagataaaatcttatcccactcgccatccgtggccgagcaatcgacacgtgtcccgtctaccgtgggccccatccagccccgcccgcgcgcctacctgaaccttccagaaggccgaagcgcgaaaaatcgaccgaaccttctcgccccttccgacccccaattgccccatccccatcccatcatccccccgccgagaacccaatcccgcggcctcgcctcatcctggccatccgtgccacctcggtgggttccgatacaacggcgtggatgcgcccgccgcgggggcgagagatatctatcactgcggccgggcccacctgcaccgccggcgccagcttggctttctcggtacgagtggtgggtcgcatcgaattcataggccatgttttagttccacacaacctatcacatcgaacgctaaaacacctatataaaatagtattaaatataagcttaaaaaaaaactaattacataggttgtgactaatttatgagataaatcttttaaatctaattgctccataatttgataacgtgacactacagtaaatatttgctaataacaaattaattaggcttaataaatttgtctctctatttacttatagattctgtaattaattttttattagtacccaaacgtacagtcaacgatataatacccgatatacacgaaaaaacaaaactttacacaactgaatcttaacacccacatacgtgcgttttctctttaaaatcgttttttctttttggtgctttttttccctcttttttatttgtttctctcttgctttgcttctcctcctcccgttggagtataaattttcctaatccgcaaacgaagtttccagaagacttccggtccgtaccttcgttttcacacgcgaaaactgcctttcttccggcatctggaagctactactactacggtcggtcctcgccggatcagatccggccgcctccccggcggatggcggagcagggggcgggcgaggcggatgcgggcggcggggagccgccgccggcggcggtgatgacggcggcggcggaggcgttggcggggcagaggtcgctgccgacgccgttcctgacgaagacgtaccagctggtggaggacccggcggtggacgacgtgatctcgtggaacgaggacgggtcgacgttcgtggtgtggcggccggcggagttcgcgcgggacctcctccccaagtacttcaagcacaacaacttctccagcttcgtgcgccagctcaacacctatgtacgcgcccccgggattattcctcctcctcgtcgtcgtcgtttgcttgggatttagcttggtttggtttggccatgtcggtgatgtgtctggattttgcttgcttgctgtatgacgtagggatttaggaagatcgtgccggaccggtgggagttcgccaacgactgcttccggcgaggggagaagcgtttgttgtgtgatatacaccgccggaaggtggtggcggcggctgccgcggcgccgccgccgccgtcgccggggatggcgacggcagctgccgcggtggcttcgggagctgtgacggtggccgcggcgccgatacctatggcgctgccggtgacgcgggcgggctcgccggcgcactcctcggaggagcaggtgctgtcgtcaaactctgggtcgggggaggagcaccggcaagcgtctgggtccggctctgcgcccggcggcggcggcggcggctccgcgtccggcggcgacatgggcgaggagaacgagcggctccggcgggagaacgcgcggctgacgcgggagctcggccacatgaagaagctctgtaacaacatcctcctcctcatgtccaagtacgccgccacccagcacgtggagggctccgcggggatatcctccatagcgaactgctccggcgagtcgtcggaggccgttcccccgccgccgcctctccccccggcgatactcgatctaatgccctcgtgccccgccctggccaccgccgccgccgctgcggggctcgccatagacggcgagcccgacccgagcgcgcggctgttcggcgtctccatcggcctgaagcggacgcgagacgacgccgccgccgccgccgacgaagacggcggcggcgaggatcaggccgagcacggcggcgcggacgtgaagccggaggcggcggatccgcatcccgccggcggcggcggcggaagcagcacggaggcgtcgccggagtcgcacccgtggcccatataccggccaacccccatgtaccacgcggtcaggcccacttgcaacgggccggacagggccgggtccgaccaagacgggtccagctccaggtgagttggcccccccaaccctgtagaagcttctagacccctatattacttaattgcccctcccctacactattataagcaactaattatgattagtacgtaattagcggcgaaataataattactaccactagtagtactagatgctcttttgcttcttggcgaggaagaacagatgagagctcaccttgtctctcgatcgatcgccttgtaatccgtctgcctctttctcttgattgtgttgttgtaaatcatcagcgtaagatccatcaggatgccggtaaggcggtaattgcaacctgggtttaccagtgtattggctgcctgctgcggaaatgagaagtgcatttccttgatggtgtggtgtttattaagttgctcacctcaaactgttgttttcttaggtgcacagtttggtcagttttacaagtgttttaggtgttagtgccaaaaatggtggtgacatagggcggaagcactagcatatgttttgtactagatgtatgtattaggtttgatgctagaaatagtggcgatatatactcccccttctttctcctgtcactattcaagttcctttttagcaatttttttagttctttatttacccaacacagtttgattacaatccatatgagtaaacacattagaaatcatccaagggctaacactgaaatcatccaatagcactagcatgcatgttttatactacttgcatgtataagttttgctgctagaaatagttgtgaaatttaggggttattcggatgctagtgggtagccgcagtcaacacgaacaatgcagcaagctgccctcgcctgccgaatagccccgtagagtagaaagcctcaattaaccgtgattttgttttagagaagggatcatattagtacaacttttggaaaaagtccataaccaaacaaaggccttccaaacaattagccgtgatttgcatggttggctcctggaaatggaatcgtgtgttcacagaatccactaatcaagttatcatctccaaacgccgcgtgtagaagttgagtcaattcttaattttgaccgactgggtcgtcgaccacagagggtcgtgtcgaacacacgtagtgaaccacatagcgctagatttggctgtcaggcaaattaatcatgtcaatcctaggggggggggggggtccatgcagagagggattgattactcacaatttcgtatattttctggcttagccaacgttaggcagcggacgtcatcgccactagaaggcactggatgcccttttgttccccatttttcttcttccaagctactcgtattttgtactacatggcatcagacagcgacgcatcgtcgaatggctgtaggtcaggtaagcacggcccggcctattttttccccctctgttttcgatcgatctttcttgctgcgtttcttcaacgagtagtactccgtactaataattttgtccacgacattgccacgtcgaggcgtcagagatgttgcgtaaactagtgggttcttacatgtgttgcccatatcacggagtattcacgtttgcctcgtcctacatgtgtcttaaaattgttgaacatcccaacacgaaacttgttacactttctcacatctaaaataaaagaaactaaagattgattcacgtaatttcgtactctccattctacaatataaagatgaaggtagtattggtatcaaaatgtatgtttccacgacatacccacccatatttgaccatagccaggcaaggatgggaaacggcggtaaaggcaggtgtatgtcattctggtcggttccatgtcattctaggagagatggtcaacctcattttttcgcttatacttattcttagtagtcaaaatttaaattttcaaccttaaatttggagttgattttgagatattttcatcaaagtttatttttcagcctttgcttttagatcgttaagaacacacatataaaagttttattcacaaattatttttcgtttgcaaatatgcctgaataagccaaacgatgggacctggtgaattcgacgatctgcaaaagatgatggtggtgcaacagagcaacttcgtgatgcactggggacgctcggaatgcggtagtggcgtaaggggttttggatggtgatggcagacaacagcaaatggtgttgtgatccacggaggcggagatggtgcggtgatgggtagctgggactagttccaattctccctttccatcctctcgggttgcggcggaaagttcaagtcatcgttgaaggtttaaagctaactcttcaagctttgtgtgtgtgttggtgtgtttgtgtgttttcctctgcatgaggattggagtctaagaacttgtatgttatggttgtgtgatatagaggctagattaataaaaaaaattcattatctaaaaaaaataagttgagatgctaacttcactatttagaaccgatcttggtaatttctaactatgtgcattaatgtacataaaatttcaaaaagctgcaactattttatcaaaataataatatgctacagctttagctaagtatttcaaaaataaatcaccataatatcatatgattttaccagaaaggtacaactttatatcacagacaagtgtgatccacatgtcatacccatgtgaaggataaaattactgttcttttaattttttttctttgcttttctttttgcagttttcttaaatacctagttaaaaatatcaacgttttcacaatgaagtcattattgatgagtaatttttttaaaaaaaggggtttactgcaagctaatcacttcctttgctaatatgtggcctactttggtatctgcacagagaaaagagcatgacgaaatagagaataacagtacttttttgaaatgatggaaggtgattatttatgtgttggagaaagtgggagaactatactataagaaaccaaacatattcaaactttcctgtgcagatttcatcaaatattgtgtggttagattaattatgaggggattaattttggtgtgtggtggagtgttggtgtaaagtccgctcacaaaaggattctcatcccagggtacactatgaacaggttagcatgaactagctattctatggttgttgatttatccttgactgcttcatcaaatgctcgcgtacttaggtgtgtgtgcatatggacttgagcagagtgtatgatggtgagctgtgcacgcatttgcttttcttttgtagcgaaaaaagttttaatcatgtgtgatgttgtaatggttttattggtttgtatttggttttttgtgttccatcgctaaattttccaaacagctgaatactcaactctagatacttgagacaccaatttgagctgtgaaatcaatactccaccaatccctaaaaaacacaattctaaagatgaatttgaacctacactttcagtattaaactcttttggacagagggagtaataatttagagcaatctgatcagtcaagcatggtttcatatccgagcctgcactctactccactcagtacgaagtacgaacatacagagttacaaacaccgttcaaattcggaggttcaaataggaaccatggaatgatggaaacaatatcagaggtcatctcaagcaaagaaaatcacgtccaaacataagtccacccttcagtgcttttgtttctctcaaaagaaaataaaacttccagtttggcttttccagttatgtttcaaaatataactggggctcctaccgtgcacgcgcggcgataggctaagttgcgtgcgagggcaggaatcaacgggtccgcgtcacgacaaagaaaatcctccacatgtttttctatttttttcatcttttctttttctttcgggataaaacaaactttcaagtcaatattttttgaaacttttaaatcagatttgaaaacttttaagtcatgatttgaaaactttcgactcagatttaaaaactattaattcagatttaaaaatattcatcttaaaattcaaaacttttaactcagatttaaaaactttcatctcaaaattcaaaaactcaactcaagtcttaaaagctttcaattcaaattcaaaactttcaactgaaatttaagatgaaatattcaacttcgaaaattaaaaaattgtgaaaaaatggcaaaaagaaacaaaaatgacgcgtggaagttagcttttccaaaaaaaaaaaaaagaatgcacgtacgtggacgccattaaaaacatgcatgcacttaggctaagcgtgggccttatgggcctaaaacgcacgtcaccaacgcgcgcgaattagcttctctcaaatatacctttaagtgaattgaatactaaatatattctaaaattacgaatctaggcaaaatttccaaattcatagttctaaagtatgttctatccacatttaaaaattgctactccctccttccaaaagtctaagtcctatttctttttcaccaagattaaggtgtagttaactcatttatcatgtaacaaaatcaatgaacatgtaatcaataagtattaaaatgacttcttgagttttgataaaaaatttaatatagcatatagtgactacaaatacaacttagacttttgaaaaaaaataaagaatgaaatatgatttagatttttggaatgaagaattatattttaagacggataagccagctctgaaagtgtgtcatgtattctgcgaaacattccgtccaatggtggaagacacacgcatgacgcatgccggtcaacacggggtaaaagggttaattaaccacgccccacgaccaccacgacgataaaagttaaactacttggtactcaaaaactaccaaaaaccggcgactcgcaggaaatatcgtccacagttccacacgcgtcttccctgcaaattccgcccaaatttcactcgaattccaccacttatacgtttatactatttttacatgtgacccgaaccccgaatactcatcaacacgtcttacccatttactcgtatatttccaaaccagccacgcgctaatcttccatgaatatatcagatcaaagggcgcgtaaattcgcaacaaatactaccgattttagttcgtctttcaaatttccgattcggtttctaacctctcaagtctcaactcgatataagcagcggtcgccgtgatccgcaccgatcgtgccctaggttttccttccgatccgcaagctcgcaaacgcaacgccgcgtgcaaatggcgtcgaggacgatgacactggaggtgacggtggtgtccgccgaggaggtcgtgctgccgccgacgaggcgcccgctcggccgcggcgcgtacgcggtggtgcgcacggcggcgtcggcgtcgtcgccggcggcggcggtgtgcacgcgcgtcgacgaggaatcgggcggcgactgcaacgggtacccctactggaaggagacgctgcgggtggcgttgccggagggggcgcgctggctggacgtcgagatctgccggaggaggccgaacggccaggtggaggcggtggcggcggcgagcgtccccgtcggcgacttcaccgtcggcccgccgggccacctgcattgcctcagctacaggctgttcgacgcctccgggtgcaggacgcgccgcaacggcatcgtcaacatcaccgtcaggaggacggacgtcaagtacaccgcgccgccgccgccggtgaaagctccggcgtacgccggcgcgagcgggagcggcggctcttgctacggcgtgccgccggcgggcgcagccatgggcttccccgtcggattcacggccaatggcaaggcctgcgcgtagaatggtaaatatcattcagttaggaaaggattaaaccgaaattgggattgggtctcgacattgcaattttttaattgttgataaagattctgatgaattcatcaggaaattgaaacaaattagcacatcagttttttcttttctgcgaggagagcagatcagattttgttcatgtttttcttattcttcatgtgctgaagaaaaaagaaaagcagaatcctgctcaggttgtaaaaaggattacgttgattttttttctacgtggtatttgatttgtttgattgtttaagactaaaacaacgtgtgcttgggaaattgacatgtgattcatcattgtttaaggctttaagcccgtttgacttgactgaatgtttatgcattcagtatagaaatgttaagtgatttcgttgttccgacctgttactttgttacgactctgaccaaattttcgttggagtctatgtcaacatgcacattctcaagtcaatgttaaatgcacacgttagtctgagtactaccgtgtcatttggcctctataattagagcaggaaaaggaacctgaagtttctcttgtaagtacaaaacattttcagtatagcagagtctatacgcgtttacaagtcacaacgcggtcagatgcgttgcagcaaggaacttctgcatgaagctctcactcctatagttttgtttgcctgatcacacacattgacaattgctatcagtagattgcagacttgatgaaaatggtgtctgctgggtaaagacgcaattgatattcactctgaacaagcttggatacactgaagtatgaattctgaaggttccgggtgttcactgttcagagggccatgaattgccgatgaactggtcggtttcactctctgtagttactccggcaaacctgcaggcatccagcagagagcaccttgattgcaaatgcgccagaaattgttgtaccttgggagcaggagaatgtcttcgtcagatgccacgtgctgatggagaacaaatcagaggtaaattagagcaacctcgttcagttgccacagttttagcagagtagcaggggtaaaaattgcagaaattcagaagaggaagatgttttcttttacttgatccagcaattcacacagaattgccatgatgcataggaggcaacaacagacagcagcacaccatattcagaccagaacgacgcaaaacaccacagcgaagaactcaaaagccagcaagacaatgcaaagcctgcaattgcaacgagttgagtgatgagagcttggtcgttttgtattcagtctgaacttactgttgcctgagttaaaagtgatgtgaaatgcactagacataataccaggagaactgtgtctcatcttttgttagaacttgagcttcaacgatgaccctgtagactccacggatccaccatagaaatgtttcagactccagatgatttgtttacttaagctgatgaatacggtaactgcctcattcagagttcagagaattggtctttgctgcaatctagcttccagcagagcacgtcgagcgccgttggcaatcagcaagccggccgccttacgccgcggcgccaccgacaccggcagcatcgtactactacctaccggagccgatcagctgcagtgcgtagtacgatgcagagaacagccgcgtttcttgggatcactcgcgtggtgaactcccaacttttaacaacatcatcagataaactgttaatggtagtttgtcacatgccagtgtcataatcacttaatcagaagaaagtactgaagatacacttgtcactgatgagtgctctctgaccaatgagcgaaattgcgttgaaaatgtgtacaagtacacgccggggacataatcatattctgcttcctattctgcaattcttctgttcttaatcttcacctagtctggcagtactcttgatcttgttcctgttcttcttgtgggacaaagccatgtgcctctttgcttactacttgtatcacccaaggacggggagcaatgtgatcatgatcagctgtccaaagttccgatagggtcatttcgctttcagaagagttccttgtttccttcagtcttggctgcgtgccaccacgagctaccaataatcaatgccagtctacacgctctgactatatgacatgggagatgatgcattatttgcaaggacttgttctgttccatgtccacatttcgctcaccgaattcagacgagcttgactagcaatatgcgccacatacactgcgccctgttctttctgatcctgaatttttagattttcgtttgcacgcttcctaagctgctagactatgtgtttcatacaaaatatttatatgtaagattttcttggcatacttctctaaaacattttttcaactttgtatgaataaattaaaaaatagctaattcatttattgatatcctcaaatggatactacaaatatcagattatccatcaatttcagctatctcgaaagcttatgcttggctgtgatggttgtgaggaaagaaatgtgccaatgctggctatgccaaattgccaagtctggaacgaaccggcaggctttgcttcgcttggcattggctttggcagcgccggcgtaaatgaatgtccgcactccaatacgcatgaatcgggtcaggcagtagctgtcatgttgctccctactggcacaatgggaaactcacattcatggtggccaaccaaatccgttacactttaaataacttccatttcctgaatgttgcaactctgaaacgagtactaggagttgagttgaatggcctcgcttgttttcagttctagtgaaagtttgcaactctgaaacacccaccagtttacgacttcctgaaagcctagttcgagtagtaagtagtaacccaattccttttctttttcgccgggtcggagatggaggaaagccccgaacaattacatgaagaaaatgaggagattgtcacataaaacaacaaacatgaatgttgtggaaacaacccaatcctaagataaggaatgtattttgccggtaaatacctaactacatggcacaactaggataacaaatgggtcttatatctctttgatcatgatgcctgcaaaactagcagcttgccgtgctcaccattcttctggtatgcattaggagacctcggtggcggttttcctcactccttcaaagatcttgttgtttctcttcttccaaatcatctaagggtgagtttgaggaggggattgagaagattggtaagatatgtaaaacgaggtgagccattagcgtataattaattacgtattaactattttaaattttaaaaatggattaatatgaattttgaaagcaactttcctatagaaattttttacaaaaaacgcaccgtttagtagtttaggaagcgtgcgcgtggaatacgatatcctttctcaccctatgtcaccagaacgaacactccctaagtaatcaagatcacttgtgcgttgaagattttctgctatgatttttgtatggcagcctgagaagattgccaccaagtttccatgtcagttggtagatgctctgaatgaattgtaactggctgtggatcatgtcccacacaggtcatgaggagaattttttttttaacgcataagagctttgcatgtcaatatattagcggggggagagaattttgtatgactgtaacctgacatagtggtcatggggatttacacgaggagaaaattaaaaagacgagcaaataatggctgtgctattgctaggcaggctccaaacaagcaaaaaaaggaggaaaaagaaactaaaggtaacccaattcctttttgaatcgatcgtgcaaggttattatgcgaccttgcatggatgatggatggtgcatggccatgagacacggcgtcgatctagcgatcggctttggcgtgtcccgatcgcgccgacgcaagccggacggtatgggagggcaccgccgcaccggggcaacgcgacgcacgagagtcgagagatcgaaagcaaaaacagccgagagatactgcgccgcgccgcgcgcgtccgcccatgcatcccaattatggcgcaaccgcccgcgccaccgccgccgacgtcgcgtcgcgtcgttcgttcggtacgcggtgcgtagcgtacgtacgtcctccgcgccacgcaccgcgcgcgcgcatcacgcgtgtgggcgatcgatcgatcgcgcgcgcgcgcgccgagctgatgggctgatgcgccgcggcgccgggcggcctcctctcctgaccaattcaacacacacacacacacacacacatcccgtagcctcatcgcagttaacgcgcccgtgtcccgccgccgttgcggccggtcgcgccgagaaagtagtggagtacgtgatcgatcggctgccgaattctgataggatcagagtatcagacagacgtcgtcgttcggcgataatccctatgcatgccaagacctgcaggtcggatatacaaacacatatttaaattattaaacgtagattaataataaaataaattacatattccacgtgtaaactgcgagatgaatttattaagcctaattaatccgtcattagcaaatgtttactgtaacatcatattgttaaatatggagcaattagacttaaaagattattatcacaatttatacgcaatctatataattagttatttttttcgtttatatttaatacgccatgcacgtgtccaaatgtttgagtgacaaggtgaaaaaatttgccggaatgtaaacaggtcctgagatcaaagccatcaaacacacattgattctctctgagcaaaagaagcatcttttaatttagatgctgggagttaatagagttcatgaaagccgcgggggcctccccttctattgggnnntgggggggggggggcttctgcaaagattcacgttgggtcaatgtcattcatcagagctgcaatcttaatatataggggcggtagatgcttgcagtagatttttatcaaacttatagtacggttattactagcacagagggatactcatctgtgcacactgtttgttcagttgctcgaagcaaatagtgacctcagtcctactgtacagcgtatgtctttgctagctgctttagtcattacatcatgaacgaaaacataaaaataagacatgaaataaacgcgataactttacaaagcatacaatcaagcaaaaagaaagtgcattctcttgtaggccgcacgcctttcaaatgatgccaagttcatctattcaaatataaaaacgatgggcatgatgtacaaattaattgagacgcacaatttccacatgatttcattactagcttgcatttatgcattccatgcatcgtgttcataatcccaataaattaacatataaaatcgcaagtgttcactgattatattaagttttcgttcgtcataattggtaatcagctcatatatctcttgattgaattccattataaaaaaatcaccttatgttgtttttactcatctgtcctacaaacttgtcgtcctagtgggcattcataactgttaggaattattcgcttataaatatcatacaaaatggctttgatctcagaccctgtttagattcccggcaaaatttttcaccctgtcacatcgaacatttggacacatgcatagtgtattaaatataaacgaaaaaaataactaattacatagattacgtgtgaattgcgagacgaatcttttgagcctaatttacgccatgatttgacaatgtgatgctacagtaaacatttgctaatgacagattaattaggcttaatagattcgtctcgcagtttagaggcggagtctgtaatttgtaatttgttttgttattagtatacgttttatacttcaaatgtgtgtccgtatatctaaaacaaattggcacacgaactaaacacaacctaagctgaaaaggaaggaaggccgaggagagataggccagatagaggtagaggactgctctaggactgagctgaaaaggaaggaaagaatgaatgttcggtctaaaaataagtaagcattcagtccaaaaccaagagagtataatgtataggacaaaaaatgtttttacccattgcaacgcacatgtgttttttctagtaatagaaaaaaataatatattacaaccatgtcgtattgtggttacaatagctgaaaacaaaaatatcccccaaaatgaaaaaagggttgtacatcctgtaatgccgtaagagatgaggttgtacatcctgaaagccaaaaactatcaactaccatattcattcactgaacaaaataacaaaataggtccatcgaacaagttagcaacccagaccttaaagtcaacctcgcagattcgatcatcgatgaactgacaaaacaaacagtactaaatatcctttgaggatcctatgtactccatctagttttgtactccatctagttttgatagtcatattttatcttggcatacagaccaaagataagtaattatacttatcatccatttaaacatgatattattggttattcctcgtaaacaagcgattcattaatatttatatttctcaatgcacatgtagccaatcttatgtagaagagtggagagtcatacattaaatccagaaaaaatcattaagatgataggttgttggattgaaatatatctatcaaaaataaatttttcagatttagaaatatgcatatgaaaagtagatggacggagtacaaaatagactcgaacaaattgaatagatagaaaaaagcacactgaacaaatctaactctatcatgaaagacaaatcataaacatggagtgaatgtaagggttttttcagaggaccttgcggcagctttagtttctctcgaaatcaaaatttgacagatttgcgaccaaaatttatgtcggatgttaaatagcaaatccgataattgaaagcatattgatgtatgcagtcacaagaccaagcaaggagtactagaaagttcagtgatacgaatattggacgaatacctgtttaaatgtagcgagacgatcaacgcctgatatgatcgccactactagatctatatagcgtgcagcggggacatagtcgtcgatcagctgcttcacgcacgcatgcttgtgcgttgctcatcagctatgactacatatgacacacaccgtgtgtccgtgtgtgcattgcgcccatcatactgtccatcccttgcagagtcgtcctagtactcgtatattattacgtcgacgccgtacatggcaagatcagtccatatataggtgctgtacatgccagccagccagccagcccaatggggaaaaaagcggcatatcgtcgcattaatccagcgtccatactccatactactgtacgcgccaggcatgcagccagcatgtcgaccagcacgcaccgaacagttacaccaccacgtcaatgaacgtccaagcaacgcatcccaacaccaccacgttaaccccgcgacgacttcctccgatcgaaccacgcgcgggccacccgaacgaacaagcgaacgaacgagcgatcatccacccgcgcgcgggggcctcgcgatcacgtacccgcgcacggcgcacggttgccaccaccagctaggtagctgcccgtgccgtgccgtgccaccaccccccacccccgcgatcagtcgatcgatcgatcgatcgcccgcgcgcacaccggggccggcatccgcatccatcgtcacggtgggtggcgcaacgcaacgtaacgcgcggggccgtgtgaccgtgcggctgccggcattaaaaacccacccccgttttgccagcgcggccccaccgcaatcgatcggcaagcaaacgcgagccgcctccctcccgcggacgttgcaccagaaaaaggaaaaaaagaaaacgtcccaccccgtttactccgttcccgcgccgcaccgcacaccgcgtccatttactccgctctccctcgatcgcacggaggacgggtcgggcgggcggggggcgcgtttgggccaaaatctgttgcgtctcggcgcggtggcggtggggggaccgtgtacgggcgtttcggggggcgtcggattcaaagccgcgcccgtgagaagtccccgtcgggcacctccaatcccacgcttttttccacggtatcgcccgccacagttctcctcttcctctctctcaccacagcacggctgacaacgagtggcgaggtgtcaccaccaatcaagggaaatttaactatttgccactcttatgagtgccaactctccatatgccactattagatttggcctaacatatttgccactagagagagattacatcctaattttttgccactttcgctgagttggagcgccacatcatcatgccaatgtggactggcctggcgaaattacctttgtgcccttgtgcagaaacgagaaaacagggggaaacagaaacgcatcggcatccatctctttctctcgaccacagctgctcaaaccctaccgtcgccgccctgaaactctaccgccgccgccgctgcgcctgaaacccccgccgcctccgccgccgcctggatccctattggcgccgccgcctgaaccctactgccgccgccgcctggaacccacacgcgccggccggccggcgaggccgctactgcgtgacgcagagcgagtcccgtcgcggccggcgggagcctcacgcggccgccccgctgccggccctgacgccactgcgtcgcggccggctctcacgacccagccggcagcggcagggcgagtccccccgctagctcctcccctccaccgcgcctgcacgcgacgccaacgcatcggccggtcatccgggacgtatagctggcggaggtgaagtggatctgatcgtgatgaagccctcggagtgtcctccttggtaaattcattccccttctctgtattccccttctcttgactttgtgtgaggtgtgcagcatgctgttagaattgatcctggctccattttttttgtcaggattgatcctggcaatgctgttagagttgttgttaaatgtgcttcatatgtagcaaacttagagtatggattgctatcaatgtcagagcaagagcatgattggtgggttgataaatgcaaaggttatagtttagataaattctgtgatgatatgactagcaaggtaatatgggggcctagccaagaaattgtagtgtggggattagactttgatagtgggactgaatggaaggtaaccaacaatgaacagtttgagaagtggtttcagtctgggtggaaagagaaagtggtatatcttggggtagaagtggttactaaaaagggatacaagcctgctgaaagctatgtagatcgagttgagtcaacaactcaagttgtcactagtgttttaagtgtagatcttggggttccatcaattgctgaaggtagtgtgataagtgcaaaaccaactggtcagtcaattgctagatgtggtgtgataaattcagattcaattgatatttgctctccagttcaaatgaccaatgaagaagatactggtgacacttgtaaccatgcaccaaatgtagaagactcagctgctcttgtggactggagtaagttggcaatcattttggatggcttagatggtgatgctcatgcattgttggatgaggatgaactatttgatgctatgggtttcaaaaaaacagatgagagagcagcagcaacagcaatacaagaagaagctgcactccctgttattccaattgagattcaacaagatatgatagatgcagccattgtagttagtgatgaggtacctgctgacccagaacttgtttgggatagggatgatccaccaatggaagtagggacaaagtatccatcaatgaatgagttcagaatggcagtgaaacagcatgcaattgttagtgagtttgagcttgagactgaaaaatctgatccagatagatttcgaggaaagtgttctgcaaatggttgcccatggaaaatcagagcaaagacacaggctgataaaagtgtcagggtattatactaactatttaattgtaaaaaaagttttcccatgggctgaacaaagagagtgctttaggcacttgatggagaatatgaagaaattgtttcatgggaacatatatgggaaaaagatgtggcctgcagctaggacatacatgcctcagaagcatcaaatgtggatggatgaagtgtttgaatatagctcagatgtcaagccatggcttgacgaacatcacaacctactgtgggctagaagcaagttttcatgtcagagtaagtgtgaatatatcaacaataacttggcagagtcatggaatgcttggatcaaaggtttgaaggacttgcctattgatgctcttgctgatgcaattagggagaaaaccttgattctttttgagaagaggaggaggatctctacagccctcaatggagtgattcttcctgttgtgattcaccagttgaatgcagcctcaaaggggttaggccatctaaaggtcactaagggtgatccttaccaagctgaggttacagagatacataatgatgaggagctaacaaggcatgtggtgtaccttgacaagtgcacttgcacctgcagggaatggcaagttactgggaaaccttgccaacatgcattggcagtcatcacaaccgtgaggcaaccaaatatggagaaatatgttgataaggctttctctgtgctcagatttcaggcggcatatgcatcaaccatccctaacattacagacaagaagcaatggcctcaagttgagaaagaattcaagcttcttgctcctgtgtccaaaaaaagaaaagtgggtaggcaaaggaagaataggatcccatctgctcttgagaagggcaaggggaaggctacaaggcaaattaagtgtccacaatgtggtgtctttggacacaggaagggaagtgctagatgtgaactaactggcaccaaaaagaggtgtgctgtattttcatctcaattattattcattttcttgctgttatatgctaactgtttttcttttggcaggaagaggaacaagaaaacaacaacaaaggtgggaaggaagaaatcaaagggtgttagtgatgaacaagtaactacaccaagaacaagagcagttacagctagagaagagctgcagaaacacaagtgcagccatcacaaacaagcagccctggaccagtcactaggaggtaagcaccattatgctcttttcatttttctctagctttcattacttattatacactgaactaaacttcttttattatttacaccatcacaaacaccaggaggttggcattggagcttgaccaaagctctcaagtagctccagctatagtggagccacccaagaagcttacacccagaaaaaagctcgcaagcaagaagaaaagtgcaacaccacctaaacttttggattgaaatttgtcaacctgctagtgaaattggttatttgtggtctactatggcatgatattttggaaaaactaattgcaagtaatgtgcgatgatatgtgcactttggtatggcatattttgctatgtggtgtgaatatcttaagtgtatggcctaacgaacttaagtgtatggcctggcctgatgttgctatttctattattgtgcttttgtaatgatgtatggccttgcgtaatggcatgtaacttgttatgtatggccttcacagtaactctgaacttgatagtggttatgaacttggtagtactatttctaacgatgaagaagttattatgggataaaaattgatttttgttgcgcatgtgtgttaatgatgcagtatgttatgtgttgagttgttctcaagttattatgttttatcatttattcatgtgtgcgtagttgatttaattgtattatgttggctattaaccacttgagaatggaggggtaaaattgtcatttcactaggccggtccatgctggcatgctgatgtggtgctccaacccaacgaaagtggcaaaaaattagggcgtaatctctctctagtggtaaatatgttaggccaaatctaatagtggcatatggagagttgacactcgtaagagtggcaaatagttaaatttcccaccaatcaaaggtagtagtcgcagtaacacaacttttcacctatttccctttttagggggtgtttatatggggctaaaactttttagcccatgtcacatcggatgtttggacgctaatttggagtattaaacatagactagtaaaaaaactaattttataaatgagagctaatccgcgagacgaatttttttaagcctaattaatccataattatcaaaagtttactgtagcatcacattgtcaaaatcatggcgtaattagactcaaaagattcgtctcgcgaattagtccaaggttatggaatgagttttgtaattaatgtatgtttaatactttaaattagtgtctaaacatccgatgtgacagggacttgtatgtgacagggacttgaaataagtccctgaaaccaaacagacccttacactacaagtctatacacaaccggctgcgggtatggagaagtactctgcacacgatatccgaagctgatcgaataaaataatcgtcgttattcgccgggatctgaggcatataaaaatgggcaggagtatatgcatggacctgcgtctgcttacgttcgttcatcatcggtgagtgagggtgagagtggggggccgcccatttgactctcgccgtcgacgccgcgtgcgagtcagccccacttgcgattgattttttttaccccgtttcatcctctgatcgatctttaccgctagctgcagttttcttgggcggtaacagcagtagcggcctctgttttatctgcgctgctcgtggactctccacatgtccagctttatctaacacgcttgttattatagccattctctccagccaccctctcgcctcctcctcctctcatcatctcccatccttcctcctcctcaactcctctcctctcttcgcttcttctctcatgctagctactactactagcttctccttctcctgtcgcacggtgcggcggaagtggtagtagtagtagctttcttggtttaagcaaggatcggcgaggacggacgccggcggcgaccgagcttggggtgtgtgtgtgtaaagttgtcttctccggcggatgagctgttgtttcttggctcgcgcctccggcgtgtccggcttgttgccttccatgtccgcgacgctgcaataattcgcttccatatttgctgccgccatgccatgtatagccgcgctgctgatgcggccctccagccgttttaatgcgtgccaaatcctctccccgaggctcataaaaattattgaattgttgggatctgaggggatccgccggagttggtaggatcacggtggagtgattttggccggaggaagaagaagaagaagaaaaactggtgtttgttttgtcatttgtagtgagctcgcgtgatgagcttcggtggcatgttcgatggcgccggctccggcgtcttctcctacgacgccggcggcggcggcggcggcggcggagtacacaactcccgcctcctccctacgccgcccgtccccaagcccggcggcgggttcgccgctcccggcctctctctcggcctggtagattctcacgagcttttccacttcttttgtttgtgattctttgccgtgcttagatattgatttacttttttaaaattttaatcttgtgttggtttagcaaactatggacggtagccagctcggcgacgtgaaccggtcgcttgccatgatgggcaacggcgggagcggcagcggcggcgacggcgactcgctgggacgcggccgggaggaagagaacgacagccgctccggcagcgacaacctggacggcgcctccggcgacgaactcgacccggacaacagcaacccgcgcaagaagaagaagcgttatcaccgccacaccccgcagcaaatccaagaactcgaagcgtaagcgtcaaactctcgatgacatcaggaaaaaaaataacgaagcaaattctgatttttgatggttttttttttctctacgtgcgatcgtgcagcgtgttcaaggagtgtccacatcctgacgagaagcaacggatggagctcagccggcggctcaacctcgagagccgccaggtcaagttctggttccagaatcgccgcacccagatgaaggtttcgcttgctgttgcacagatcaatccatgatgatgtttgattcttctcgtgttcgtttgatcatgattttgaatttttttttggttcgatttgtggtggtggcgagcagacgcagatcgagcggcatgagaacgcgctgctgcggcaggagaacgacaagctgagggcggagaacatgacgatccgggaggcgatgaggaacccgatgtgcgcgagctgcggcggcgcggcggtgctcggcgaggtgtcgctggaggagcagcacctgcgcatcgagaacgcgcggctcaaggacgagctcgaccgcgtctgcgcgctcgccggcaagttcctcggccggccaatctcgagcatctcctccccgggcccgccgtcgctgcaggcgtgctccggcctcgagctcggcgtcggcagcaacggcgggttcgggctcggcgcgctcggggcctcggcggcgatgcagtccatccccgacctgatgggcggctcctccggcctgacgggggggcccgtgggctccgccgccatgcgcctacccgcgggcattggcggcctcgacggcgccatgcacgccgcggcggccgacggcggcgccatcgaccgcgccgtgctcctggagctcgccctcgcggccatggacgagctcgtcaaggtggcgcagatggacgagccgctctggctccccagcctcgacggcgggttcgagacgctcaactacgacgagtaccaccgcgcgttcgccagggtggtcggccagtgccccgccggctacgtctccgaggcgacgcgcgagtccggcatcgccatcatcagcagcgtcgacctcgtcgacagcctcatggacgcggtacacacgcacgcacgcacgcacggttaactccaaaaacaacgcatttgtttaagctgtgtactgacgcaatgcaatccgcggccagccacggtggtcggagatgttcccgtgcgtggtggcgagagcgagcaccacggacatcatctccagcggcatgggcggcacgcgcagcgggtcaattcaactggtgagccatcgatctcccccctctcccctcgccgcgagctagctgttcgtccatggcgtctcgccggctcagacacgccatgccatgccatgcgcagatgcacgcggagctgcaggtgctgtcgccgctggtgccgatacgggaggtggtgttcctgcgtttctgcaagcagcacgccgagggcctctgggcggtggtcgacgtctcggtcgacgccgtcctccgccccgaccagaacggcggcggcgggtcgtcgtcgtcgtcgtacatgggctgccgcctcctccccaccggctgcatcgtgcaggacatgaacaatggctactccaaggtaattaaccaaaccaaaagcaagcaaaaacttctacacctttctcccgtcgattgtgtttgcacttgcacgcacggcgcagcaagcatgtggcggctacagtggtggcctggcccgagagagacaccgccattaagaccttgtacagctcagtattttatgctgggtgaatccaaagccgcgcgcgccgcgacgacggacgcggcgcgccaaccgatgcagcgtcgccaagtgcccccaagtcaatgcgcccccgtacgcgcgcatggtggtgatgaccgccgtggacgcgcgcgcgcgcgcgccgaggcgcgcgtaacaacaacggccggtttcgccggcgacgactcagcgactcgtcgtcactcgcagcagcagccagcaactgctgcttgcttgaccttgtactgcgagagagctaggcgtacgcctcgttagatgagctctcgattttgaaatgtttcgatgcttccgcagcccaatattctcgctgcgtcgtccgtccgtgcgtgcgtgcgtgccaccaagatccagttttttagtgtttctttatggagttcatcacagtatttttatacgacctcgagctcttggttgcactgtggtagtagtagtactatattactgtttctttggctcatcttctctgcgatgctactgtggtggagtagagcttagctagggttttttcgcagcggtcaatcctgaatttctggcgacgcatgccgacctctggatttccactatgctaacacttggtgtttgttattcatttcgactgatactaacacagtagtctgtcctcttgtgcgatggctgcttccggtgctggggttttaccatggtcattttgtttttggggttttttttgcgtgccttttgctgctagctgcaaatctgcaatgtctagttattgttactgctacgtgatgaggatgaatgcacccgtctttttcacctgcctccgccattactgccttgtcgaggctgtgacgaagctgagctgagctgagctcgccgtgatggcagtaactgattcacctgccggtagctaggctaatgtgtgtgtgtgtacgtgtgggcaggtcacgtgggtggttcacgcggagtacgacgagacggcggcgcaccagctctaccggccgctgctccgctccggccaggccctcggcgcccgccgctggctcgcctcgctccagcgacagtgccagtatctcgccatcctctgctccaactccctccccgcccgcgaccacgctggtgagctcgccgttcgtgctagtgctagctccggtggccggagttcgatcttactaatggttcttgtggttttgcagcgataacgccggtggggaggaggagcatgctgaagctggcgcagcggatgacggacaacttctgcgcgggggtgtgcgcgtcggcggcgcagaagtggcggcgcctggacgagtggcgcggcgagggtgggggcggcggcggtggcggcggcggggacggggaggacaaggtgcggatgatggcgcggcacagcgtgggcgcgccgggggagccgccgggcgtcgtgctgagcgccaccacgtcggtgcggctccccggcacgctgccgcagcgcgtgttcgactacctccgcgacgagcagcggcgcggcgactgggacatccttgccaacggcgaggccatgcaggagatggaccacatcgccaagggccagcaccacggcaatgccgtctccctcctccgtccaaatgtaagtttttttcatcttcctacacatgaaaatctctactactcctacataaaaaaaaaacctggcggtggtgatggtgattgtggtgaatctgccttctagagttgataggatcttttaaggctagataaatggggtatatatatatatatattaaaataagttgcaatgtacgtattttgttattgcaagttacaacaaaaggactatgaaaaaaagacacgaatattaggaaatgatctaatatcaaataattagaaggggtgaggtttcgaattcagatcgtctagcgtaccaccttgtggacctagccagaagaccctgggcgtttctcacaaaagaactatactagtgtacataaactagaaggttgtagtaaatttatcattaggttcttttggttgcaattctttagttcttcaaggatagcaagaaaaaatattgtacagggccctgcaaaagtgataaaccctaaatgcaaaagagggagaggcactataattaagctgaaaacttttacctaattaacatggcactgagtgagcacagcctatgcattagctgcacttggcagttgttgctaaagctttacaacatttcaattagtagtacctagtactgtactaccatgagggtggctggttgtatgcctgtatgggtaatgcatgggctgagactgatgagctagcttagtgagtgacagaagcaagaggacaattcggaaaaggataaaaataccgggttgacatttgtgagagaaggctagctgttaactttctccatgttttggaagcttgcttgcagcctagccttgctgagttgctgcccttgtcctggctcagaaagcctgtcaggctttaccccgtgtctcttttttatcttttcttttttattactttggagaggatgacatctttttcttgtttttaacttgcaactcctgatttctgactgcattgattctggcagttgctgcaagcacatactagtgctccatggttccaccaagactgctgttacaaaattgtctccaaaagtttaggatattttatatacatgcagttgttgaaactagaatgtactattatgatattatctaaaaaaagaaactagaaagtaccactctctccgtttcaaaataagtcaatttttatatataaatctagatataggctatgtctagatttgtgtacaaaagctaacagatgaattagatatgattcatataccaatttttcagctttgcattttcaacgaattttcatggtatggcaagttaaaattttccctctagattggagaccactttacaactttcatctgcaccagctcattctatctggttaatttattcctgaacaatgttcgaattcaccaatatatgttcaaacccaccaagaaattcttgccttgaattaagttttgttcacttctcatatcttgaaaaaacaaatactaatgtctctcctgcaggccacaagcgggaaccagaacaacatgctgatcctccaggagacgtgcaccgactcatcgggctccctcgtcgtctacgctccggtggacgtgcagtcgatgcacgtcgtcatgaacggcggcgactccgcctacgtctccctcctcccctccggcttcgccatcctccccgacggccacaacaatggcgcctcgccgtctccggcagaggtcggcagcggcgcctcgccgaactccgccgccggtggcggtggcggtagcaacaacaccgggtcgctggtgacggtggcgttccagatactcgtcaacaacctgccgacggcgaagctcaccgtggagtccgtcgacaccgtcagcaacctcctctcctgcaccatccagaagatcaagtcggcactgcaggccagcatcatctcaccatagataagtggacatttgacgtggattccgactcgaccatttttgagtcgaatcggatgccatctcaaatgtctaacttttgaaggttagaagactgagaggacttccgcggcgggcgatggccgaccgaaactggctgatggatgcaactcaatcgttgatcaggtagagttttcgagaggcgatatgcgagcgaggataaaaataaaattaagttatatatagtgtgtggagtatatttgcatagatgagcaaattaaatggggtgagttgcagagggatcaagtcaagaacgaaccttgcgctaggcttggctcaagctgatgtggtggttcgggtattgacttagtctctggtgaaaataaacccctagggctttgatctcctatatatatctagcagtttgcttaatttaaccattttgtgaagttttttttaattctccaaaatgggggaaatatagagaaacaatactgatcagatccccaagatcgttggtgtttgtttagtttgcataatgttggaatgagttgatatataaacatgtttattttggcatactatgtttaatcagaatgccgttgatagattaattgagaacatcatcaaaatcatatttaaattttcaattttattctatgtttgtttatgcattttttttggaatcatttttctatcatggtatcgttttaaattgtgaaggaaaaagtctatgtttttctattttagaggtttcctccttgggaggtctcccaactattaattgagaagtaaaaaaatagagctgtttcattgacaaaatacatttctcatcttaagaggtatatataaagcgagatatgcatatctcatattattggtcagaaggtttattcgtcttgatagagccacaagggtatgtacctcttgaccaacagtccaacactaaatacctctacatctaaaaaggctcgaaaacaaatacaaaagagattttacaattttactcccagttattaaattaattttgatactcacttgattttttaataatgaaattaaatcccagcctctatataataagatggacgtacacgacctttactatatatcagagtcctggtttatcacaccataaaatggtatagatgctcaacaaaacttacttgattatagggaatatcaaacacatatcgtattagtaaactttcatgtatgcttaatgaatatttccagcaaacaagtacgtatttgcaaactaaagggagtgacgataattagagaaacagtgagaatccttacttatttaggttggattgaatttctaacctcaaaattttagaaatatgttcccgtcagttacaacttactaattacagtgttaacttgaaaattttaaatgaagtaaaaaatggtaaatagaagagggtagtacaactttgtatgtacgtctggttagctagttctgtgttagagcaggtaattaattgcagcatcacttttcggccccctttgattcaaaggaaattcataggaattttagaggatttctttcctataggaatttttcctatatagccctttgaatcaaaggaatggatcttatggaatcctatgaaattcctatggattgcctaatgctatgcaaattttggaggaattctaacatgaggtaaaacctcttggaaactttccttttaagtctttatctctcctctaattcctgcgtttttcctgcggttcaatcaaacgactattcctgtgtttttcctgtgttttgcaatcatctattttacacttacattcctatcaaaaacctgcgtttttcctattcctatgttttctcattcctgcgattcaaaggggcccttcctatccaaagcatacatatatgtacgtgaaacataagttaagagacatgccgtaatgccttgttaattctctgtaacacatctgtcagtaagtcctttgttgcttgtctaactttgtagtatcaagctgattaatgtgcatcagttgtccgatatggctctttaattatgtacatcgacattaataatgtcgagctacgtgtgtatccgcagttagtgtcaacagtgtggccattgttcatgacagcaacatactgagatacccacatttagtgtgatgctactttcttggtcgatcgctcatccctatccttttatatttagataacggtaagcaaccacttttgggcttttggcctctaagcacgtcatattatattgtcaataacactaataacttcctgatacctcaggtaattagatataaaaaaagtaaattttattttggatcactttttattaccaatatttcgtttcgaatcaccatttaaccaatgtttttcagtttggacaaggtatttttacttttgtgtcactttggaacatcctcaactcttttatccatctatatccaatttttcatatgttgaagaaaacatatagctatatattagagttcattgacaagtataaaccgacgttcttaggatcgttcatatgtttgagttaagatcgttcatacgtttgagaaaagagttaagtgatcatccaaagcgaaacaaaggccagattacctaggtaaaaatattagttaaagggtgatacaaagtaaaatatcggtaataaaatgtgggtcaaagtgaaatttacttaaaaaattatgctaaaaaacatggcacctcctttaggctgctcagaaagtgctactagtatttgcttctgttttatggccctattattttcgatttatccatccaccagattatttgtctgacactacaaaatataaggagtatttgtttagttcagttcttaaaacattttgtttatcactataattgagaagataatctgcggcaatatagttcactcgagatttttaacaaatctggaccatgcaccaaagtattactacgtacaacctgcgtatcgtactatctttgctctctccaattttgaaatactctcggtataagttttcgagaggcagcagtgtgcactgcacattgcacacattgaggggcgctttgaatcacaggaatgaaaaaacggagaaataagaaaaacataggattctgacaggaatgcaagtgtaaaacaggagattacaaaacacaggaaaaacacaggaatttgaagagagatagagactcaaaaggattctttccatgaggttctacatcatgttaaatttcctccaaaacttgcatgaaaaaagacaatccataggaattttataggattctataggatccattcatttgattcaaagggccatatataggaaaaaatcctatagaaataagatcctctaaaattcctataaattaccttttaatcaaagggccctgagattggcctcgagtttggctggtagcctgatgtaaacagatgactctcctcggtgatgaaagggggtacatcagctaccacccggtctcatcttttcgtttatacttatacttatacttattaactaaattttaaatttataactttaaattaaagctgatttttggaaacttttcattaaaatttattttaccgtctttacttttaaatcactaagagcacgtattttatttgcaatatatataccgtttggagccgggtaaggataagcatccgcgtccgttaactgcattggtgtgcgggtccctctgccgccgggcgggcaataaattgcgtttgctgcccatcctgcgcaagctcagagacggctagctgatcacaaattcacaagatctctcatatccttgccttgcaaagttgcaatgcacccccaccccaacatctgctgcctcctgtctctttgcgaggacgtcctttactaatacttacatattacttttttttaaaaaaatgaaaaataaatcaggaacatactcctccgtaaaaaaaaactaacctcctagtacaacagatttgaacagttttttattttttcaacgtagggagtataaaatgcaggaatacttgcagccaggaatgaatgttatacttaggatttaaattgaaactcacacgaaagttgtgtttagatccaaagtttggatccaaactttagtccttttccatcacatcaacctgtcatacacatataacttttcagtcacattatctctaatttcaaccaaaatccaaactttaggctgaactataaacagccgaactagcgctcctctttcaacaccggtgccaagaaagcaactgtacgggctgtagacggtggaaaaggcccgtggagacggagcgcgcggcggcgctaagcttttacacggaattcgcggtggatccagcgactttcctagcgaacacggcgactgatcgaacctgccccgatcgggcgggtatggccgcagctgtaactgtgcacgtacggtacggcggccactgttgactgttgggctcccgcggaagatgctgcttctggtctgtagcgaaggcgaagtcacccggacaccggaagcgacgggacggccggccggcgacgtcgtccgtgcagccaggtagttcgttgtactagaatgaattatatttttagttaggttagattttttggggatggagggagtagctgcgccatccggtccagttttctgtagagaacttgacatatagctgtagctagtagtagcatccagccactcaatcctttgcaacgacagatcgaccgatgctatagctagtagtagcatccaaaggtttactcactccgttaaaaaaaaaccctcttaggacaacgaatctggactaagatagttcggatttattgttctagagggatggtcatatcccctcctagtttaatttttttttgaacagatggagtacggcaaatagctgtctgattggttggctaccacaacttaccaccatgtttgattactccctttgttagtatgatttaagttttttaaaatcaaactactttatactccgtatttaattaagtttataaacaaatataacaatattttcaacaagcatagcaatactttaagacaaagtcaaaagtattttataatacgaaacagagggagtagccgatatagtaaagcggcaactaactttctcgatcacttgactactaaccttctcgatcactttgaccattgatcaactcagacaggtatagaaacatacaatatttgttaataagatttagccaaaggctacattcttagagctttaatagtagtcaagtttgattaacttagacaactatctagttatagtcagagttataacaaaaatttcttttaataaatttgatcctacatgtatatatggcaaaattcttttgggccatagttagagaagcttctagttactgcaacttcttctataatcttcaggctcgagctctctaaacaatccacatttttcaaaaaaaatgtagctataaaattcaaaaaataaactagaaattagaaactaagaaatcaagttttttcagatttttaccaaccagctattcaccagcttctcataatcaatagctttccaaacagtcttgttttgctaagatgtgacagattttagggattaactttatgcaagtttgatatttccttcgtcacaaaataaacacatctaatgttggatgtgatatatcttaatactacgaatttatataagatgtgctatatactagatgtacttattttgagacggatgtagtaataacttctattgataaatggtgataaccgcgggtaacaaacatgtcggaacatctcagtcctaacaggagccaatgaccaatgctttttcaggtttatgacagtttgacgcccctgatcgaaagtcgtccgggcatccgtccatcgatctgcagccagaacaagaaaggttggccggtaaaaaggctactgacagtcatagcggcaagtgtgaatcaggaggctcggcggtggtggttatactgcagcgtttcacagttgtgtggtgcagagatcatgcatggctgtcatgagggtaaaaggagttactatatgctgctgaattttggtagtcgtgcagtgaatgttggttgaaacagccccatgattttacaccggacccccatggcacgtacttacatataaggctttactaagtcctgtgtcatggtccaacgctatgacataagcacagccggaggatagtgctgctagagttgaggagacttacgttgggaggagaagaacatcaagagagggattgaacaaatctccctcacaaaacttacctgaatagcgatatactccctccgtttcaaaatatttaacaccgttgactttttagtacgtgtttgaccattcgtcttattcaaaaaatttaagtaattatttattcttttcatatcatttgattcattgttaaatatactttcatgtacacatatagttttacatatttcataaatttttttaataagtcgaacggtcaaacatgtgctaaaaagtcaacggtgtcaaatattttgaaacggagggagtaatacatccctctacattgctggtatgtttgggctcgagctcaagctgtgtcttcgagcttttaagcacgctcagtttgagctcagctatattttaaggatatactaacctttttactgtcatcgattgtatgaatttaccactaaatagggttcaatctaatccgatctctaactctaattctgtcggccactgttcactggactgggatattaggtttggcgtcgacctcctggcctaatgctgatgacatcctgtttaaccccaagagagggagaagcagagcagcagtagtattgcatgtcagcatgtgttagctgtgcctacagagctggacaatagtaatcttcacgtggacctgttcccaaaaattgttactattacccacatgattattccttggtactaattagttaaaaagctgtttgtaataacacccccctttttttctgtaggctgaaggctgaaagctgaaacactgatatgagtgaccaagagtggatgggtcatgtgggtcgtgcgtgcggcggctgcaatggcaattattgatgatacaaatacggccttgcattggatcaacccagcacacctaactggaaaggcttaacagcaacggcaattaatcacaccataccaaacgtaacttacgtaattcgtccatacgctcttaattccattcagcacaattaattaggaataagatgtttatgtgatgtcaacatacctgtgggccaaaagaatccagctaatataggcaacataaatgatagagatgatatttccagaataataagtgcaatgtagagaccatatatcacctctctttgctctgtatcattcaagaaaaatagttagctcagttcaaaacacccatgtaagagcacaaatagcaaaacactgcataatggtttgagaaaaaaaaaaggaatatgggtttggcgcacaaaagtaatcctgtatgtttttcccataagaagtagcaacaacaaggcagacagaaagtagaggacaaaagatatacccgaaaatgatagcagaggtacaaaagctgatagaaaagcttactatcaattgaattaaatagagcgagagagacctgcttaatatgtctgttggattgtggacaacatagattgtttttatacatttcaatcttcatcagcacttaacatcataaatgaggttatgctcgattgctaaactagacctatatcctttaacccatgctgtcatcaatacatgttacaagaatagaccatttactataagcatctaatgacactatcaaacaaataaattttcagaaaaggacataaagctagataggagacacaaatcagaactaagtcccatcacacaagaaggccaaaagaaaaatgacaagcacgattatctgatatgtacagagaatgctactactagttgatattacttgaggatcatagtattattatttgaagggagagctgacaatttcaggtggcaagaggacaataagttagttcagaattcagaataattaaagtataattgggtgttaacacttaaaaactcaaactaaaaaaagtaggcagtcaatgacataaaaaaaatcctaaaacaggttatttagaaagtaaaaacatctgcaaagcagtaaaatggagcccaatgatagcagcatatttggcagataatatcagacattataaccatgatgacatcacgtaccaattagtgggttcacaatatcatgcaagttgaaattcagaggtttcaaatgatattcagaagaacaaatcccatagtcacagaaaacggggtcggtggcagcgatcctcaatccgggaacaccgtcccaggaacacgaggtcattttcgttcccatcttgtaagtagcgtaccatgtttctcgaccctgttcctcgatcccatcgacccgggaactttgatcctacagactgccaattcattacattcagcattccagtgcatattgaagagttaaagtcttttataaaagtgcatatggcagagacagtcacaactcacaaccacaacacaagacattccagcactgtgcatttgaaacagtgagcaagctgcagacctcaataaggcatgccaactgcagtgctacatgagccttcatcattctgttccaaactgaatggacttttcctgtaatatttgttttctgatttttcatcaatgtcttttgcactgtgcattggttgccctttcaatctgtaccgcgttccttcattgcagatatgaaagccgctgaggttacattcacatgtgaaaatttgttgttttgcatagaagaatcattattaatcaagggattgcagaagttccaaacttgaacaatgttttgaagaacagtcaagctgattagtcactaagtgaaatgaaatagaaactctttttgtttaatcagtcagtgctgtttacaaccatgacgctctgaataaaagtccaaatatcttattatctttggatggtaaagaacactacctgtatggttgtcgaccatacctaaagtgaaaaacacatatctaataggttagaccttgcagtcaggttaaacattctgagaactacaaaactggcagggtaaaatatgatactaaatagtaaggttcagcaatcacaaattcacaatggacagaagacataacatgtctgcaatgtatagttcaagactgattatgcatcaaatcgtagtcggatgcaatgatccttcgttaactaagtagaaggtaaagattagtgccagtctatgagtagatacgacaacaggatccaaaaggccagtcttacttttccttgaaatcaactctggaaattaattcttttggactgtatttccagatttcttagccaagactcaagacatagcaaggaaaacataaaacaattaataagattaaatattgacattaacactgacatcaaacaattcagtttagctggagtttccctgcaacacttattacacataaaagttcaattgtttctatacgatgtataagaaatgataggtagtatagtcacagaattttgagatggcaatgccaatccccaataggtagagagagagagagagagagattcactcctagtgtgagagactgagagtactcacaagactcagtaaaaattatcagaagaacgagtgctcaaaataatgaggggttttcagttcccatgcctctctctttgttccttcttcatacaacggagtgcaaaacgaagatgccatccgaccattgcagtgaagttaaatgccgacacccagagtcttcatttgacaatatcaacagttttagcacaagatatctcactagttttagcctcgggtggcaatatcttctcctcaatcagcattgctgcatccgactgttaattcaccatcagaagaaagagagcttatagatggtgtcaatacttgttctagaaggcaagcttccttagttgatgttagtaccacagtatgattctgctcctcagtcctcactcaatgtagagtgactcaactcccgagtcatggccacaatctccaccataatcaccatcagccttaatattcgctctccggtcactcgcctcaccaaggaactcctccctcaattctgctcccccacgacgaccgccaccaagctcatcccatccacgacccgtgctagtgaacatccggtccaaattcgccttctgcgggttcaattccacatgagcagctcttacattgtccgcctcgccgcataaatctcattgggctcaacgagttgacctttgtaatacgcctcccgaaggaacacagcgtgcagcttaccctggtttcccctaggaggaggatgtgctcgaggcggaggcggaggcggttgtgcgcgggggggggggcgaggaggaggagcttgcggatgcggatgatggaggccggcagcgaggaggcgatggtgtcggcctcgaggcggagcgccgtggcggcgcgcggggtgaggcggggcgtggaggacgcggtggaacgcgtgcgggtggcgcaggaggaaacggccggcgtcgaggggcgcgaggcggagctggcgccaagacgggagaagggcacggacatggcccctccgccgccgccggcgagcgcggtgggggtggccgcatagaggaggacggagtagaggacgagaaagcggcgcactccatgatgccgtcgaaggcgtggtcccgcagaagcagcagtggtggacttggatgcatatcccgccgcgactgcggcggcggcggcggccggagtgcggcgatgcggcggagcatcggggtgttaggggaggttttgcggggttggttggtgtgggccgaattggcatgagaaatctttgggttcaagtggttcgtgatgcgggccttgtagcacacaattgggctctttgaccgaaaaggctcattgcaacaaggcctataagatatttcgtcacgtttgtgcgtgtgtttagttccaaagtttttttccaaacttccaactttccatcacatcaaacctttcatacacataatttttcagttacatcgtctccaattttaaccaaattctaaactttggaccaatctaaatacagccaattatacggtacataattatatttaagatttgttcactttgttgtcaaccaaatttttgtacgacaataaactgaacatgatttcaccattacaactttaccgaactccatctatttacaaaactacaccaaatttaaattttgatagggaatcaaaccagacaacaacacatttgcatcttttatattggcaacatttggcattatcaatctttggttttaccaataaataataataataagtttctttttttggaaatgatacaagaaggtataccgttcggacataatgataacattgatgtatcacctgatatctagtaagtattgtttgatacctcatttgaacggtatgatacctccgaggtgtcgcctaataccttagtatcagcctgatactgatactggtaagtatcggctgatactaaggtattaggcgatatctcagatatatcatcccgtctgaacgggatgccgtcccgtcacattcactttttttttttttgcaacgaaatggatatgtccttagagcctggcccattgaaataaatagtgatagggtttattttggcaatgaaatggatatgccatcggagcctggcccattggctgaaatgatcacatcattcacatcgattcttagaaaatggacgttggagtgatgaacaacgcaagttcagtccggtcaaaaaaaaaaagaagaaaatattacagtagttcagtcctgtcaaagagaactatagcatagttcagctttgcgtaatccaacattgtttagctttgcgtaatgcaagctcaacaataaactaggaggttcctttggcgtgtaggaagtaagatcagattgtttaggagtaaactcaatgacaatatggagataaccaccaagtagcataatcccttttgattaggaccaaaatatactgctgctgctgctgctaattaacttggcaagccaatgattccctttcagcagcaaatgctgtggcatcgtcggtagtcggtaccaccggtagcgagaggcgacatatggggtcagtacagctgccctgcggaaaatgattttgccatcgagacaacgtgacaccacagcttctaatagccacttaacttatgtggaatcttttacaatggcgtcatgtgttttgtaaaataaggcaaagggctaagtacagagattggaattttaagcaaattgtgaaaatctgaataaccttgattcttcgatttctggcttttaatttattgtcaagactatatactccttctgcctaaaaacaaatataatactactacaaatatattagtttttttttatgaaggggggtaactatttattctttgaccttttaaaaactggtgattttgaaagaagtcttaactacagtagtaaggatatgtttggttaccggttatactttgccacaactaatgttagataagttgtgacaaccataaaatgtgatgaataaattgctagtcattaagtatggtgaaattggtaaggaagttaagctaaccaaacacatacatataggggtgaaaacagtaacggaaattaccggccgactagcgttcgttttcgactttctaccggccgagcgatatggaaatggtagtcgaccaaaacaaaaatggaaatggcaaaacatatggaaataaaaacggaaatggttttgctgttatatcgatcgtttccgtatctaccgtattcttgtggaaattaccatttcttataatatggtaattaccgtattctaaatatgtcgatatttatagagcatgtctatacttggcccacagcttacagattgactgactcttcaatcaaatctctaacttttatgcatggctaaaataaagttaatttataatttatatagtataagcttgaatttatgtatacatataacatacttatgtaaagttaaatatatgtttttatagtttaatgtttccatatttgttactggtttccgatctgcaccgacatgtttccgtccgtattattccgtttccggttttctgatatttccgatatcgttttcgtttccgagaatatggttacggaaatgattgaggctgtttttcgatcgtttccgaccgttttcatccctacatacataataaattgtggcagtgaaaagtgaggcgtggtatagtgtggctagtaaccaatcactaacgaacatacccaaaagcttgggatccgacatgtggagccctcaccagtcaccacgagttcaggaatggattgggggtctggcttggctgatgagttgctcggtcaattcatgccctttggatgcgggccaggaggccaggacgacgaaggctgaggtgaaagaaagtgagcgagccgtccctgttcgtacagttggatttgttggccacggccgtataccattggcagcatatccatccatcatgcatgcttgctaactccattttccagctagcaattcgcctgcgacacttgaatgcatgcagaaatcgcagagccatgatcgatcgccgattcaccggcgatcgatcgagacgccgagacggacggggattgaaggcacgtacacagcttgcagggcttgcagccagctgcaatgcaagcggatcaagatctggtgcagtactacgactgcaactttagcagttacagtg

SEQ ID NO: 8981 - DNA, 1880 bp, Oryza sativa
aataattaatgaaattattcgtgtactatgatacagtgccaggcttgcagtaaatagatgggcaaactggctcagcagctctcatcaagctccaactcaatgcctatccagcacacctttgggtgaaatcaatgaccatggttgcacccaaggtgtggtggaccagatctcaaatccagtggaggcttaagttttacccgatcctcaaagcccttctgtgaagcatgctcagaaggcagtggcttatcatgcaaattccacacgctcacatgtcccatccttccaaattgagggctcagaatgtcagcttcagggactgccctctcctgaaaacctagcgagggttgtttcactctaacaaaacgaccaaggaccggatctggaggctggtttggcaagggctcatcaagacatctcgatgtaattgtgaaaccctcattattgtaagctaggtgtcttgcatggttaaaaggaatagctccattaccaccagtcagaggagtggaagcacctgaagtagttcttgggctcgaaatcggagagggtgacattataccattttgatgttgtggagatcttgacctcagatgagggctcccacatggagaaacagggcaagatatatagcttcgtacatgaatatcactgcaagcaccgatgattagagtacatacatttccatgcagatatacattcactgaactgttttttttttaaaaaaaacgaggaactgtatttcttataggagtacaggactgagttatcgaaaataaatgacagcagggtacagaacaagggtaaaatgtgaaaaatattacaatagcattaaacactgcttgaattttacagtgggagcatgttgcagctcagatgaattaagcagggacatcaacaaaacataaaagcacatttgggcaattattcatacttgcatgttgaaaaaaggacattagtaagatttctagtagggttcacttagtgtcctcatatataaaaaattcatacaaaggtcatttattttgtattcatttgaatgtcattatttaggggtaactgccaaaataaaaggaggaggagatagttcagtaatgtgcagctaaaatttcctactttgaaatgttagctaatttacttttcgtcataccaaagcataaggattatgatatgagaggtttggttgcggttctaatttaattttttcagcagagatttataagttagctactgctcctctagaatatttagtacacacactccaaagcaatattcttatgaattagcaggtagattcaaatattgaatgattcacctgtgcacagaagaaaatttagcagctcttctctggtaaatggattgcccttccaaacccaaagaagacatatttctggcatgcccgaccacctgaaatgtcacaagagacaaagcgtaagaaaaatggaacaatcaattgtccatctgataaccaagaccttaatactctaagtaggccccagtaacatttatctgtcctagttagctacaacagccagaaagaagcaaatgaaaggaaacaaggtaaaaaataaagtaaatgatttgtagaattaatgcatacagctgctaactgggcaaacatgcatgacagatgtttagctaaaagacaacatgttccaggaaagcagttgataccttcagatctggtttgcaggatgtagtagacaactgtagcaatggatccgacagtgatttttcaagtggagatgcatttcgtataaatgaatgctgcaaaagatccactgctgttggacggctggatggattgcgctgcaggcactgtcttataaagtctctgccctcttctgagaggtgatctggtattggtggaagctccttactgtttc

SEQ ID NO: 8982 - DNA, 5866 bp, Oryza sativa
cgcgcgccgtgggatccacaggcatggcggccggccaattccttgacctcgccggcgccaccgccctcggcgaggccgaggtcatgaaggttctgacgaagaagttcggcgagatggcggagtgctccgccgcctgcggcgccatgctgggaggcgcggggcccgacgaggaggccgcgctgcggcgctacggccgcaccatcggcgtcctgtaccagctcgtcgacgacatccggagcgcgtcgggcaacggcaagatgaggagcaatgccagcgtcctgcgcgcgctgggcatggatcgagcgctcggcatcgtagaggagctcaaagcgcaggccaagatggaggccgacaggttcggtgacaagtatggcgaaagggtgcttcccttgtacagcttcgtggactatgcggtggagaggggattcgagctgcaggatgcagctacaacgccgtaggcacggaccgcgcagaccaaccttgatgctaccggatatttgaagttctgagcaagtggttatatatggagttatatgctgctgagatttggtgagcaattcatctctgaaattataagtttcaatgagaaatataaagattacgccattgccatctagggcagatgtctggatacttatgctgcggttctgatctttagttagttgctgaaataagacgatgtgactaaatgaagaattcttaggataaactaccacaattgctatgccttggtgttacatgtgcttaatatatataatctgatcacaatttcaaagcctgtattgagcttcccaattgtatcaattgttcatttggaatcatcaaagcataatttcgatcctcataaagtatattactggttcttcgttttcgggtgaaattagccatgatagttagagcatttgtagttttagcttgattgacttaggtttgagttgaaaatcattgccaattgggtcaagcttatactaggaatctcaccttctcaaatcaattcttctggcaagttctattcaggtacgacgcagcacacatcacaccggactgggatcctctaggtcaggtgactttagagtcactccacaccactggtcagataatcccacatctctccacaatccctgaattacttgcacccggacccaacatggatgcagccatggctgccccctctattctagcacgcgatggaaggcgcaaccatttaaacagaaaccagccggtggccggtgcttcatgcgcaccaccagagccggcgccgatctacatctccaccagagtatcagatacaaaaaccagagtatcagactcgacgaacgacgcagcaggccattggcctcgcagcttcacggcaagggtcgttggttgcctgggctagccgtcggaatcagaaataggagttcacccattgaactttttattactgctttcaccatttggaatgaaaactctttatctctgtatctacgttatccatcaactacacagcaccagtaattacatactgcaccaactaccaagtgatgatggcttcaagcacactaacaataacaaccattgctagtttttacatgctatccactacttgctagttgttaccaagctcttgcagcgcagaacacttgctagttgccaccaggatcttgcagctcaaactcgatcaaaggcatttcctcctctctgtaatctcatagctgaatgatctggtgcattcaccgattcagtaatcaggaatagttccatgtcgttggcatcctcgtggactggatagggggcgcgtttcgcacgttcacgtcgagtggcagcatcctgtattctatgtcgaggtccttgagaactttgatcatctcttggagcaccagctccctccttacgaacctcatccccatgtcctgccagttgagtgtgtgccggagccatatggacactttcagcttgttggtgtcatccacatcacggaggacaatcattgcaccaggataccaatggtccttcttgttgtcgatgtaactgaaatttagaagtgaaaatattgattagctcggcgtggtaagatactaacataagcagcaaatgagctcatagatgcctgactgattttataatctgataggaaggctgtaactatgatgaaatgttcttatgccctaatttagtgctaattcataggccttaggtggggcaagagtgcaggcacttctttcggactccagtagacagtattaacagaatcaaattctcatagttgcatttttacattcatagttaatcattcattgttgattagatttcatgaggtcggattgtattgcaacaagataagaacactaatacataccgtaataatctttccttcataagggctaatttctccactggggtggcaacatgaacggagaagtcaattccttctcccatatcaggactcctgtagtaattcataatcggttttgtggcaagtacactgtttggataatagatcttcaggttatcatatcggagaaacactgttgtcattatattcatttcctcaacaaccacctgaaattcaagtagttcaatctttagtaaatgaatgcaaggtaatattcatgaatgaagattaaagaactttcccactacctgacaatcttctatttcgcagcgatcaccaacatcataaggatgcatcacgaacaagaacacaattgcctcaaaaattgtcttcaaagtattcccaaatacaaaaactgccacaagaacttgtgaactgaggaagacaaagaaatgtgttgttgctatacccagaataagtagccagagggcaaacacaattatcccaacaacaacattaaccatctggttgagcttgttcactgcagtctttgtatcattaagtgttagggcaagggctttgcgctctctaaatgcattcacctacagaagaatacatacaacaatattagcaagggcattttcagaactagctacgggaatgtttggattactgccattgttagccttgcccattttttgggggcaatggcaagatttggtcattgccaaaaaattttggtaaggtgcatgtttggattgttgccaaaatatgtaggtactggtatttcgtttggtgccaaagggataacaaaattttagttgcaaaccaaatgagcaccttttttttttggcaacaccaatattttggtatagttgatattggcaaagaaccaaacacaccctgtgactcgttattataaatcaatatcgtgaaagatcattaccacccagttctttagagatctcttgctaaccctgctgtgctcctgtgctccttcgaaaagatccattgttttgatggcttcttcctgcctcatgaaacgcagcaaatctgacaagtatatatacctgcagtattcatatgtttgtgattaggaatttgatcagaaatgtgcaagttcagaatttttgcaatccctgttttcaataagctttaaacacctgtaacttaatactaaagatatataggatgaaatattagcatactagcatctccaatgaaataacactgactgtccgcacgaccaccgcacgaactaacagttcctacattacagataaattgcagttgcttgtctgattatctatattgtaagaactagcaatgatggcacttgcaggagattagggaatctaaccatactatactactgacaatgaagacacttacttggagccaggcttcgccacattgtgaaagatcttcttggcagcaatcttggcttcatattcactacgaatctgtgtcgctgactcatccccctcacccgttgcctgctgtatctgctcatccattgtcgtgagcgtcccaaaccgaacaatcctcatcaaccttttcatgttccaagctgagatatttttctggttgagtttatgaagcttgtcaatggtgatcccctcctcaatctggtgctctcctttctcttttgacagctgcttgctcccttctcccttaggaatcaccccggacatccgaatactcctttgccctgaaagattcttggttggtacagtggaacggagctcagctgggatggttgctcctgcgcgttgaagctcatgcatctcagcaaggaattggttttcgtcaactaggggcggcccggagagcgtctcgatgacaaactggttgaacaatgcctcctgaatccggtcaaagtatgtgttgacatggaaggaggatgccagcaccttgagcagcagcgtcttgacgaggcggatgagcgtggcgacgaggaagcagaacagtatcttctgcacgtagggcagcacaggcgagttcgtctcccgctggacgttcttgtcgaacatgaagtgccaagaggagagtaccaggccgagccagagcgcgttctgcacggcgctgcgcacgccgtacacgaagtagagcacgcgcttgcgcagcaagaagttgcgctcgacgcagaacacggcgatccggatgacccagccggagacaaggcggccgcagatgagcacgaacacgaggagctcccacttccagaggtgcagcccccagaccttcttcccggacagggccttgatggtgagactgcacgccaatgccgcgatgatgagcaccaagctgagccactgaaggatagtgatggcgtccagcttcccgcgcttgaattcgtcggggatgtcctcgtccatgaatgggtcctcctcctcctcttccaacgggcccgacttggcgatttgcccggacttgccggtcatgaggcccgagatgaactggccggacttcgtaggcgtccgcaagacagaggatctcctctcctcgtcgccgacgggagggaccgcggacgccggctggggctgcggcggcgggtccatcagccgggatcgcgttttggctcgcatcaagtgtcccgctgcagtggaactggacgtgcagcgaacaacctcgccgtcgtcgccgccgcgcctacggctacctccggtgtcggagtcggagtcagaggacgaggcgacacgccttttcggttggaaggagactcgcgcctcgcgttccagggagtttgagaaggatggctgcgcatgcagttgcgacggcctcccgagctcctccatgtcgaggtccagcgacagctcggcgccggacgccttctgtttccgaaggaagttcccgatgagacgcgtgggcggatcctcgccgccgtctaccgcacccgcagcgtgtgccggctgcggcgatagcgaaggggacgacgcctgcgacgacgaaggccgcggcggcgcccggttcttgaagctgaacgcctcgcaggcgcgccggccaccgccaccgccaccgccaccgcctctgcctccacccccatcgctgcccccgtccccgccgccatcattcttccaaaactcaacgctcccgtcccgcctcaccttgggcggggatcgcggcgagttggtccagctggaccacgtcctgctcgccccccgcggcgtgctcgccgtggagtcggtgttcgggctcacattccccgccccaccgccatcctggccggggaacgcgaacggctcgcggcaaggcccctccccgtcgatcctcacgaccacctccccttcctcgccgccgtcacgatcggccgccagtccggaccgctcatcgaacacccccgatcccacccgcggcgaggacttgcctgagccatgcgacctcaggctactcttccgccgcacctgctccatcgccgccggccaagaaacgcccactccaaagatagctagtactagtagccactctcctcctcctcctccctctccccccactcctctcggccggcgtctctgctatacttaaccagagtttaactaagggattaatact

SEQ ID NO: 8983 - DNA, 930 bp, Oryza sativa
tattctggaataatctctagattggattagtaccatgcagagaactttcgtaaatgtgagcctcctcactggagctagtacatagctcagttggcatgtttcttgtttggctggaatggttatcgtcccttctaaagctttgatccttcttaaattccgtactgccagaaacagcataggtgtgcatcattctggtttgcatgggatatatattctgatactttaaataataggcactcccaacatgcacatgtctccatgtagaagagccaccagccatgctgctacatgatgtgagcattaacattttcttcaccaaactaagatcttcaaagattgattttggcgttgataaaaagttttgagagctcagaccagttgagttttcagcacagcaagacatcaatgcatgttccttttgctctttgctgaagcacacaggttcatctttatgcagaatttcatggctctcggatatttgagctgtgccggaagattctggctggccgacaagattccagatcccagtcaatgctgatactaactgtggagtggttaatcttctatctatagatttgcttcctgactgagtacttggcttcgattggttattggcattacgatccttagtaagaaatgcatccagatcaaactgatgaccatctaatggaagacggtggtaattgattgttggttttctaacttttggagctccacattttgagctcatcttttacaagctagcagcaaggtcataaaggaaagctagtaatcaactgactgagatctgctagaggcaagaaatgatagagcaaatttagcacactgaagttcttgtatagtaccagaatttatttttttctcaataaaaatagaatcatctcactagcaaagaccttggggtgggttgataagaacagcagcaaaaac

SEQ ID NO: 8984 - DNA, 10801 bp, Oryza sativa
  unsure (1)..(10801): unsure at all n locations
gtctctttaattattgcccacaggaaatggagagtccaagtttgttagtagtactaataaactcccttccctcctcacaatcagagagagagagagatcgcgtgcgatttgacagagatgctgaattgctgatatgcttcgatcatactggatggtacttgttgcatgcacacttgacacggcttcgacggcgctcgcctggtaggtgatccatagcaccacacaatcacaatgcgagcgtttcattcgagttagcctcaccaaacatcccggtagctattaataagcacggctccggccgtcaaataagctaaaaaagtctacccctaaactagccgaaagtgatcgatcttaataatataaagcagtcctttgcttgcctgagcagcctaatgactagatagattgacaaagggcaaccttatcgttaaaagatatacttcgtctggatacataattcttaacgataataacgtgatattcaaaatatatctagactatatttttctattatataatattattatagtattttaaaagacaaaattatatatgttgttctagtgattttaactaaatatttttaaatttattgattagtcgaaattataaaagtttaatcctaacattattcaaatgtcaaagaattttgtaatcggagggaggaagtactagatagtaatacagtggtgactacctatacaactttcaatgaaaacctcaatacaatctttgaaatataacttataatataattatattgtaactttaatataattataatgtaacacatatatgctccctggaaggtaatttatacgagaaacttgcgcggctcggttggcagtgtaatcatgaaagtacttgtttaaaaaagcatatgcaattaatcttggtaagtttatacgtgacaactaagtaataccattgcggaccgtagatattcgacgttgttaatgggcgactggtcgcactggggcacgccctcgtgaccggtgatcccctcctctagtctccttagtatgtactctctccgtttctaaatatttgatatttccttctaaaaaaatatttgatgttgttgatttttttaaacatgtttgaccattcgtcttattaaaaaaattaagtaattattaattttttttattatttgattcattgttaaatatattttcatgtatacatatagttttacatatttcataattttttttaataagacgaacggtcaaacatatgctaaaaagtcaacggtgtcaaatatttagaaacagaaggggagtacgtatgtatatactttacatacatatataaattttatacatatgtatgtaaagcatatacatatgtatataaaattttttatatacatctaaaaaagttatatgtacacatacataaaaatttatacttatacatataaaatatacatgtatacgtatatgtacacagaggtaatatatacacacaaataatatatacgtatatacggacacatacaaaaaatttatacatatatacaaactctatacatatatgcatacaaactttatacgtgtacgtacaatatctatgtgcatacgtataaagtttatataaatacagacgcgtatactacgtacatacggacgctgccgtgcggactgattagcatctgtggcggatgtgtgcacgtatacgaatcttgccaggagcttaatttccttttttctcccgaactcatgtctgtttctgtttgtttgcggttctgcgtgggcagtgggcagagttggctacccaacggtccaagtgaccgtcgcgccaagccgcgaacccaaccggcgaccggcgaccaatcccctccgagactgtctccaatctccggtcctcctccatggctagcgtaggcgcgtagcatctatttatgctctcagattcagagtcctaccactcgtacacacgccggtcagcaacatcacatgcatgctagcaagaggttttcgttagcctacgccctacggagtagtagtagccgtatcacattacatgcgcgctgcggcacacaattgaagtcttcgagttgatctgccggtagatctagctaagctggagtcactttacacttgcatttgcatctgcattgaactgcactgcattgcattgcagttgcactccgtctatctagctagctagccacgcatatgtgtactgcgtgcagatggatccccatttaagcgtctgcgcctccgccaccaccatccccatggccacccttcaatgcggccgtgcattcaatggctcgccccgcggttaggtgcccgtcgatcaccgcggctgatcaagtgatcattgcctcattggccactgatccatccatcgatcggtcggacgcccaacggcccgcgcaggcgccaatttatggtcgaccggctccgtgctcctcgcggccgagcgaccgaaccggtcaccaatcacaaggcaccacaaactatggtgatcaatggatcgactcaccactcgcaaggcaccacaaactctgatcctgatcaatggatcgatgcagaagtcctcgtcgtaggtagtgttcccttcaaactttcaacttttccatcacatcaaatatttagacacatgcatagagcattaaatatagatgaaaaaaccaattacacagtttgcatgtaaattgcgagacgaatcttttaatcctaattacaccatgatttgacaatgtagtgctacagtaaacatttactaatgacggattaattagacttaataaatttgtctcgtagtttacaggcggaatctgtaatttgttttgttattggtttacatttaatattttaaatgtgtattggtatgcgtcaatttttttttttgccaagacaactaagcacggccttagtatatgcgagtgtagcgtacatgcatgtgtgtacgtaggatcggagttgttgcgtgacttgcgtcctgctgctgcatcgttcatgtacactggtacatgcagagagagagagagagagagagagagagagagagagagagagagagagagagagctcgcgcttggtggtagcagctaggagtagcagcgtagcaggaccggtgcgcgacctgcaataaattggcatccatctcgactgtgctccgaccagttctataaaaacctcggtctctccctgctgcactctgccatcctcattgcttgctccatgtggagtcacttagcgcagtgtagctagccatcaccgggcattctcatcggatccatacagccctagctagcagctgtacgtacattacagagtttgttgccagaggaaaatggaggtggggacgtgggcggtggtggtggcggtggcggcggcgtacatgacgtggttctggcggatgtcccgggggctgagcgggccgcgtgtgtggccggtggtcggcagcctgcctgggctggtgcagcacgccgagaacatgcacgagtggatcgccgccaacctgcgccgcgccggcggcacgtaccagacgtgcatcttcgcggtgcccggggtggcgcgccgcggcgggctggtcaccgtcacctgcgacccgcgcaacctggagcacgtcctcaagtcgcggttcgacaactaccccaagggccccttctggcacgccgtcttccgcgacctgctcggcgacggcatcttcaactccgacggcgagacgtgggtcgcgcagcggaagacggcggcgctcgagttcaccacgcgcacgctgcggacggcaatgtccaggtgggtctcgcggtccatccaccaccggctgctgcccatcctggacgacgcggccgccggcaaggcgcacgtcgacctgcaggacctcctcctccgcctcaccttcgacaacatctgcggcctggcgttcggcaaggaccccgagacgctcgccaagggcttgccggagaacgccttcgcctccgcgttcgaccgcgcgaccgaggccacgctcaaccggttcatcttcccggagtacctgtggcgctgcaagaagtggctgggcctcggcatggagaccacgctggccagcagcgtcgcgcacgtcgaccagtacctcgccgccgtcatcaaggcgcgcaagctcgagctcgcgggcaacggcaagtgcgacaccgtggcgatgcatgacgacctgctgtcccggttcatgcggaagggctcctactcggacgagtcgctgcagcacgtggcgctcaacttcatcctcgcgggccgcgacacatcctccgtggcgctctcctggttcttctggctcgtgtccacccaccccgccgtggagcgcaaggtcgtgcacgagctctgcgccgtgctcgcggcgtcccggggcgcccatgacccggcattgtggctggcggcgcccttcaccttcgaggagctcgacagtctggtctacctcaaggcggcgctctcggagacactccgcttgtacccctccgtcccagaggactccaagcacgtcgtcgccgacgactacctcccggacggcacgttcgtgccggccggctcgtcggtcacgtactccatatactcggcggggcgcatgaagacggtgtggggggaggactgcctcgagttcaggccggagcggtggctgtcggccgacggctccaagttcgagccgcacgactcgtacaagttcgtcgcgtnnnnnnnnnnnnnnnnnnnnnnnntcggcaaggacctcgcctacctgcagatgaagaacatcgccgggagcgtgctcctccgccaccgcctcgccgtcgcgcagggacaccgagtcgagcagaagatgtccctcacgctcttcatgaagaacgggctccgaatggaggtacgtccacgcgacctcgcgcccgtcgccgacgagctccgcggcgcggacgtgagggccaccgcaccatgcgcgtagaagatccgagggccccgctcgcgccaagattcgtgctgatggaggcatggaacattcaatgtgtagataaagagagagtacgagacagtaagtaaattaaatgggtttggtgggaacatttaagccgcttcttctctgaatttaccatccggatcagagaaacttggatttttttttttttgcaaagacgagatctacttggatttggatctgagagagcagaagcggagaagcaaaaaagagaactaaagaaagagcaataatttgtgatgtagctaagatgcagagtactttgatagtatttgttcgagttagtttgtgttggtgaccagccaactattatatttattttattctattcttaagagacattttcttcttttccaagcctcgatctatcactatgtgattctattagcgacttgctaattaatttgtcaaatagatctataagtagtagtaaacgtgtacttaaggttgcctacttcttcacgagaagttcctcagttttccgcatgtaaggcacaatcgttttgctagatttccattgcgaaaagcagaaactctgaggttggcatgatgccgttttcgtccgtgcgcatcgtcgccttgatagcgttctgttgcgcaattagatccagtgagggatcggactgcggagaatttcaggcgcgtaacgacgatgtgcagagagcatgcacttgtcacaggggttaatgtgcaataggcgacagcgatatgtgtttgtgttcagttgctcgtgttgccttctgaagagaggatctgagaaaacgattgatgatgatgttggggcaactggtttagactacatgttggctgtcacgtttggttttggttgatgcaactacataatctaaccacgcctaccttcttttcggcaaggatatatggctttttcgtggactttgacatctcattaaaaaaaaaaagaagtataccacactgcaggcgtgtcagtttcacctagatgtcctgagacaataacagtcttgcgttgcagcaatgaggtcagatccagcggtccagcctccagttcacagtcagagtcctcttccatgtagtacatcctgcaagcaccttacctaaccaaactaaccgagtcaagcaaacaactaatcagtcgtgaatacgggatacttgtaaacgaaattctcgacacacaccaataccagtggctgttttcttgtgcgaaacgggcgcaggaaacacgagggcatggccaattccgttcaacaatcagttttgctgatgcaacttgagcatttcggggcagcaaccatacacgtctcatctatcgcgctggtgctagcacatcgcagttactccgctggtgcatgtatatggacagagcagcgggccacaccgtctccacgcagagtgtcggttcgtcggggtgtcacggacgaactcgtttccccgaacgtttttgtttttgtttttttttttttctggaaagagtgctggaggaggcaatggtgcgcctgtgcacaatttagtcgcatttcgcctgacgattttcctctccaccgtctctctccgttcctctcctctgctcatcttatctgttcgtctgaaaaaaaaaaaccgtttccggcggacgcacgggcggaggctcggccagcgttctcctcctccgcgacaccgactcgcctccgtcgcgcgcgcggccggcgagcagggccggaggcgcagtgcggacgggctgctgctccccttccccgaccccctaccgcactagtattctcccctgtgcggccggccggcgagcatctcggttcgaatcgaagtatcgaattgaaggtattccttctagtttcgtagccctcctctctcttcctcttccatgtgctggtgtgggtaagattgggagtcgattcggacttgattgatttgtttccctgtcacctagccgtcccacctcgtcccgatttgatttgtttgttgcgttcgtggtgcggtactaataacagttttgtgtcctaacaaatttgtgggggttcagctcaaccccgatatcccacgttagatccgccccctggagtgtagaactgtgctttggttgttggtttcgcggagaaatgtaggtatggagccaaggggctgtgacagtttggtaccgggatcagttagctagaactggttcggctccgagtatagtaggatcaccgacttggagagtgtagccatcacatcggtacatgccactctgcttgttaagaagggaatttgccggaggttggaggcactggtgggattaaggaggaggtagaagagcgcaattatgccatattgctgctagctcgacaggaggctgataacacttggacagaaatggcatgaaaggttgacaaatgttttgtgatggcagagacagcctatttagtggcaatcggcaaaacagagataggtgaaactttcagtggtataggagttatctctgacttaaatgatgcacggggcaattagtgacagaataagtactttatctccttggcatttcattttagagcaatgggtggcactgtagttatttgctcacagtaggtgatagtgatgtagcaagcttgaaagcttgacatgtgattttgttcattgtggttttaagatgaaccccaaaggtaagcgttctagtaattgctacttctacctccaacttccaggtattattaaatttaattaaatttaacaaacagcacacagtttgcctttatactctcaatggtcatgtacttctccattaaactcaactcttttgcagttgtgtggaactgtaatgatgcacgctgttagtgacttggtcctcattattgttatttgttaactttcagcctttgtggtgaaggcattaaacagaaatcaaagtagcatgagcaagcactaactgggaatctccataatacagcattccagtgagttgaggacttttttttgtcactacagaaactaaggatacctgcgtgatttcaaaatttcaatgtgtgattagctcagtgaaatcctgtccaacttgtttcatattcaatatgccaccatggtgggggaagtcttcatcaaaagaagtaaagaagactgccaaagaaaacctcattgacacatttcatcggttattaagtccaaatgagcaaaaggggagaacaaaatcacgggggaatcgtagacatagtaaagatccaactgctgagaaaggttgctggtctactgcccaatcacgctctgcatccccttcaaaagaggtttctcgttgtcaaagctttgctgcagccagagcacatgcacaaccacttccccttcctagatcccgtgctatggtggcacgtactgcttctgatattaccgaatcaaaggtcgttttggaaaagcgtggcaaaggacaacaactaccgctccctaccacaaattgggttaaagaaagacctgaaactaccgaacctgttgcagaattatcaactgcttctatctccagccatggttctatagatagcgatgatcctggagatttgcgacttcagggacctgtggcaaatgacaccgacaatgtggctaaagttgctacaaccggtaattcaaggtatccttcttaatccatgatttatccaaacacatttttgtttgtgtactttttttaaaaaatattcttatggatattgattgctctgtttgtgaagtgttgtgcataaggagtgttctagtgccatcaccagaaagggcactaaggaagtgacgatgccaaccaatgctttcttgagtaatcaaattctatctacaagtcccagaggtactgttgttgctgacagttaccagtcaaatttacaaaattcacgaaaggttgttctggacagtgctcccaatagtgtgatgtcaagcccttctcgaagcccaagaatattatgccctgatcagattccaagttcagcattttgggcagttaagcctcatacagatgtaacttttgttgggtctgctcagtgctccagtcctggttcagggcaaacatctgggcataattcagtgggaggtgatatgctagcccagctcttttggcaacctagccgaggtagtccagagtgttcaccaattcccagcccaagaatgacaagccctggtccaagttcaagggtacatagtggaagtgtctctccattgcatccaagggctggtgggatggcacctgaatctccaacaaggcgacttgatgaagggaagaggaagcaaacccacagattgccccttccaccactaagcatatgtaacaattccacctttttgccaaacaattccaccccaactagtcctatctcacatagtcctggtagagtagaaaatccaactagtcctggatcacggtggaagaagggaaagcttgtcggccgtgggacatttggccatgtatacattggctttaacaggtatgccctttcgatgctcggaattggttgatgttcatttttaatttcgatgcaaagcacaatatggttttcatcattaataaatcctacaatggtactaactcattcagctcttgtaatctctcccatatacttatttctcatactacatcctgaatcgtaataaatatcatggtttagtgattagtaaactggcatgttttaaacagagtctcattcagaaatatttcaccttcaaagcctaagacatcattattctttgagagtgtaattattgaagtggtcttgtcacaatgttgtttgtaacaagcactctatatatcctttgagtagtgtgccactgactattttattaggactgatcatcctttgtttctcttcaaatttgatataatataattctctgtcatttgtatcagtgataaaggtgaaatgtgtgcaatgaaggaggtcacccttttctcagacgatcctaaatcaaaagaaagtgcaaagcagttgtgtcaggtatgacatttttctccacgtttactgtccttttctttacgctatcttctctgctcttatattattctttatttaccaggaaatattacttctgaatcgtctgcaacatccaaatattgtacgatactatggatctgaaatggtataaatttatgccaccagttgttatcttctgttaataccactcctgttctttttttacttgttgaacatgtgtgatcattccttttctaacaacacattcataaaaaaaaatccttttctaacaatacatttataaaaaaaaattaaaatctaactacgtgaaggtattttccataacaaatctactagtaccattttcacatatcagatcttttttttttttgcatacactccatcgtttgtttctgttaggcgtatagtttttcaaacttttgcaagatatatgggctccatgcaaatttattaactatattccttatatgtccataattattactagtgtctctcctgcatttataagaagcatctcactaaccatctatttagctatttctaaggtatttaagtatggtaggatggtcaatttaactgctctttctcttggttctgtacaattattgttataaaagttagctgatatagagtaacgacgactaaccttctcgatcgcttcaatcattgatcacccaagacatgtcagatgacgactcaggaacacacgatatttgttaacgaggttcagccgaagcctacatccccggggctctgattatgggtgctcctccccaaccaatatagctcctagccgctacgagtccatggccaagccccatcatctccctgcgtgtctacgctacattgtagtcgccatgattacattgtcgtgcccccctctctatttaagagagatgacaggttacagagtccgactctactctacccctaacacctattacaactccaagtccaactgt

SEQ ID NO: 8985 - DNA, 1485 bp, Oryza sativa
ctgcaggcactgtcttataaagtctctgccctcttctgagaggtgatctggtattggtggaagctccttactgtttcctatcttaaacactgcagcaatctaaaaaacaaagcattgtgtcaacatctggctcataacagatcaatgatttattcctactgccaatccatacaaaatatttaaaaggaacaaaaaagagaggggggggcacttttagaacgaatgttactgcggaacaagagacatgtcaagaatataggaaagaggtgtcgcagattgttaagtagtatttctcataagggcaccttcaacgtgaagcttagatggatgctttggggaaaaaaataggatagcaaaataacatgatgtaaaatccaaaaatagaatggaattaacactaaaaactgctagatctaggtcaatatagtgataatcagtatgcattataataaataaaagattccagttttgacgccaaagggatccattgccccccttagcgaatacatcatgatgcaatgtctcaaaaagtccaagataaatagaaggtgaagaacatataaagaagtctaacatgcaaaacctcaaccaaattttcaatatacaaaaaatatataagcattcacatggtaccggtcatcatgtggttcctgtaccacttgtctgttttatattcaacataaaaaaatgaatacaaaattaaatcattgcatctttaaacaacctttttgttttggaatttttcaaacatagtgtcatgttggattcgtcagatttcatcaaaggggatgctgggcctcctggccaccacaaacttttgctaactaaaaagagcattgggaaaataagacaaaacaatgagccatgctgaacttgtttttttaattaaaataagtactgaagcaaaaccacaacaatgatacagtatccaccattcatcttctatagtactcccttcagccaaaactatatgacatttgacttttttatggtcttcaaaattcactgttgaatcaaatattgtagcaatgtgcagttattcaaaactcgtagcaaagtgccattattcaaaattcaacgttgaatcaaatatggttttacattagaataagtataaaatcttgtaagtttatgatattatgataatacttttcaagtcgaatcgacacataccatttttaagttgaactaagcccattagaagttatgatggtcaaggtttcaaaagtatgaccgtatattgtcctaaacgttcccctaaaaagatagtccgaaacatcaaatatttatgaccaaagggagtaccttctcatgaaaagaaaatgtgtgttgcacaaaaacataaaatacagcttaagagcctagtataagtactaaccccttcatattggctccatggtggttttgaggtagccatctctaaaaccgtgcatcctaagctccatatgtcaacagcaagattacatccattagggctgcaggaat

SEQ ID NO: 8986 - DNA, 4218 bp, Oryza sativa
ttgatcacccaagacatgtcagatgacgactcaggaacacacgatatttgttaacgaggttcagccgaagcctacatccccggggctctgattatgggtgctcctccccaaccaatatagctcctagccgctacgagtccatggccaagccgccatcatctccctgcgtgtctacgctacattgtagtcgccatgattacattgtcgtgcccccctctctatttaagagagatgacaggttacagagtccgactctaactctacccctaacacctattacaactccaagtccaactgtaaccaaataggactagtatattcgacacctattctaacaaactccaccttggcgaatataagccacctagaagtagtagaatcaccatgccgatccacctatcctctagacttgggttgtcttcttcgcagcttcaccgcaagccgcccgacgagtctgcgccagacccgccgccaccaaaagcaattgctatcccagcaaccgcttcctcctggactccacctgcaatagtgcaccctcgcagcttgtaaagttgcgactccaccttctctccagtcatcacagtcgtcttgcccttcatgatctccatggtcttcttattccgattaccgcgaaatattaacccttcttcatgcaaggttccaagcgaaatcagattcctctttagccctggtacatgcctgacaccctgaagaacatgttcacctccatcttctagcttgattttgacttcacctactcccacggctggataacttgtgtcatcgcctaagtagacaaaaccaaactcactagacttgtatgaaaagaaccactccttccttggcgtcacgtgaaacgagctagctgaatctaatatccacgcttctgcatccttagactgtgcacttgacattttgagaagatcacaaccatcgctatctgagtcatttgaagaagtcgctgcattagccttagcttttcccttcagtattgggcacttcttgcttatatgcccccactcatcacatctgaagcactgcaccaccttcttctttttgttcttctttaccttatgcccagcatgatcttctttgactagcaaaccctccgcttgagatgtttcaccctctttgttctttctcatctgatcacgagccaacaacgcagaagtgatctttagttttgatggtctccttgccgtacgtcaaagtagtcaccacatgctcatacgattcaggtaacgaacacaaaagaactatggccttgtcttcatcgtcaacttccacatccatcttcacaagatctgtgactagttgattgaaaacgttcacatgtgctgtcagatccaccccttcctgcatctttagcccatacaacttctgcttcagatacagtttattgtcagagtcttggacataaactgagcttccaacttttcccaaattatctttggtgaggtctcctccatcacatggtacatgacctgatctgaaagacatagccttattgtcgcagccacctgcaactgcatctcctcccaatcgtcatcctccatcttggccggtttgacacccttcaaagcctttgaagcaccttgttgagctaacaaatctttgaccctagtttgccacaagccaaaatttccagagccgtcaaacttcaccaaatcaaatttcatacctgtcggcgccatcttgccaacccgcgacctgactggtctgtcgccaccagaatactcgcccttctcagaaccgtccgtattcgtcttcacaatcccgtcttgtgatccgatctcagacattcaacagcaaaccacctgtccgccgccgcaccgatccaactaatctgcttcacggtttttctccgtcctgcttttggttctgtccggtttgcacacacctgtacgcctgctgtacgatcttgccttgagcccagatttgtgccttccgtggtaagcttacgagtgtctcgatcaattgcccgtcgccttttctgccataggttcacgtcctgaccgctccttaaatagcatcagccaccgggataccgagtccagatcgacttcgagtccggatggacacgtcaagccgagtccgcgtcgatgacataatttcgtgccttatcagaaacggtctcctgaccagctcccacacggaattaggcctttgatgtttgacttctcctcacatcttctctcacggcagcaatccacgtcgtctgttctgcatgcccatgcatgcacgcagcttgtacgtgtcccacacaaatccaattgaaatcgtatgcactcatgcattaagatgcaactaattaatccatgcatggaattaatatcctgcatgcttgcaacaactcgtgcatatctcttgctcttggccaccatctgtacgcgtactgtatgcatgtgacacgtacacatacgtgtcgttcgtgcctctgcacgcaccgcagtcgcagccctcatgttttccgtccacgatcccgtcgtcatcggccttgcacgtccgccgcgccgtgccacgctcgccggcttcgcccttccgtcactggcctccctgccgcgttcgccgcgtgcgtcgggcgcgccgtccatggcgctacccctccgatctctccggtcgccttcggccacgctcggccccgtcttccggtcaagttccgccatcgccggtctgatcgcgagcgaggttgtcacctccgcaacgtcctcgttgtcgccatcgatctcatcgccacggctgacgatctcctgtcgatgcgcgacccccacctcgtgtttcctcctccacatgtcttcttgatccaatgttgaaaccttctgctctgataccacttgttataaaagttagccgatatagcggaacgacgactaaccttctcgatcgcttcaatcattaatcacccaagacatgccagatgacgacacaggaacacacgatatttgttaacgaggttcagccgaagcctacatccccggggctctgattatgggcgctcctccccaaccaatatagctcctagccgctacgagtccatggccatgccgccatcatctccctgcgtgtctacgctacattgtagtcgccatgattacattgtggtgccccctctctatttaagagagatgacaggttacagagtccgactctaactctacccctaacacctattacaactccaagtccaaccgtaaccaaataggactagtatattcgacacctattctaacaattcttaatctttgtgccctcaaaataagccttatattttgaaacagttggggggggggtactagctaaatgcaggtggctttgcaacagataaaaataaatgcatgtcttattggtacaaaatgtagttcatagttggtgggtggcagattcactgtcaccaccgctacactgtcttccttcagaaggagtacagatttgtgggttagtttcaaggtttgactgcatgaccaatgtgcgtacccgcattattatttcttgcactgcactgtactctctgatgatgacatatgccactgaactataatatttctctgaacacttctctgtaaggaaacgtagcaaaaaagttcatgccacattctgcagaattttacgaacttcacttttgcttgcactcctgactcctctgtttactttaaaaataactatacactatccatttattcaaaacaggttgatgataaactttatatatacctggagtatgtttctggtggatccatccataaactactccaggagtatgggcaatttggtgaacctgctatccgcagttataccaagcaaatacttttaggcttggcttatctgcatgcaaaaaatacggttcacaggtaacattccatttccttttgtcgttagttcagcacttcagttccttagatgtaagctaccaagttgtagattattttattatttgtcatgttccataatttgcagggacattaaaggtgcaaacatactggtagatcctaatggtcgtgtaaagcttgctgacttcggaatggcaaaacatgtaaattctctgtttcaaattgtaaaaaaaaaaatctttctcatttgtcaggaataactaaaatttaaagcaaaagcattattagatgtaattccttgtatcatcttcataggaagaaatggtgtattgtgctttaccctttccctcgtgttctcttgcacttgaggactaccacttgtgctagatca

SEQ ID NO: 8987 - DNA, 6555 bp, Oryza sativa
ctgtttttattgtgtttcataaaattatcaaaaataattgctactaccctccatcaatgcttgcatgcatgcattttatcggtctttaaaatgatttttcttctaaactacttatccaatctatgattcgattacaccgttgtattcgttgtaattaaatctttataataaaatatcacacgattaaattttgatgaaagaaaaatatatgtttcaatctattaactcttattgtttcataagtgatagcaatatgtttcaacgtgtatcttcactgtgtttcataaattttttaaatgttttagttgctgtttttttgtttcaccatatataaattaatgtttcacttgttggtcagctgcaacattttgaccgaccgatgttttttttgatatatcggacgttcgattggtagtattctccccaaagttccaaacacaccctagttgtttttttgtttcaaccgggctggggttgggaggagatggaacagatggagaccgagccaccaaaaagcccaaacctgtaacaacaccccactgacccagcagcgtaataggcctcttgcctccttgcgttgcgacccagccccctgtcccctggcctcccctcctccagcacccgttccgtctccttcgcccgccgcctacgccgtcgcgccgatctccatcaccgcgagtagcggcgccggcgtcgtgctgcttccggcttccgccgcatattctcgcctctgactccttgcgcgcaagccagtctccacgtcacatcagcctcgactcccgtctcctcgcgagttcgtcggccgcctgcgtcgacctcttatacatcgcgcgagcagcggtgccgtcgccctgctgcttccgcctccggtgagtacccgtgccgaagcacatcctctttctttctcatccattactaccttcacattttctctttgcccttaccttatctttctcttctagatctagaagcttaggtttttctttgtcttaaccttagtactaactttttttttagaagatagaacatatttgatccgacttttgtaagaaagccaaagaaacttactgtagttcatcatccaacgaaaagaaaaaaaacagattcctaccaacgacactagacaccacaaacagactactgggttgcaagtttcagaagtaacatcagggccataggcaacgacatcagaccctgtttagatgagactaaaactgttaagtccctatcacatcggatgtttggaaactaattataaatattaaacgtagactattaataaaacccatccataatcttggactaattcgcgagacaaatctattgagcctaattaatccatgattagcttatgtgatgctacagtaaacattctctaattatggattaattaggcttaaaaaaattatctcggaaattagcttttatttatgtaattagtttcgtaagtagtctatatttaatactctaaattagtgtctaaatatagagactaaagttaagtccctcgatccaaacaccacctcaaacacctccaaaaacactcaaaacagaaagtgacaggattacagttctcatagctaaacttcagacattcagctatccatcaatctccattggcagcacgtcaggagacttcagcacttgaatattatgctccataattcgatcacaccacacctgcagcatactgtgctcctattcattttacaggaccatccatctctgaatctgcgcaatcattttatacaagattgtctagggtgattttaacacaatgatttggaaaacaaagccattcctagtaagccacaaaacacaagccccaacaaccttattactgactaagagtaccccacacgatgttgtgggtttgtttgtgattatgcatatttatgttcatggtaaaatgaggatgcgggtacagtaactaaattttactatcgacgtacaatatcacaatagatcttttacctatcaatggaagcatatgaccattgatggatgagatatcatcagcaaaatggaatttttgaagcatggcatctttgcaactgaattttattactctcaccattgatcagcatggatccaggcctagggcagctagagctcaagccctagttctgggatccaaaccccatgcaaattccatattaattttagaaagaatgcttgaatttatagagagctaggacaaggtaatagaactaagccctggtgtggcttcaagctgtctccgcccctgaaattgatctcaacgttaactcatggttctgatgtttttttcttgaacgtttttggtagtatgactaagccttggaaggtttttatgtgtaccttggaagtgcttttgctgtacagaaagaaaaggagattatgaggagggttttagaggaaattaacgtgttctttatatgcactgcaaacggcttgtcaaactgttgtggttaattactgacaattggcaagagtcgcaacatattttgcttcaatttttttccggacaacactgttgttttggcttctttacctttttacggacaacagtgttggtttggctgctttgccttgacagttaatcacgtagcaaacttcctcaacaaaggcagttgcaattcatatatctaatggtcattatcccttttcctttgatccaagagcttctactttttttaatggtgtgtcttaacagggaggcgctgtgtgtggtcaaaaattaaaggagagggagggagaggtagcatatttctcccccaaaacgtttgggggttcagctgaacccccatgccccaccggtaggtctcacagaattgtacatcatgcaaccttttctcctgaatttccagggttacgggacagtttgcatggcatgatcatattttgctaaggttctattagagtgtcattcgatggcccatttcatggacttaagggctttcatcctgcgtgcacgtgttttaaagctttataggcaggccttgcgcatgactcgccgagctcctgtgcatgcacgcggtcagacatttttaaacctcgctttcctatcttttctgtctaatgtttactcttgaagttacaactaaatattcttgaatgttctttgtccagatgagttgaggcaaactgtaagagctgagattgaaaaaaatcgccgttgtgacgataaacagaagattaagttcttgatcagtgaaggtctgcaacgattaaaaggtcttgatgagatgcttgacatgacaggaaatagttaacttgagtttcatgtgggaatctactgttgtattcaattctctcatggatccatgtagttatataacacactttaccctttacaaagggcaagacatttgttgttctctagtttcatctgcggaacctgtacaatatttggggctggattggggttaggttggctcagaactacagatcatggaccttttctagaagtcagctggtttccacaccaagatattttggttaattgttttctgtaactttcttatcaagggatgtaaagtcgaggatagttctgtattttttttctcacacttaacatagaacaggactgaaggtttttccagttttgagctaattggttttcaattgtactatcctttcatgtgaaattacgaacagaattgatgccattgaaattacttcttttgatcactgaaatttctagtatcgacgaagaactaacaatcaagaaagtctgcctgcttattacgcccatgtaaccattcttccatcaaactttttgtcaacatagaacgagctattaaatggtgctactttaagaaagaggaaataactaatactacaatacgtaaagggcagaaacagatctgctgctgtgtctaaaattttaagcttcaatccctaaagctcttccggtactgacaaaatcataaacatttgacaaaaaaggaagaaagatgaaactttggatcgtttcagcagagattcatagcaacaagttaacctcaaggaactgacccagaaacacataagtagtacatcagaacttgacttcaagcagcatcaggtaacataacccagaaattcacaagtacagcacaacaacagaactgaacccagatttactagcatcaggacttcaggattcaacagttcaaaagccaaatctggatttcccccacacaaggatgtaaaattttacagctgcaggccttggatattcgtcaaagatatctcaaagcaacataaagattgtcatctaaattggaaaaatgtcttctgaaaaacatgaatgtgttatcaacaacaagtttggtctattcacagtattagctattccattcattcatcacctagaataaatccgggcaaaattgttgacctgtcagagtaggaaagggctgaaacctgcataagcctactgatttctaccaacaattagagcaccaaggcaatttacacgcagccccgaatcctccaaaaaaaaacacaagatagccaacaagaaatcgccaagaaccgctctccagagcctagaaactgacgatgacgatcgacgagaactcatcaagaactcgtcaagaaccaagaactgacccatgatcgggagggcggcgacgctgccatctcaagaattcagagcaggcttggtgcgcggcggcgaggtccccggcgactgcgtggtgacccaggcgttgcagacggggcagcgcggcgagatggtgagccaccggtcgacgcagtcctggtgaaaggcgcggctgcatccggggaggacgcgcacggcgcgcccggcctccatgccgtcgaggcagatcgggcagagctgctcctcctcctcttcctcgccatccccggccaccgccacgcagatcccgcccagcatcctcagctcctcctccgagagcccgttcttgtcgtcctcctccgtctccggcgtgcagggcggcgtcggcggcggcggcgggtccggaggcggcccccgcgccacggcctggaacaggtagcagagccagacgcccagcaccccgagcatcccgatggccagcgacgccacgcccacgtacagcgcccagagctcctggctctccatcccccctctctctctctctctctctctctctctctctctctctctctctctctctctccccctctgcacagagcaattcgttggtttgatcggaggcgaggcagttgctagccgtagcgatggcgatggcggtggcgcgctggacgttttataggtgaggccgtcgcggtgccgatctaatgggcctcagaggccgggaaagtctaggcccacaagctctcagtcaaggcccatttagaggtccagttctagaaccattggggaggaagaatcagtatcggagagtgaatttggagcgaggcaataagatctcagcggaggaggagacgagggggagggagacccagcgagggaggagaggaggattccgagcgctgcagccagccatggcgaagcaaggggtgaagaagacgagggacgcgaacaagaagcggatggacctcatcctgcgcctaatcctcgcggccaacgtgagcggtccccgtgattccctcccccccttctgttttcagatccgtgaattgcttaggacgctgctagatggttggtttttggttagattttatttttggcagtggtcgtgtgatacatgagtttgggggtggtaattttggtgaagaattgaattggactagctgatcttgcctggtccctggagtagttgtctgggctatggtagttatcgtgttcagtcttcttcttttatttatttattatttttttgggaaggtttgagtcttgcatgtcaaggtactcagtgagagggaggaaagctctagcgtagttttgtcttgtagaatcaccttcccttctgacctcaacatgttctgtgatggattctaagtttgtttgtggaacatgtcatgttttggtcatatcatgggaaaatttatgatcacaaaagttcatgatagaaaggttataatcttgccttggcggcgattaggtgcttggtgccatcttgcctccatgcattgcattgatgcattttattttgttcaacaaggttatgtatacatggttctctttggtacttcttttcataaaaattgaagtaaatttagggtaattagaaggttataaagatcactaaaccccaagtcctcactctgataagatcaaacttatgctctttattcttgactaccggagtaataatcacttgaattttatgccctttgtgtcgtacttaaaccagaaagaaattaggagtatcacttaccaggagtatctcagggcatctttcactggcttctagcctactgcatctgcgaaagttgctaatgcaatcgaataaattagagaaagaaaagaagatgaaatcatctcatatccaatattcctgtggggggttttggtttgtaaggttggaatttggatattggtgggtctattctggatctcaaatttagttttataacctattatcttaaacactatatagctttggcaatattaatatttctcctaaaaatgccagt

SEQ ID NO: 8988 - DNA, 7905 bp, Oryza sativa
cccccgcggcgtgctcgccgtggagtcggtgttcgggctcacattccccgccccaccgccatcctggccggggaacgcgaacggctcgcggcaaggcccctccccgtcgatcctcacgaccacctccccttcctcgccgccgtcacgatcggccgccagtccggaccgctcatcgaacacccccgatcccacccgcggcgaggacttgcctgagccatgcgacctcaggctactcttccgccgcacctgctccatcgccgccggccaagaaacgcccactccaaagatagctagtactagtagccactctcctcctcctcctccctctccccccactcctctcggccggcgtctctgctatacttagccagagtttaactaggggattaatactgcctctcgtttcagttaacgatgcgatggaacgttccggaacaacgtggaggcgcgcagctagctgccaacgcttgtcctcctttccgccacccccgcatcggggcgcgcacggaagccgcgtcttccgtgtaccggcacagccactcgcgccggcggcaacgagcggcgcggggtttggtggccactccacgtacgtggcatggcatggcaggtgttcggtacatgatcaggaacaggatcaattagaatatgtgattagtggtaaccaaacgattgtggtccgtgtaattctgtatgtgttcgaatcttctgtgggcgagactagcggcggggattcgggagtgcgtgtcgcaattagcattttgtaaagaaataaaaatgattgtaagtggaattagcattcggtaactaagatttagaaactgtgattaacgaggaagattatataatcagggcactaaaaaggctgtgtggtgagaacgtgaactgctgtggctagtggccatttttgtattgggtaacggcgacgggaaaagtttagcatcttggtgatggatctcagggttgtggtgatttgtgggtggcagtggcactgtggtgctgactgatctcaaggtcttggtaattgtggaactcacggtcgtgattgtgggattgctgtgatggatctcacggtcttggtgaatgtggatcacacggtcgtggcggttgtgtttgtgccggccatgtttcagagaaaagtttcgctccatagacgcaaaaaaacgatccatatacacgagcaacatgtgatctctgctttcagttccgtctcttgcctaaacactccattggcatgtccgtttcttggttactgtcatataatctcgtgatttagatagatggtcatcatttcgtcataaagacatgcactggcatgggagcacggccaagatttggaatggactgtgcaaacagctatctttgttctgtttggcaggcatgtaggaaacgaacaaaaaaacgtttagtcggtccaaatcagggtgcagcgattagcaccatatctgatcaggccaccagctaagtaacatgttagggtgggcctcaaaagcaaacagaagcaagacagcaagtacagaacatatggcatgcgaatgggattctatatatctggaggcgacgcgacgtggagcaacacaacaaatgaaactcgtgtgtcctatgttagcttcggttccgtttgcatcccgttcgtgggaaaccaggtatgatggattcgttgtacaatattggacagatcaccaattcaccatcgctttcgtcaaccgagcatcatgtgtgtgtgctccctttctactccctagtagcttgacttgagacctaaaaaaagcacagttcctacctcgcatatgttcctagatatgctcaccacatcaataccggtaaagaagaacgatacgtgtacgtgcgaaatctcgcgacagacagataagtgcggtcatacgcaagagagacgacctgcaggcaacgaaaagctgctgcaattttttttttcgtctgtatatttactgttcagtaaacgcgcacggcctgagctggctcgtagcaggtcaatccaacgaccgcgacgaggccctgagatttcagttcacaccacggtgccagctactttacgcctcggccggctatgcagcctccctccggcaactgcaaggatgtacagtacgtgcgctgctagattgcgccttcgtctcgtttcataccggccggtgacgcggcagcgcgagcggccatggcgctctgcatgcgcaaggggaggacggtacagttgtatgggccaaaccagagtaccagacacgcgccggctgtcgcgtggcgtgtttccgcggaaatcgtagtagtaggtgtgcgtgttcggctgttcggttttggcggcttgccgtcgacagtgatgtgcccatgcactgcgcgacgcgcctggtgttttcagatgtattttctgtcctccgtttttttggcctctcgtggcgtcgtctatcacgtaaactaggctcgcgcgttacgtcgtgagttgttacttgttagcttcgcgtttgtagagttcaacgagaggacaacacgaacttgcaagcagttaaggcagaccaaaaagaaggataggcatgcgggcagtcgggcacgcacaccagtcgggagtatttatcaagtatcatgcaaatgaaaaggaggtatatgcttcgtcagagccaggtgagcccggtcaggtagaaaggagattagcactttaactactgtgataggattggacgaatgtaaaagaataattaaagggataccctctccgttgtaggttacaacacgctttgactttgattaaaatcaaactactttaaattcgactaaatttataaataagtagtttcattaaatcgataattaaatatatttttataataaatttatcttaggttgaaaatattttttttacaagtttagtcaagcttgaatcagtttgactttaactaaagttaaaacatcttataacctgaaatagaggtagtaattatttacatgatgaaaaatttaaaagtaatccatagttacagtttagagtgttgtttcggtccttctttttgtaccacgtggtactagtaccatgagatactaaaatcctgaccgttgttggtcattggtgtggttagcgcgagagagccacggtggaagggtataatcgtaaatggagggatttttggatcggtgcaaggtttggctgagttggggaagcgcggcagagtagcagaaccctaggtggcggcggtggtatcccgttcgcggcggcggcggcggcggcggcgcatccttggttctctgggaagagctgcagaaggcaaaccatcggtttgccattctccccttcgcggcggcgcctcatccattcctctcgacaccgcctttttccccttgtccaaatcgtcgcgggacttcgatgtatgcgtgcgtgttcggccatggatgagtgaagcttacaatttcaggaaagtacaagaagatgtttgagatggatatgaagtacaagcacacaatttgttctagacgtttgataaatttgtcatgctcttgtccgttcctgtagtattggaggcattttataatggagtcattggactgtaatcaatcttgatgtgttttcctgtaatattacgttttcaagctgtgttttggtattggttacttctggaattgaagagatgagtttaatgacatggttgcagctagttttatatttctgtatgttttatggtacatgcaatgcttggtgatttctggaattgaagatatgatggatgtattgcaatttggagttgtactgacatggctgaagctaactattttatctgtatgtgaacatggtatatgtgaatctgaaaatgatgtacttcactcatgcatgagactgacagccacattcataattttgatgtcatttcagatgtgagaaatccgaaaagcattgttaaaattgatatgttaaattgcaggtagcaaagtacagctcagacataatatagtcaacagtgatacatatactctgaaatcttgtacataagaattacaataacaactagggaacccatgaaccaacttctagcgtggtctgcctcttttttgagctttgaaatttttttcttatatgttgcttcggtagccaaaatcctggcagccatctcaaattcaagtttcattttgtcttcctcaactttcgctctatcaatatagttagaccattcatattgccgcctggttggatttgtcatgctagtacgatccaatgcaagccaaagcttctcgaatgccttctgcactcttggatgccatcttggtctacccagattaaagtatcgcattggtcaacctcctgtaacattggttatttcatagtattattatgcaaattttcttgcagcgaaacaatggtgaacatactcaaatccggtcaaacaaaaaacgaacagcagaataaaatcaaacaaaagcttactggccactgcggcggatggcgcagaggatggcgccggccttgcagctgctgcgccggccacggcggcggcgaaccttgaagcgtatggcaccggcccttgcagctgcaccgccggccactgcggcggcggaccttgcagcggcggcggcgacgactcctgcggccgcggcgctgccaggatgtcaccacccgtacggcgacggttacagaagcgctcgccctcctcctcagatgaacacccgtgcggcggcgctagcgtgagatgcgatgggcgacggtatcgtgagatgcgatggggatgacctaaacgaagccgcacgtagctagaaacgttgggaccccacaccggagcgaacctcgcgcatactcccatccccatcgtacccctcagcaatcaacggccggatgaagactggtacctcatggtactggtaccgtgcggtacaaaacgatggacgagagaaaatctatacagtttaagggcatgttcactttgatgtcattttcaaccataccattatttgtcaaagttgcaaaaaaaatatatacgtttagtttgttgccaaatttgaccaatacataagaaatcctgccaaaattttggcaatattgccgtcttgctataattttggtattgccaaaacttgtaaggttcattttggctacaatctgaatatgccataaatcagaaagctaaaattgtcaaatattaagaaagatattgccgctagcctgctacactccttcctatccatacattatcgtacttataccaatttgttccttaagagaatagagaattgaagtaggaacaacttgagattggatgccaaaaaagcttacgctggaggatctatttgactagaggcggaaaaccctaatgcaccggcgcatgcaaccaaccacattggattttttacaatttggtccttttcaaaaactaattttacaaataaactcctagaaaaacttatcccataaatgatcctttttgggacgtcagagttgctggtgccatggttcaataggacagcgcgacgccaaaagggtcctcgccaaggcggtgcaagatgggcagcgtgaacgcagtgtcttctcgctccccgtctccgcgatccccaacacgtccctcccctcaagcacccgcgggatgcactgccgctgcacgaccatggggctatgcatcccctagtaaatcgcacacatccactagccattgcgatagcccaagttcgacgaaggtggacagcaccatagcggattccgcggcggcggtggtggccacgacagtagggcctagttggagtcacaatgttcgggctccatgacgcggagctagggtttaggggttctagctggggctcagcttcttgcttgggtttcttcttgctggacttgggcttggagaagaggaggaaggggcgggctacgccgtcgacctccatggattgcaggcttcgtggtgatggaggcggaagagggtttctggaagggaggaagcaaagcacgcagggtaagacggggacgcacgcacgcgaatttgggaaaagcactaagaaatggtagcctccctgcccacctagaagaggcagctagcggcggtgaaggcggagttgccgccggatgcgctgggtgcgctccacgtcgaagtcctcgacaacatcatcgaccgccttcacatctacgaggtggttcgcacctcggtgctctcatgtgcatggtggggctgctgggagtcgctgcccttcgtcgacctaacctggagccccgacgtcgcggcatccgacgtcgacgtgatcctcctccgacgctctgccaccgatggccgttacgcgccattcctttcccgccagccgcagcgttcatcggcgggttcgactcactcgggcaagccgagggcctcacgcaccggtcgaatgtcgtagactcaccatcaccgatgaagagaggggagaggaggaaagagggagcccccgtgggccccaccatttttatttttttttgggtgtaactaactatcatggttaaaaataaagtattcctcaaatcctacgacttatcgaatatgcggatacggcatacctttgtatatatgatgtatttccgtatacaataaggaaattcacaagctgttatggaaattatcctcacaagaagaggaatgttagagtcctactcaaagaggattgggttgatactatatagtgtagggtctgttgtcttcgagttctactttgagactaagatgactcagggtataaaaggcacaccacttagaggggttcagatcattgaatcatagtgccaaacacaatcgccatagcctacaatccggaggacgtgaagcctacttgccgggagatctcatcgaaaccatctcgacaagggatctcgccggtaatatcaggatcgtcggttctttattgtaatatgtggtatttccatatctatctcatataaactagattaaggcttctaccttacgaaggcccgaattagtataatccttgttttcttgtttgcttgatgtcatatcgtataaatccttgtaccaacgtaccccaatactctattcatctggtctacgagtatccccatcgacactaacatgtagggtcacgattatattatttgccaaaccaaactgccacgtaagcgccatgtcaatgccacgtcagatgaagaccgagtcaaattagccacatagacatcacgtcagctgaaaccgccgtccaaaccatcattggaacttattttgcactagttttgatagttgagggacccgttacgtattgttttccgattgaaggatcaaaatcggattcttgataagttaagggccctcagatgaacttattcgcccgcaataatcttaacaggctataccgtgtgatgagatgggccgtggaaggtctattgtggcttaagctcaaaatagtgtaattggttcgaccattcctgacatctccattgcggccgaggtgctgagcaggccttcaatgcagtgggtctctccgctcatacgggaccagctcaaagcttcagtctcgcggtctcgccagtagtagctagccagccacgagccagagtgagccagccgcccccacattactccgcggtcgcccaacggccgccaccctcgcggcgcacacagctccaaactttggaaacgaaaacccctcgcgttccacttaaaaacctcgccacaatccgttgcgcttactatcaacgaagaggctcccagacctgttgcgctttgcgcctcgccacaatccaccactgtgccctctatcgctcacgcggtcacgcccatcgcgccgcgcggctcccgagatggcacggcacgcgaagacggactccgacgtgacgagcctggcgccgtcctcgccgccgcggtcgccgcgccggtcggcctactacgtgctcagccccgccgcctcccacccggacgtcgtggtggcctcgggcggcgcaggcggcggcggcgg

SEQ ID NO: 8989 - DNA, 13758 bp, Oryza sativa
cgtgcaccactcccgggagtcttccaccggccgcctcctcttctccgaccagctccgctccggcgccgctgccggcgtcccctggcgacgccttgcgcagggcagcggcgccggcagcgtcggggacgacgacgacgacgaaggaggactcgccggggccgcctcgcagtggaggtgctacgccctcggggcgttcgccttcgtggccgtgttcgccttcttcctgctcgtgctctggggcgccagcaagtcatacaagccccacgtcgtcgtcaaggtgcgtctctcacctcttggcttcctcgttcactctcgttttcccaagaaatcaacactggccattttagccgtcctgcgagtagagatggtagtgtagagtgtacatttccgtttatttccttcaccttctcaaacgaacaactaagtagaaaatttagaaatgtactataacccctgtcaatctgcccaaatgttttcgattgaatgcaactatatgcaagttttgagatatcggtactggcaccgattgcccccgtcttccttccaagagaagagaaacacaagctgtgtacatccaatctgaatgcatgcatttactagaggcagcgtccgttccgacgatcgtacacgcattttgccaatgaacagctgtaggagtactcctacctagtaaaagcatccgcgaaacatgcacacaggaatactaggagaacgagtactacttaaaacaatataggagcaggagtttttgcttcctggacatcatgcggaattgcggatattgcgatcaatttgctagccgtttctgtgctggtgccattctagtgaatcaattgaaatttgaaaggagtataaaatgtagtagtgctactccattattgacttgctgtacgatttgctgttcctctccatgtgtgtgtagagtgtggtgttcgagacgtaccacatccagggcggcacggaccggacgggcgtcccgaccaagatgatgtccgtcaacgcgacggtcaggctgcgcttccgcaaccggggcaccttcttcagcctgcacgtcacctccacgccgttccacctcttctacgacgacctcaccgtcgccaccggccacgtacgtgccctttccaccaccccaaccctcgcctttctgctcgtacttctacctgaatttgcctatgccatcctcgttacgtttggtgaatctgaatggattgggtaggtgatgcggacgtttccgtgcctgattaggctggcgtaaatcgatggtagttattgctagttactgcgtaacaactcacaaacaaacgggtgaatcaagagttggatctgggctctgtacaatggatcagtagggttgtcccgattattcgtactgtgctcttcattactaacatgagttctatcacgactatagtggagtactaatctcctatgccattccgaccgtgatgccagcagtccgtggaatttttgccggtttagatcagcttttgagcatccccatgaacatcatagtgtggtggagtatactaacctactgcctaggtgcgggagaaagctaaacctaacagcacggttcccttcttatttgtctctgtccttgattagttttttcggcagctcttcactcggaagacagaacaaagttgcgttttaaaaaaccggctcctccattgtcatcctcgaaccggggatagcttgcagccttgcattgccatttgcttcctcgacggagtggatcatctcagatgagacttcgcagccatgcattggggctattctgaggcgctgttggacttaagcatgatagtgcattgttttgagaatttgagtgtgcagcagcttgcattcggccattcaggcaggacttggatttagcgttttacacacagaacctcttagcgtttacacacacacagacggtgagctcgtgagtcgttccgcagtaacaaaaatatcatctgtcaagttacccgctcggctaactgcagcgattttctttcactagaatactggtgagtctggtagtactgtgcaaagtgggggcgaagtgcatgtgatcaagtaacaaatactcctactactactagtactacacagaaccagcaaaaaggggacctggaatggaaacgcaataacacccagaggcaagcagtggcgtcattggctatcggtgggcatggtgttcacgtgactcgagtcagggatgccatcgcttgccatttgccgatatgagcagattttttgttcttgtcacggcacaaagaccagccggtaactgatgtaaggactgaccggttgagaacgactactcttcagcctccctctgctatagtttttttagaggaaaaagacaacacttccctgatgactgtcttgccgctgctgcatgcgctaccactggatactccgttgcatagtacaggcaaagagccaatgtgatatgtcaggcctttgttccatcttcaacgtcaacactcaaaaggattgccttttggcaagtactataagcacctttatataagcccttttatgttgcccctaaatttaccacgtagattaggtgatgagtcggaggagaggagttaggagagagagaatgagccacccctcatgcaaggggcaatctccacacaatctccaagaaaaatataagatgatgtgtgagagtaaactaatattggggtttgtgtactagaggtgacatgttgtaattgttatctcttaattaatgaaaagatgacatggtttaaattagacgtggcactcacctccaccataaaacttgcccttagggcatgcccaaccctccaccttggagggtatccctagctcgccccactttttcgcccgggaccatcgccctgcaaagaatcgcggacctctgcagagcgccgcgcacctctgctcgccccggctcgagaacagcgaagcacgcttggagcggcacgttggcgaggtcgtctccccgtgacggatccacgatggaagatgccgccgccgggaagctccgccggccaccgacgcatcgatctgctccgctactgtggaagaagatggcgaaggggtggactcgagagaaaggcgtacccgggaagctccgtctctgccgcgtcgctccctgccgctgacgcgtcgatccgcggccgtcgcgtcgatccacgtcgccgctgcttcgatccgccgctgccgcctcgatccccacctcctgcgcctccatctgccgccaccgcgtcgatctgtggccgcagccgcttcgatccgcgcccgctgccacgatccccacctccagcggctgctcgatctgctgccgccgggaagctccgccgccaccgctgctcgaggcgccgaggagagagaggggaggtcgtgctggggagggcgccgccggagaaggggaaatcgcgccaccaggaggacgggaatcgagccaaggaggggagcctagtgatttttagggggtatactgctaatattggatgtatatgtaaataaaaataatccaagggtttaaatgtaaaatatgaccgactgacaggtgctgcagtgtaaaaatgagatgtgggtaagggtgcgccctgcattgggcatgcccttactgcttttctatgtttcagacatcacacctttagcttacgttactttaccgtagttacagtacttttgccgtacgctttgtttactctgtgctgcggcgagggaatccttttgctgtacaagatgatggcccccagtgcgcagcaacccagccctatcatggttcatagactcattgacttgctgtgcatgttccggtctgtatttttgttccttgttttctaccggacggtaaatagtgcaagtgcaatttttctcattccgacagaaaagtttcccgtgcaataatatactggaagtacaatttattcggaggatgcacaaccaaaccgcactacagtacactgcactgaacgatcgtgttgcgtgtgtgctcactcatgcgtgcagatggcggagttctatcagccgcggcggagcgggcgcgtggtgacggtgtccgtggtggggaagcaggtgccgctctacggcgccggcgcggagctgcacagcaagcccaacaacggccgcctcggccccgcggtggtgcccgtcaggatggccttcgtgctgcgggcgcgcgcccacatcctcggcctcctcgtccgctccaagttctaccgccgcgtcctctgccgcctcgacgtccgcgaggcaagcctcggcaagcccgtccacggcgtcgccgccgactgcgagtaccacgacgggaggtgaccacgggcccttgcattcagacgctgcgtcgataccgtgggcgtggattgttaattggaagctctgaaactagacttctgggggtggtagtagtattggtaacacgaggtaaaatccaatccgttgtaatggaacaagtgttgatgctaacagtaatcctgctaattctagaaaattttacttgctgttgaaatctgtactaccattggcattaactcatgtctgaagctccggccgaaatatgtaggccatcattccagcaatatacactactaggtgatattacaacaagctgggctggcttctatgacatagcagttgtcaatttactatctgaagaagaatccttcccttccctgatggagatttgcagaggaataggggaatagtcattcgcccatcaggatagtagacaatgggatggtttcacgttggccaaatttacaatgtacagtatgtaaatttacaatggtttcaggttggccaaatttacaatctactagcatactcatcatgcttgctcatgctgcacaatggccaacatctcacttgcaccagattgccctgctcgcatcctcatgctgataatgaaggcaatgagctgcagagtagatatactctattcttagtatggcataaaaagtgtgcactgaacatattcagttgaaatcttaccgtacaaaagccagcacacatgatactgaaacctttgaatttgaatggcgctgtttctgaaaggacccatgctgccgcaagaaagcaaaagctatggagtaaattaaaggaaacaagggttataaactaggatttatttacaaatgaaaaaaatacctgttagaggggtaaaaattagtggagctaatatgctggcaaacgagcttatgcccgatatacagccttgagcaattccctaagaggcaacaccaaagtaataggaataatgagcgaaacttagcagtcatgtcaactaatacaacacaggtcatcatttgaaatactcaaagacaatgatcagcaacaataggaaaaaccaacctgctcatttgatccaacactcttcgatacattggttcttatctagaaaaacagagaagaagatgattaatattgttctgaattgcttggaaggaaaaaagtttttaataaactgttgggaaaaatatggcttacagaagggtgaacaaaagcactcagaattataaacaccgcagataaatatggtacctgtagatgattaagacaacgttagcgaagatatgtgtaatggatgactgatattggtttagtgaatgctggaaacgcactattgcactgctgaaccagcaagcaactaaacctgattgcaaattagtgcaaaacaagagcgtagttctgtctatacatttggatatagccaaaattgcattcttttgggtaagagtctaataagactacaagagaattattgccaagtccaaaggaagtacccaatatgaccatgcaatgccatacaggaaaacctgaaatataatacaaaattgttcagggattacaatcacactcgctgacattattgcataacggttcaaaaatgcaagggaaagaagctgttacatgagtacatcctcctaggagtcctataataagcagtatatcctcgccaacaaatcgagccaagaccggcattacagtcagctgaacagcatgttatcattagtcagaaatcagaaaatgtaaaaaaagcaattcctactccgggctggaaagcctaccatataacagttctgctgaaaaaaaaaatacaatcgtacctgtgacagcattcctgcagcaccagcaattaacagaagattagcgaactcatctttgctgtaaccaaactgtgccttcaggtagtactgcagacacatcaaccgtaaaagaaaattcgtgttaaatttaactgacattgaaactgaatacttgtcagattaggtgggggatagacaccagtaatgcagtctgaagcccatgttccccaagactgtaaaagaaggtaacaattgctgcccctgacagggtcaaactacaggcagcagcaatgactcatcagcacattacagtttatagtcaaaattccatcaaacataggtgtcaataaactctaacaaaagaatatgagtatcggcacgaattgcagttaggcaagaaagaacttaacctgccagtgagaagcgaaaccatgtctgacaacgacggcaccccgcccttgtgcggcggaagtctcggtgagatctcctcatcggaggaggacgaagacgaagtcgcggcggagcaggatgagccttgtaggaagggatcacatgcttcgtcaacgaaggagttggctccgccggaatctgggacaacggccctgagatagatggccgtcgccgcggcgacggccgccgccacctggaaggtggttgatgtctggaggaaccgcgcggtgagtgttccggagacgaaccccgctgccgacacgccggagaggagcccgaacgccgccgctcgccgcctggcgccgacttggtcggcctgcgtccacaaacttcacctggtcaaggactccctgattgggcggtgggccgcccacttctgttacgctgacgagtgggcctaatcgccgtattttccgtttgttcagttgtactgtattggtagtttgtcctttactcctttttgtgtggtagtatacattctttctgttgtcgtaattgtacaggtcacatgttctcgttaaatatacgtattcgttattcaggatgcgtatctcaataactttgaaatatgtatttggatgatcgatctatcatagtgaggttttcattaccacgtaggcgagcaagaggcaatgcatgctgccctcgcagaagatgccggcgaggaccttaacgacgtagtacacgtagaagtacaccttggagcggttgcaggccagtataactgccagaaaaaaaagtggaaaacatatgaaaatgtgcacagatgcattatgcagtttcatcaagctagggtgacccaagtcatgctgcaaagagcatacacaacggcagaatggccacggtcaccggcagtgtcatcagcgccttcctgccgtatttgtccgacaaattccccacgatgggagtcaccacaagagcccccatccctgtgatctgcgcaaattagccaaaagccgttccattttcacaaatcccacccgcaaaatgtgacttaaataatccgaaacgcgcgatactcacggcgctctggaagccgctgaggtagatggcgacggagcactcgtcgcggccggggcagacggcgtccatcgtcacgtcggtgatcgccgggatgaccatgtaggaggcgaagtggaacatgaacgccgccacgaacaagtgccccagcacagccaagtccttcatcctggcgtctctaccaaatcgacagcttaagagaaacacggttaatttgcatgccaaaactccgggtctacgttttatactcgcatgcacggcacgcaaggacaagaaaaatatacatatcgccaatgcaacgcttccaagtaagagaagcagaaaaaccgaagcatcgatcagtcgctcttgcttagggtgatcacccacttgatctcgtcactaaaagtgaccctgcatttttgccaggtttgcacagttatattgcgccttgtgaacatacttttacgtgcccaattccccaaacaagccaagcaaaactgtaaccgtcccgatgtttgttgcagctgggagcctgagagagtgatctgaggacgagaacctgtgattactggagctagctaagttgtcgctgccgatggtgattggttagtgtggtgccggtggcttgtacgcatggcgctgcaacagagcactagagctaacatgcgagtgatggatgatgtactgatgtgttttttagagtgcactccactctactttcggagctactgctcgctgattgggtcttttgtagcttgcagccctggaactctgtttactcgtggaatacggacaccgttggtcttgcttctgggaaaagctgggataatcttgcttggctctttctgcatttggtgctggaagtttgcttcttcagtgggggaaatagcttagcgcactcttgattactagggagattagatctatgtttggtagtagctgagcctcaacgacagttgaagtctcaaccctgaaccgaacagaactactgaagtgcaggggagtatcagagaaggatcggcatttttttgatgtactagtactagaaatatcggaagaactgtatccttcaagactgttgctcctatatattttactatggtccatatactaatttacatttctaagttctatcctcatttttcacgtatatgtttttcaaattataaaatttttctatagaaaagttacttttaaaataatattaatcggttttcaagtttttaaactaatacgcaagtaattatgcgttaattcatcatcaccctgttttctgtgcccaagggaaaattcccaacccctactcccgaacacaccctagattggtgataaattggttgtcgtcaatgccaataattttatctacaaagtgaaatatcgtatttactattcagaggggcacttttttttttcatcaatccaaaacagccctacattccaaactcaataaaacgcaactggaacggatgatgggcttggtgacccactgaaaattgcagagtccgtccaattgacgataggggatgtcgtgggctgtggcctgcctgtgattcttccaaacttaactcggaagccaatatgcgggcgtaaatttcactccgtattccgcctcgacccacctacgaacgtcagcctaagtttatttttggcccctcatttatgtcgctgagactgaaattcgtcctcaaatcgcagtacaacgtgcctctcaactccccaaaccagtggccccgagatggtacggatggttgtttctactgccgtggcgtggcgttgatatggcacttaaagtatataaaaaaacccgtgagactgataccaatgaatgttcggttaaaaaaaaaatggtacgtcctattgcggtttaaggatgaattttagactgacaataaattgtggggcaatagatgagccccatgggcaggcttgtcgaggtcagcttcaaactgtgttggaatatcgaccataagctggaataacgtcagttcacgtaccgtacatctgtatgagcagacgtttgtctactccggaacatacatgcgagcagcagacgccgtccttttcattcctgatcagtttgtttgtttgtttttttttaaaaaaaagaacttgttcattgttgatcaatttgttcgatcagctgttcgaagacaggccgcctcgtctacaagaggaatatcaaacccctgcaaacaattaattccttctccccacgcataaatagcagtgagaggcgaacgagaatattcgtcaaataagaaaatggacgcgttatccagctcatacatccagccgcccggcctatgccgtgccttctccctctccctgatgccctgatcgatcgatgggcggccactgccgaagccatcgggctggcgtccacggaaacagcagtgatcgcgcccacgagccccatgtgagcctgtgcgacgcgcgcgcatgtacgcccggttctttcatagcctttcggctctgtctcacggttatttcaacaagctttcggccttcactcacatcctgcagctgctactgatttactgaagtgatcggtgacgatggaatgctcatgcatgctacattgctaacgacgcttcgatcgagttaattctttatgtttgcacgtacgtatacgcttggacgaagtttgttatgttcaccgcctcaccggttcacgtggttgatcggttcgtgattacgtacagaccgaaaggagggagaggagtcacgttaatttttttagggtaaagagagagctttattaatgcttaaataaagggttacacttctaatttaataaatctagaattcttgcgaaagcacacaacctccactccgcgcaggacctagaacacattgccatttatgctaaaacatgtgctaccctatttgcttatctctttatcgatttaataaatctagaattcttgcgggagcacacaacctccactccgcgcaggacctagaacacattaccatttgtgctaaaacatgtgctaccctatttgcttctctctttatcgatttaataaatctagaattcttgcgggagcacacaacctccactccgcgcaggacttggaacacattaccatttgtgctaaaacatgtgctaccctatttgcttctctctttatcttgtgcacttgcacttgctgaaggcattgcatcactcctttaatctcttcaatcgtcgtcgcccaggccgatttcaactgatcatgcctcattaaatctttaacaatttctgcattgtccatctccagcacgttaattatattggcattgatttgtacgtgtacgtactacgtactatctacctgctcgtgtgacagcaacatgcataatgcattggtagctaactaggctccaaaatgcagcagataatttatgaatgtactaggctaaccgaatacgtgcacgtatgccaaaattgacagcctgaatattcgggtgtgtgtgtctccagcagtagttcttctcgatcgacgaatctatacacaactacgtgcgtatagagacactcgtcctacttagtactcctgccgtacgtatttattgtacgtactcccttcagttggattaatttcatgagaaaagcgagagtccgatccgaatatattcatgtgggttgatatataagtttttcatttagcaactgaagacatgcttggaagtttgaaagcgcgcagggagtttcgcagcaaagttcactgcaaatgattagatcctaattcccagacaggaactaatttcaatttgtctgctacaacggatatgtcatgagtatacacggttgaaaaaatatttcaagattattattcgtgtagtacatgcagctagcatatacttatacttttgtgcatgcatggcaggcaaaactttttcttgcccgcaggctaatacagcgaacagtccacttgtaaagctgttgaaaaatccggaccaaacctgcaggggagcactagtgctagtctccgatcagaaattcgccaatagcatgtgatgtatgggcccaagctagctagcgtccatgcaaatagggtttgacacagataactatactacttattcacatctgagtatgcatcaatattaaaacgaccgaactaactaatcccattgaaaaaaaaatgattccacctattgcgtggcgtccctttctaatctttacacagacaggtgcctatgagctgtctaattcgtaaacctctctaaataaaactctagcttcagacacgcagaaatgttatttttatatatctatatattctcgttctccactgctcattaggacagccagtttgcgagaactctgagaaaagaacagcaaaagccactgcaatagaagcgcgcgagcgctgagagtatctcagatccatggagatggaggctgccacgccggtgccgaggagtgacggcaggaagctggcgaggtgcccgaggctgcagatggacgccaagacggtcactgccatcgagcagtccacgggcgcggccatcgccgacgccgctgcggctggcgccgagggcgccggcggcgggatgcgcgtcaagatcgtgctgagcaagcagcagctgaagcaggtggccgcggccgtcgccggagggggcgccttcgcgctgccgccggcgctggagcagctcgtgagcgtgctcaagcggcagcacgcgaagaagcaggtggcagcggctgctgatgtggtcgtcggaaggcgccgctgccggtggtcgccggcgttgcagagcatcccggaggagtgctttagctaggtacccacgtctacgaatgtgtagtcgattcgcaacatgtatagcttcggtgatcagtccctcctttttttggcgatattcccttccttcctataggctgcaaccgatcgatctagttgggccaaagttagtgcccaatggttgcatcccaactttgaaatgtcatgtattttaatctggcatttggacccaaattttcctccgttttcctggttcgatgcatgtacatatctctgcacacgaatagtattcaataagatgatgagctgggaaaaggaacaacaaagtgtgtgaagtgtccctttctttggcttcaagttgtgtcctgcgtcaggtaataaactgtgtgtggcagcgaggtagcagatggagtgttgctgggaaatgggagccagcaaatccctaaagattcctcttccagtacgacaagatctactcctacagtcctactacacaaaagggttgcagttacgtgttggcccaagggtgtagcagtggcatggcctactgtgaatctgtgattgtgtatgtcacatgagtccagtggtcgaggtaatcttgctagcttcatttcagagtcgaattgaaacttcgaaatagagcacttatcctctttccgtgaacaaggaatggaggatatcgacgccgttatatatggcagatcgttcagtgcctgtgagaggggaagttaacttgccatgaacacaccatcaaaaattcagtcattggatcaggaatagactgtaaattgcctttgctgctctagtgctatgacgagagggaggggaagtgagtcagtcatagagagtaagaattaagaatgatctaaatttagcgtgcgagtgacaaaagcgtaaggcacacgatcaggattcaggaacgatggatggttcagatagctatgttacaccgatgtcaaattaatctcgagttgcttagttagttactaaccatattgtgtgtacactaccaaagtatgttgacagttcacgtacggtcttcgttattaaccaccactagtcagtgtagggataactacattatatcacttatcaaagcataggtagtccgggccgtgggtacgttcagagggttttacacagggaagtggtacgtgttaattccttgaatcctcacagctagtagtatcgatcgaaatggatcatggatgatcatgaatgctagctttcacgtaccatctcatcaccgtgccgctccaaggaaactatggagctcacgtcctaaggtacatatacagtactcttctacataacgtacaggtccattcctcgtttcagacctgtacttgtaaaacaccgactaattaaaaattccaatcgtaatactatggctgtgttggatccaaacttcagtccttttccatcacatcaacctggcatacacacacaacttttcagtcatatcatctccaacttcacccaaaatctaaactttgcgctgaactaaacacaaccta

SEQ ID NO: 8990 - DNA, 36607 bp, Oryza sativa
attcctgcagcccacatgcacacttactgagaactcagtgtgcatatcttgtccggtgggtgatgctgtggttattaattcagaacacacagatcaaaatgttgatggtcttatgtctcaggagcactctgtagacaagtattcaccacagctggaatcatctgttcaacatcgattttatggtgctgttaatctgaacaggcatgctgtggcaggagcattagctggcacagtagtcagtgtttctctgcatccaattgatacagtgaagaccattattcaggttaacagttctcgacgaagttcattctaccacacgttaaggcgcgcccttgttgagagaggtagtgtatttggatgaattttacgcacatcaacagagatactggcaactttgatagatttgatttatttccactttctcttgaattgctagacctttttaatgcttgacaaatcctatacaggagttttaggactttatggagggcttgctagcaaaattgcttgttctgcaccaatttcagcaatctataccttaacttatgaaatagtcaaggggtctcttctgcctattttgccaaaggtgacaatatgttcattcattcattttaattttttggctcatgtctatctagttttttgtttaccacagattttaattttgtactatgttgttacaatgccatttcttcaggagtatcattcaattgctcattgcactgctggtggttgttctagcattgcaacttccttcgtttttacacccagtgaatgcataaaacagcagatgcaagtgggttcacagtatcagaattgctggtacacaatctcttgcctcattcttataattcattgccactgctacgtgccttgtttctctattaaaaaaacacctcgatttcaatagaaacatgacactacatttttcctcatccccttatacaagtttatgacttcagggatgctttattaggatgtcttcgaaagggtggcattacttcactatatgctggatggggtgctgttctttgcagaaatatcccacattccgtaattaaggtatttcaaaagtttagtacctaatttactttcagatttgttaattgtgtttacagaatactggaaggccttgtttttctattttacagttttacacctacgagagcctgaagcagttcatgttgaaatcagctcctgctaatgccaatcttgattctgggcagacagttagtaccctgagctataacttgttaaaccgtctttgtgtctttgttatcattagtcaggactgaagttaaactcattggcattctcactactaaattcagtttttttctctaatgttttcgtgcgtaatacagaatttaaattattttacattatgtttagatcatagtgtagtatcagattttgtttcatcagtaaggatgtaactaaactacacctattgttagtatatttagcatgtttgatgatgccatgttaccagttcttgtatttgaacaaacatttgcccagaattctagtcggtagcatatgtatacttcaatatatgtttgtatgctagtgctgaaagtgggtagatgaaagcctgattggtatgactgtagattgtactgtaaggtatgcactgtaatagaagcaaagtctcgtgacttattaaacaaagtctatttgcagttatattatgcacataggctgtgttcttttgttgggaactcctttcctatgcacagaaaacaaagcacggattaatgtatgattaattaagtactccctccttcccaaattgatcatcatatatgtttatgcatcaagaccaaggataatttaaatcacatcatcaagacaccatgtacacattctctcataatgcatgcatcgattaaaacactataccaattacaccttagcatgcactcattctcccatgctgcatcaatcgtattctgatgaaattcgtgtccatgccatatgatggtcaatttgaaaaattttgaatttcattatatggtgatcaatttgggaaggagggagtattagctagtgtttttttttttttgaaaaatggattaatatgatttttttaggtaactttcctatagatttttttttcaaaaaacacactgtttagcagtttggaaagcgtgcttacggaaaacaagggaggtggagttgggaactcacgctaaagaacacagccgtattctgtttgttctttgttctctgcttggatcagcaccgcacaaaaatcactgccaaaatcattgatattttgcattgcagcttttctgtggaggttttgctgggtctactgctgctctgtgtacaactccatttgatgttgttaagacgcgagtacagttacaggtaacataaagcatgctttatatctgtaaatcattatcatcaattaaattgcttatctggttttactggctgaagtcacacgttggtcttttcaaaagtatagttgctggtatgttattggaagtaaactattggttacagcagaactaaactgagtattacccatgtttgttaggcactcagccctattagcaagtatgatggggttcttcatgcgctcaaagaaatttttcagcacgaaggcttgcagggtctttacaggtacggtcatttccgcaccatattggccatgctattgaatttaggttcttatacaagtactcaaattattaagcaacatatgtatttccaggggtttggctccaaggttggctatgtatatatctcaaggggctatatttttcacatcctatgagttcctcaaaacaattatgttttctgaacaagagcttcatgcaaggaacttttgatcacagaatgatgcagcgtggttcaggaacacttaaagcatctgagtttcaagaacaatctcatgaactaagtgggatggttctattaggctagaggattgtagacttgtggttactgaaccaaacatttcttaggtcttgatagtaaacatttgtacaagtgtacattacatttttggatacataggcaaccaaactggtgagcagccatttttgagtagaaatcacatctaggaaagcaaaattttgtatcatcaacacagtttgtaaattcccttacaagcaacctgtgactggatgtgcatcctaattcctgatattgaattctgacagaaaaaaagaaggcaagtctttttttacttgaatatatctgctgcacagctgcacttacatacatacttacatccactcaaaggaaagagaagtagtacttgaaggtagccctcctagcagctctctctgtgttgctgccttgtgcatatgcatgaaacacaaaggaaatacgaagcgcaaaaaggttcaagaagcgaccgacggcgcgtgcggcctcgtcgcgccagcgtgccgcgcgaacctgaccgagaagttggcctcgcactcgccgtcgccgaggcccccgttgtcgaagttctgggagtaaccgagcgggtcgtagttgagcccgctggcgctgaggacgtacgtccgcaagcgccggcgaggaaggccgatccacctaagcctccgccacagcgccgccaggccgaggccgaaccgtccccagcaggacgcggccgcgcggcggctgcacgacgcgcgcgtcgccgccgccgccccctcctctcccatcgcccggaagcgtatgcgaagccgaggagaggcggccgcagaggacagcaccgcgttcgcgcgcgcgcgcgttccagtcagtgtgacaggaggtgtggactgtggagtggagagcgttgcgccgtatggcccgtagcggcgtcacggccgcggcatggggtccctgcaattgatgcttagttcctggaatcttggtcgacgtggggaatcacctgcactggatgcgctagtatatgtgttgcaagttggcaacaattgaacgtgagacaattagacaaaaaacgagcctggagtcggtaattctctctggcaaaattggcatccgcgcgggcgcaataagacagttacatttatcttgtgatgtgaacatttgtggcttctcgttggtgcttgcagatggagacaaacttgaaaatgacccttttcccccctcttctgatgaaatgaagtgcatttttcctacacgggacaagaaaccgtttatcggatacgggaggcagaaattgactccaagtccaagctgacgaactgaaccaacgtactgacatacatctccaattctctccatctccctcctttaccgtcaccgtgagaagagctccgggcagcgcggatcttggaggggcaccttgcgtgggtgtcagacaagcacgtcgtgcgcagagcggtatccatctcgacgcagcacaggaacaattaaaaccaagtgaaaccccgtgcattattttgagaatttagtatgataacaataaaaaaaataacgtgtaatatagctagataacatcagattaagtaaattaatatggtttatgctaatttaaatttaaatagtatgtagaatggtgatttaaacataaaaaacaaggtgatatgactttatggaagaagaaaagtaggagatagtttggactgtagattaaacatctaaaggctaaaaacaattaatgtgatatgacttaattagaggaaaaaaaagaaagataatttggaccatagattaatcatttaagcactaactaagtgaggatgaactatataagtatatagaatatcataaaaaataataaagatatacattgaaacattatatgaattatgttggttgataatttaacatgtatgtatttgaaaagctcttaaattataaaaactataaagatataacatatttgtatgatgtttaaatatgatgattgttagtggatgataatgtggcatcttgttaattagtggattagtggatgatgatgtggcatctttgcatgttaagcttaaggagttagtgggggataactttatagaagataggattaggaacaggtataactcaggatgtaaattaggcctggtttagatccaaactttttcttcaaactttcaacttttccatcccatcaaaacttttctatgcacacaagcttctaacttttccgtcacatcattccaatttcaaccaaacttctaattttagcgtgaactaaacacactctaagtgaactgaagtcagaactcagaacattttcagaggttacctgacagtagatgagataatgagatatgctgaacaaaacgttcatgtaaaaaacgaactcagatattgagagctggcatgtactgcagactaacaccaccaagaagaaaaacgagaaaaaaactgagattagctctgcattaggctttcttcggtttagcatgttcttttcttttttgtaatggttacatttctgttaatgaaaatggggggttacacccttgattaaaaaaaaaaggttcatgccaagttgttgttgtgccaaccttcctaacaaaaaacatttttgttagccattctgcaagctgagagatgcatggagctgaagtctaaaccacacgatgttaattacagcccatacaactataggatatggattttcatccctcgagaggatgtcctctcattgtttgcatgtcatttaagtagttataatattttttaaaaaaaattgacaacatagattaatatgaaatatatcattccacaaaaatgcaagcctaaatttaacttctataagttgcaaaaaaaagaacaaaataaactaaaaatagtaatcgcacattcaattcgcagctatatttgttatttttgttacaactttagaagttaaattttaacttgcatgtttgtaaagtgatatatttcatattaatctatcttaccatttttttaaaaaaaatttatgactagatggcatgcacgaaatgagggattccctcgagggataaaatcactttctcacaagtcacaactttacatgtactgtatgttggtagcttattagcgtgcatgactgcatgggtatgtagggtagatcacccattaattcatcgtggatcgaacttacatacgaaaaggtaaacacgaagtgtgaccactccatatgaaataaatgttgtgaatacaagaacgatgcttgttcgcacttaagagctctcaagtaggagcagatacaaatgctctcaagtaggagcagatacaaatcaagaattgagcttgggtattaaaagcgaggagataactgcatttatgctgtcattactcatttccatagtgtgcagaattatctaccatttccttccttcacaatttcgcatgtggatgaaggcatgaagctcaagcgaagcgtgacggaacttgtggccgcaagctaggaaccttaatggttgctatattaaggctgttcatcgtgcaggcacaagttcatctccatgcattccagtaaagaccatttttaggacaaacacatcggtttcaaaaaaaaaaaattaggacgaacagagcaatctcttcgcatgcaacagcggccgccattttccctagattcaccttccattggtagcttggttgttcaccaatggcgcacttaggggcggtcctctgcatccgtgttgctctcgtcgtcgtcctcctcccgtcgcttctggcgaccgtcgccgtcgcgcacaacgacaccggcgagcacaagaactacctcatcatcgtgcgcaagccgtacgagtacgaccacaatgtgtacaagaccgtgtcgagctggcacgcgtcgctgctggcgtccgtgtgcgacacggccaaggaggagctcgccaccgaccccggcgccgagacgcggctcatctactcctaccgcaacgtcgtcaatggcttctgcgcccgcgtcaccagggaggaggtgtacgagatggccaagaaggactggttcgtgaaggccatcccggagaagacgtacaagctgatgaccacgtacacgccgaaaatggtcgggctcaccggcgccccggcggcctaccatggcggcttgtggaacaggagcaacatgggcgaagggatgatcatcggggtgcttgacgacggcatcgccgccgggcacccgtcgttcgacgcggccgggatggggccgccgccggccaggtggaagggccggtgcgacttcaacagctcagtgtgcaacaacaagctcatcggcgcgcggtccttcttcgagtcggcgaagtggaagtggagaggggtcgacgacccggtgctccccgtctatgagctggcgcacggcacgcacacctcgagcacggcgggcggcaacttcgtgcccggggcgaacgtgatgggcaacgggttcggcacggcggccggcatggcgccacgcgcgcacctcgcgctctaccaggtgtgctccgaggacagaggctgtgatcgggatgacatattggcggcgatggatgacgccgtggacgagggcgtcgacgtgctctccatctcgctcggcgatgacgaggccggagatttcgccggggatcccgtcgcgctcggggcgtacacagccatcatgaggggcgtctttgtcagctcgtcggccgggaacaacggcccgaacccattgacggtctccaacgaggcgccgtggctgctcaccgtggcggcgtccacgaccggccggaagttcgtggccaccgtgaagcttggcaccggggtcgagttcgacggcgaggcgctctaccagccacccaacttcccgagcacgcagtggccgctgatagcggacacccgcggtgacggcacgtgttccgacgagcacctaatgaaggagcacgtcgccgggaagctagtcgtgtgcaaccagggtggcaacttgaccggactccggaaagggagctatctacacgatgccggcgccgccgggatggttctcatcggccctgagttcatgggctcaatggtccaacccaagtcgcacatcctccccgtggcgcaaatcgtctacttgtcgggggaggagctcaaggcctacatgaaatccacgaagagtccgacggcggcgctgatctacaaaggaacagtgttcggcgaccgcaagacgccggaggtggcgcccttctcgtcccgggggccgagcaggcagaaccaggggatcctcaagcccgacatcaccggccccggggtgaacatcatcgccggcgtgcccgtgacctcgggcctcgccacgccgcccaatccactggcggcgaagttcgacatcatgtcaggcacgtccatggcggcgccgcacctcagcgggatcgccgcgctgatcaagaaagcgcacccgaagtggtcaccggcggcgatcaagtcggccatgatgacaacggccgacacgttggaccgccggcggaggccgataaccgaccagaaaggcaacaatgccaatatgttcggcctcggcgccggcttcatcaacccgacgaaggccatgaacccgggcctcgtgtacgacctgacagcgcaggactacgtccctttcctttgcgggctcgggtacagcgaccacgaggtgagctccatcatccacccggcgccatcggtgtcctgcaagcagctgccggccgtcgagcagaaggacctcaactacccgtccatcaccgtcttcctcgaccgggagccctacgtggtgagcgtcagccgcgccgtgacgaacgtcgggccccgcggcaaggcggtgtacgcggcgaaggtggatatgccggcgacggtgttggtgacggtgacgccggacacgctcaggttcaagaaggtgaaccaggtgaggaagttcacggtcaccttcaggggcgcgaatggcggcccgatgaagggcggcgtcgccgaggggcagctcaggtgggtctcgccggaccacgtggtgcgcagcccgatcgtcgtctccgcccaaaagttcttgaacggtaacacgagctcctccgatcacgcgggccattgattgttgattacgtagctttgccagtaaatggggtacttgattagacccccaaggattataaactgccccctgatgattgtcctcgaaaaaagatgaagagaaagacaaaataactctattagaagatggaccaagatgcgaagggattgcgtggccggaaaaaaaaaaaagcaacatgggattctttttccatgatggccatggcctggatatgtgcccctgaaccaaactgcttcgatattgggcttgatgggtttgttacggatttagacctttatacaattagcatagctaaaatttcgatcttattgttgtgggttggatattggatgatagcactacggcactacctttgtggataagggatatatctcacacacaattcattcaaatttagacatttagtagtagataaaatggtgaaaaaaattacattaacggcacacaaattttgataagattttcttttgttcttttgaaaggtctccgcgggggtagatctccaatgaacacgcacattcacaaaatttgataataattttttagaagtcaaccaatacaatatactcgcacagagtcattgatgcaaatagaaaaaaaaaaacaaaaacaccaagaaactgctcgccaaggacgccgtgctgatagagaaaatttccacgcgtatgtacttaggaaagttcctttttattaagaaaataggataaaaactttgtctcgtatatattaataaaccataagtattcaaaaacatgttgtttagccatgaagtcaacttctggattggtcgattggtcacttcggctctaccgttgtggctccaccgttgtgtgcttcgctataggctctgttcggctgcacttaatttcattgttgtgcagccaacacaaacaatgtgttgtgtctgtagcagcagctgtatcggccagccaaacaatcccatagagcgtcaaaaaaccataccgaaacattctcagtgcgctaaattttttttcatgaaaaacagtctaaataatcattgtcgatgataaataataatcccttcaccgtttggactgaacaatatagttagtttcgctattggtgataatatgttatacacttctagcgtatttttagagcaatcatacaaatacactttctaaaaggaaaattgcggatctcggatagtatccatttcgattttggaatgcgttgaagctccaacgggtcacagggttttgacaaggagagagtcgacctttatttatttctttcatttattgccaatataacacgcgctttgcagcttgctcggcagtcctggtcaaagtcgcctcatatttaatttatctttcacaacgcttttgcagttttaatgtatttttactggcacaaacgtacaagcaaatatcaggttgcaaaattattttctattaaccaaatgggccagctgcaaacctacaagttgcaatagagtgtgttcgtttgaatcgtcaagtcctcgttttcttgcaaggttaggacgcgcaagactgtactacgcaggatgttggcctgctgccttgccctgtcgtgtcgtacagtacatagcatgttgcgaaactttctcttgaattgcccctacgcgttgttagtacattattattattttttcggtttgaaacatcggatgtatcgttattttgcttaggtcataaggtcattacaactgccaggttccagcagtcgaaaaatcgggtggcagacgacttttgtttgctaaaatacaacatattgaggatcagccgatcatgatgttttgctgcgattgcaagataatgatcgccggatgtttagctgcgattccaagataatgatggccgcttgcttgcacgttggcttctaatctaatgtaaagtacaggattaatcttcctgacgacgataatgtgcacgtcgcagcgttcattaacggaaaaatagcatgatatccaatgggtaaattgatccgtatataaatacgacggcatttgcaaaaccagaaaaacagttatacaagaaatacaattatactcaattctaaaataccttttaatccctttagtgtagtagcaaattcggcatgagacaaattcggttcctagtcatctatcatccaatgcaaattgccgcggtcccagcgaaacaagacctttttttaattttaaaaaaacagcgacccagagttgacttagctttaggcaccgtttattcttcgaattatctcatcgaactcatccctggttcttaaccgccgctaatgccaacatatctcctccctccccgctcgactcgactgtctccgtctcaccggcaatccggcggcaatggacggcgtcggcctcggcgtgcacaggcggtgggacacgtcggggagcgggtcgcagtacagcttcaggacgtcggtaagcagcgtcgcggagatatccaccgaggtgggggtggaagtgagcccgccgccgccgccgctggcggcggcggcggacaaggtgtttgtcgcagtcgccgcggacgtgaagtacggcaagagcgccttgcagtggacgctgcagaacctggccaaggatggcgccaaggtcgtgattgctcatgtccactgccccgcgcagatgatccccatgagtaagcctccagtcctcaatcatttgtttgatgatctgcgtcacaggagagagatttaagattggataccttttaatttcggtaatttagcgacgagtttggttatttggatcccgcttccgttttgaatctatggttagcagtttaataatggatatgattcgttgacattggcgacttgaaagccgaatgccagtgcaaactatgcatactccctttctggctttcttacagtacaatagacatttgcacgcccaaacgttgcttgacgaagtttctcatgagttgtatgattgtatctgccggcaatgctgacttcgtgcagatattctagaaaatacatacaattatttgttcatgtagcattattggtcctgtaactacttccaaaatcctattttgccgtcgcttcgtggaaaaaagtaacctagggtgtattgttaaaatgcaagaatttctatactaatttcaatatacctctacgtgggactattaccaaatcccaacaacactactacacatgcatcaaaggtcatcctcttattgcccagggtaacaagttcagaagcaatacgttaatatttgcaaacgatgcaactggttcacttctgatttctgacttctagtgcgatcagaaatcctccatgatttgtttgtcaccagtgcgatcagaaatcctccatgatttgtttgtcaccttttaaatagcttgtccttgattcctattgtttcagtgggggcaaaagttcattataccaagatgaatacaaaacaggtgaacgactataggaacaaggagagagaaaaggcagaggagaaactagatgaatatcttctgatatgcagaaaactgaaggtgttcttctcaaccactcttatgtctttcctaatgagcaatcaacaaagtaataaattacctaatacccaattatgcattctactaatattactcgagaagatatatcaatatatatctcaggaataatttgatcaatatttcgttttctcaggtcagctgtgagaaactaataattgaggaggacgacattgctaaaggccttacagatcttgttgcccttcatggcgtcaccaagcttgtcatgggagcagcagcagacaaacactactcaaggtgaccacaacctcataagttttttttttctgatgactagcacacacattgcacatttaaaactgtttcacaaaatattgtttcttccctgataagtactacctccgtttcaggttataagactttctagtattgtctacattcatatagatgttaatgaatctaggcacacatatatgtctagattcattaacatatatatatatatgaatgtatacaatgctagaaagtcttataatatgaaacggaggaagtagcattcagtgtttgccgctagcaagaattgagaaacagaaagtcccctcaaaaaaagaaatgagaaacagaatggtctgtaaagtctttaacagtttcgaacctggatgttttcccaatatgcaggaaaatgaacacacctaagtccaagacagcactcaagatattggaagcagcagatccttcatgtaagatatggtttacctgtaaaggacatctgatatgtacaaggtaaggttaagccaagcgggtcaaagcagtcttacgatagatggttttcagtgatactaacatcagaaaagcacattgaacaacacgtgaaaaatagctaagcttacccgtcaacattgcagggaagcaaatacaaccgttcctgcaataccaccatcacctgcacacacagttgcatcaacattgtcatcaagcagcatttccagccgtatgagatcaatgtcattgcacccgtcagagagtgaagcatcaagctcaagcggaagtccaaggcacaatctgaacagatcaagaacagaagtggcaaagtatccctcacaaggatctggcactgcaccatctcagttatttggacattcagatcaagatgtcaatgaccagccaacaagaacagcaatgggttctatagattcctgggatgaatttgagagatcgcaaaactcctgctacgattcatcaagaaatagtgatacagttagggtctctggatcagcaatgcagcagcccatgtatgaacctgatgatgaccattttgtatctcctcgtaaactggtacatatcgcctgatgtactgtgcaagttgaaaaacataagagtaggactcttctcaatgaaatgtaacacataactgaactttttgtgcaacacaggagaattcaggcgatgatgcagacatatatggtagactccaagaggctcttagtgaaactcaagacctgaagagagagacatacgaagaatcaacgaaacgtcggaacgccgaaagaaatctgatttcagctcttcaaaaggcaagtcattttgcttcaaaagtccataattcatactgtaaaataaaaagatagaacttatcttacaggtcaaagagttggagaacctgtatcagaaggaagtcatgcatcggaaaataaccgaagaggcactggagaaacagatacaggagacagaagaaacggaaaggcactgcaatgcattatatgacaagctgcatgatgtggaagaacagaagctcatggtggagcagcacataactgaaatggaggcagttttaaaagaacgcgaagataggctgcatgatgtagaagagcagaaattcacggtggagcagcgcataactgaaatgcaggcagttttaaaagaacacaaagataagctgcatgatgtagaagagcagaaactcatggtggagcaccgtataactgaaattcgttcagttttaaaagaacgcgaagagaagctcgcagagagcaagtatctactccaagtgctccaagcagataaagagaagctacaacaagagcgagatgccgcagtaagtgaatctcaagacttgcgcctgaagaacaaacagagaatttccatgccgggtgaagatctaaacaccgagttctcctcttatgagcttgaacaagcgaccagaggcttcgatcaagaactcaagatcggcgagggcggttttgggagcgtctacaaaggcacactccgcaacacaactgtggctatcaagctgctgcacccacatagcatgcaaggtcaatcagaattcgaccaggaggtaatccagttcatcagatcactcacataactccatcaaatcaagttggcaaccatggctaaccaagcaattgacaccattattgcagattgctgttctcagtagagtacgacatccaaacctcgtcactttgatcggctcttgcagggaggcatttggcttggtgtacgaattcctccccaaaggcagcctcgaggaccgcctggcctgcctgaacaacacgccgccattgacatggcaggtgcgcaccaggatcatctacgagatgtgctcggcgctgagcttcctccactcgaacaagccgcacccgattgtccacggcgacctgaagccggcgaacatcctcctcgacgccaacttcgtcagcaagctgggcgacttcggcatctgccggctcctgatacagacgaacaccggcgccgccgccgccgccaccacccggttgtaccggacgaccacaccgaaggggaccttcgcgtacatggacccggagttcctcaccaccggcgagctgacgccgcgctccgacgtgtactccctcggaatcatcatcctgcggctgctgaccgggaagcctccccagaagatcgccgaggttgtggaggacgccatcgagagcggcgggctgcactccatcctcgatccctccgcggggagctggccgttcgtgcaggccaaccagctcgcgcacctcggcctgcggtgcgccgagatgagccggaggcgccggccggatctcgcgaccgacgtgtggaaggtcgtcgagcccctcatgaaggccgcgtcgctgaccgccgggaggccgtcgttcgtggcccggccggacgactccccgccgccgtcctacttcgtctgcccgatctttcaggtagcaaaaaatccgtgattaaattattcctgaaaaaaatcgaggcaaaatttcctcgtgattggatgatggcttccatcggatgctctaatcagctgaagaaagagtcaaaattttcaaacttaattttaaaattaattttaagatattttaaacgtaattttttattgacttttaaattatcaagaatatatatatatatatatatataagtttacccaacaatttatttttattttctaaaaagccaaaggaatatgagtaaactatgggggatgattcaaactcgtgttgggatggatgtgaaagcaggaggagatgaacgatccccacatcgcggcggacgggttcacgtacgaagccgaggccatcaaggggtggctcgacagcggccacgacacgtcgccgatgacgaacctgacgctcgagcaccgcgagctcatcccgaacagggcgctccgctcggccatcctcgagtggcagcaacagcgtcaacggcatcagccgcaagaggaggacgacgactgtacatgagcaatctctcatcaatcatcactcaccgcagttgatatcctccatacctggcgcttcgcttcgtcctgactgtagatcctgcacatacattagcattagctttgcttgggttgaaatttgaagatccaagattgctcgagaaaaggggaagtttaccctgttcgtcttttgtgctcgttaatttgatttgcgatttccgctgtggagtacagacatttgcagttggtaatcctacccaattttacccatgttgaatctggttctgatccgtcttcccctgtatataagtgacgaacagcgaaaagagatgtgcacggaggcggcggcgggcggcctcccgtgatcgtgaggacgtgaggcctgatccatcccggtgcacagtggctggcccgtgaacagtggccttagtcactgagaaaagtttaatcccacaaaattcgtggcccatgaatgctaacgcatcggcccatccatgcctctgcttcgggaggtggcccaagcaaaacttttttatataggcccaagcagaactgttcgttgtacttgtgttgcgtgctcgcttcattgcttgacgctggtcttaaactataaactgcatcaacttgtcacgtccacgtcgaatgctcggtaatttccaagttactcagcttgggtccacgcggcaaacatcgtccctgcatacagtagtatacaatacatctccctttagcgacatacgcgcgtatgagctacgtttgcttgcttgatcacgccaacgcgagcgcaaatggcatctcgtcccaccgttgtgtaaagtcatagcgtcgactttggcttctggtcttcaaagaaaaaaacaactttgcgttattaactttgtgagtcaatgcatgaaatgaaaaatatattcggtgctgactacttctgctttcttctgtaacttgatctcgaaatttccattcatgaaacggctgggcagttactctgcagctgcatggtcttgtgcttctcatttctcaacgtcaggaagcagcaatggatagcgacggcgaagagtacgacgcgatgtggagcgctcggtgcagcgtcagctcgtcggccggctctctgcaggacgccggcgaccagtgggacgagcagagcctggccgccggcgaggacaaggtgttcgtggccgtcgacgaggacgtcgagcacggcaagagcacattcctttgggcgctgcagaacctgtccacggacggggccaatattgtagttgctcatgtccacagccctgcacaaactctcagtaaaggtaagcatcttgcttctcctgctttgacagctacaatcacctggtgcaattcagtttacatttctcgatggggacaaaagttcactgtaccagaatgaagcctgaagagatcagcgagtacctgatgttggcgaaggaagaggccgagaagaacctagatgaatatgctctgatagcgaaaagcacaggaaaagatatgaaggtaaaattgtctcattactttttttgttagtgcttgtgaaaaaaattacttgcatcaagtaacgtggggacgaaatgatgtttatcagtcaaaatataatcaatatgagcatgaacattaatcctactatttcagactgattgtcagaaagtactaattgacatggacgatgtcgcaaaaggactcgaggaacttattacccttcatggcatcaccaggcttgtcatgggagcagccgcagaccaacactactcagagtatggaccacatctgcctaatgtagcgtttttcctgtaatgttttcaagaaaattttactatttctcatcgcaaataaaaaaaaaggggagagagatagagagagaaatttattcctggaactggaggctctggtacttaagacggtgtatcggactatgtggataacttagtacttgaagctctgaagatttatcaggactaggctatcagcgtcagcaaattaatgaactaaaacttcagtcgtaaatttatttcattctacaccagcatcaggagtccaggactaatcaaactacataggtagcaggaatagatagaacattttatgagatgaatccatactaaatatatgtgcacaaaccttatgatattataacctgtagggaaatgaaagaaccaaattccaagatagccctcaagctgatggagactgcatccccatcatgcaagatatggtttacctgcaatggccatctgatatgcacaaggtaaagtcaagtgaatggtcatttgctacctgactttttgaacttcatagagcttagtgcatctcatgcataatagtacttcgtacagcatgcggagaattgtaggacacataatgctacatttgagtatctttacttctgtcaacgaattgaactaggataccagtgtattgcactcttaccaagaaaccaggaaaatgactaaaatccattagttgtgtgcacttacagggaacccaatgaaaaccttcttgcaatatatgtgccgcctgcacaaagcaacacggtaccattgtcaatgtgcagcatttcaagccaaatgagttcgatagagctgaagaaagaagcaccaagctcagaagaatatactttaagatcattggctcaatcggcaatgagtgattgggactacattttcgggggtgactaaactgactatcctaacatatttagaatttctaatttacacccttgcaaaaaaaaggttatattggattttcttgcttaaatgatttatgcatacagcatcaaattgttgttttacatgaattcaaggggccaaaaaatgatatgtagtttcaatagttctcccaaaatatagtttcaagaatccagaggtttcaataatttatagcttaaatttaatactctctgcagtcatgaatatttgatgttgaagacaatattcagtcaaacttataaaattccgaccatcgatagtttctcaaatggctagtttgaattctgaaaacaaaagaaatggtatgctagaattcgccttgagaagaactatcataatatcataaacttattagattttataaacttgttataatataaattaatggtcataattttagaagtttaaccgatcttgccctaaacgtcaaatattcatgaccagaggtactagtatgtttcttctttgcaagctatattcctgatctgtgatgaaattactgaagcttactactaggatttatacctcagaagtcataacttaaacagtaggacatgtagaagcagtgggtcaaaataatcgtttttagttatttagaacaaccgtgttaatcatatatctgcagaaagaaaaatgaactcctacatgaggagaacagatgatttgagccatgctgttggcatttctcttctaaacgtagtcatgctaatctctattttattcataataatgaactccagattggggaaggacagggtatggttcattaaggactgatgatgcaataagtattcctgaagccacaactctagctgcgattgttgacgatacaaacaaacaaagatcagtgatgcactctcctcaggaatctgacagtgtcaatttctcatcaccagcttgtgatcccgtaagactactaatgctaaatcattaagttaccaaagtaactagctgtaagtaaatctctcttaatgattggtggcatgcagcaacaagaagaagaagaaccaaatttagatgaagacatgcatgatatacttaatgaggcatgcactcgagctgaactactcaagaaagaagttgatggtgaatctagcaagcgtcgcaaagctgaaatggatctacttatagctcttcagagagtaagctttgttttattggctgactctgtagcttgtatatttgtagagaaaaataaataaagtaaccctcctttggccagcgtaccaaatgtgacatgcctccaaaatactgcttaaattaatttctctttttaggacaagtataactaaattagtcttacaggttcaagagtcagaaaaatcatatctacaggaggtgaaccagcggaaagaaactgagaggacacttgcaagacagaggctggagatcgatgaaatgaaaaggcgacacaatacattatatgatgaactacaggatacaaagaaacagaagcttctgctggagcaacatatatctgagattaaatctgctgcaaaagattatgtacaagagattactgaatattttatacaagaatcatgtgaggaagccaagaaattccaaaagatcaagatggatctgcttgcgatgcttcaaagagtaagcactttggttcaggactcaggagcttttaatttttccaaaaaaaaattgaccaattatctaaaaaatacgtgacgaaaatccaaactattattacaggttaaagatgtggagaatttaaaccgaaatgaaaagatgcagaggaaagatatggaggaaaagattgcaagacagaggatggagattgaagaaacaaaaaggcagcgagatgaattataccatgagttaaaagatgtaaaggaacagaagctctgtctggaacgacttgtaagtatggcagtatgactcagattcagcatattggtttaattcttgcagacgatcttactgaaaactttatataggattcatctaaagaaactaagaggagaagaaaagctgagagcgagatgctctccgctcttaagaaggtaagatactaagacgtttgtttcagtggtctgtactcagtactatgaattgcaggtttgtcatgaaaatgtggagtactcttacaggttcatgacctggagcatcagtatctgaatgagttgaaaaggcgggaagcggtggaggagacatttgcacggcaaaaagaggaaattcaagaaacgaaaagagagctaaacaagatacgtagcagacatatgacagagatcaaagctcatgaagaaaagcttgcagaaagcatccgctttatccaaaagattcaagcaaagtatgacaaaacactacatgagagagacactgccatagcagaatctgaaaaattgcgccaaatgaacagggatggagcttcaatgatagcaaccacccagatcgccgacttctctttttttgagctgcggcaagcaacccaagactttgatacggcactcaagattggcacaggcagatttatgaatgtgtacaaagggttcatacggaacacggctataactgtaatgttgcttcatcctcagggcctgcaagggcagttagaattccatcaagaggtaaatgagataactaaagttgaagctatatagccatacatttccctttcagcagaagagcactgaatcatcattttctgtatatgtggcgtcataactgcaggttgttgttctcagtagactgaggcatcctaacgtcatgatgctaataggtgcatgtccggaagcttttggcatggtgtatgaattcctcccaaatgggagcctcgaggaccagctctcgtgcaagaaaaacacaccaccactgacatggaagatgcgtaccaggatcattggggagatatgttcagccttgaccttcatccactcacagaagcctcacccggttgttcatggtaatctgaaccccatgaacattcttcttgatgccaactttgtaagcaagttgcacgtctgccagcttctcagaaaatacaacaccggaaataacacttcaggaacatcctcctacattgaccctgaattcttgtccaccggagaactcgccccacgctgcgacgtgtactccttcggcattatcatcctacatctactgacaggaaaatcaccacagaacatcacaacaatagtagaagatgctatggagaaaaggcagctgcattcaatcatggacacctccgcagggagctggcccttcgtgcaggccaaccagcttgcgcatctcggactgagatgcgccaatttgagtggaaggcaccggccagatctcacgggggaggtgtggggggtgatcaagcctctgctgaaggatgcttcccagaattttggatgcaaacaagcatttgaagctctatcagatgacacacaagcaccatcctactttatctgcccgatcttgcaggttggtaatttgcgaccacatgataaattgatgtgatataattgatgatttcacacaaaattgacggggttctaggtcgatgtattagtagtgctatactggtttatccaattgggagtatgtattcgaacttaccagaacttttgctccgatggatggtgaacaggaggtgatgactgatcctcacatcgcagcagacgggtacacgtacgaagccaatgccatcagaaactggctcgacggcggcaacgccaggtcgccgatgacgaacctgagtctcgaaaaccgcgagctcacgccgaacagagtgctccgctcggctatcctcgagtggcgacagcacaggagatgacatcaacctattcctcgatgcggactcagctcatctagatgcttcatctcacctgtaaaatatagtgggggatttctggtgttacctgaacatggcgtgtgcctgtgcagaagtgtgcctctaaaatctcaatcaccatctatcggcgtgcacctactctactatcttaggtcacaaaaggtggatgctcatgagcggaatcggatccttacctgtgcgcgcggacggcggaggggcggcgagtgctggcgccgcgccgggccggtggggtcgatgtgacggcaaccgacgcgcgctccggctcggattcagcgcgggcggcggcgaaggcaagcggcggattgcggcagcaacgtaggtcccctcaccggttgcgcccccgccgcctcgccgcgaagggcgatgctgccgcacgctgcgctcgcctacggccgccacgcgctaccgctctcaccggcagagtcgagccggaaaggcagctcggttggtgagtccggtgggctcgccaattctcatgggcctatcgccgctacgagataaagaaggaataagttcaccggaggtcttaacagcgagattttttatgtcccttaagtacaaaatgtttacccctaaactcaatgtttatggcagtatatatatatatatatatatatatatgagtggtttcgctgacgtggcatcttagttagaaaaaaaaattaaaaaagatacgtgggacccacttataagttgcacatctcttttctactcgttttctttccccttctcttctctattctctcttctctcttctcttcttcaggccgacagcaggcggagagccggcgggcaagcgtggacgcaggcggcgggcggagagccggcgggctgctgtcgccggagctgcatagccggctcctctccgaccaccgcgcacccttgctctccctcctccgccgccgggacgacgagctccggaccaagatcaagtaccacctcctcgcgctcggatggaccatcgcctccaagcccaacctccctggcctcacgcccaggctccgctacgtctccctcgccggaagcatgcatgcatgcatagcaatacacaaacatatatatatggtgctcaactaatggctaggtcctcgcatgtgcagcggctgcaacaacaagagcacggcgacggcgatggtgcctccgcctccggccacctccgccgcggcccagtgctcctgccgccgacgacgccctccccttctcttgcgtcaccggccggcgccgccggcagccgaacctcttgtgacccgtgggccgtggctccgcgcacgcccgccgctccgctgccgtgctcgcccgccgtcgcgctcgcccgcagcccggcggcgcttcgacggtgaagagaaaagtgaagaggagaagaagaaaagtgaacaggagaaaagagaagaaaatatgtgaagatgacatgtgggccccacgtacttttaaaaatttttttgctgactaggatgccacatcagcgaaaccacccacgtatactgccataggacctttagtgcacggtttgtataagtttagaggtatacatttctggtttatggttaagggacttaaaaaaaatcttgctgttaagttgagggatctccggtgaacttattccgataaagaaagcccatagacaccccaggcggtgtgggccccattaaaggctcaagctcaagatacacggcccagtatacaacggtgggcctcggccatgttccgcacgttggcccgtgaaatgcagatatactcggccctgatcaggttcagggcatcttctcaaaataagaaaatccatgaaataataagtatcatattttttttaagaacacggcaaagatctgcgtatcatttcattaagataaagaacaaaagatgtacggtgttagaaaaaaactccgacactcgcccaccaagaatacaacagaatactatcgacgtttgatgtctcgactacggtatttgcatggcatagggatcgttggtactaggatatacgcgagactgaggtaaaagagacggagacatcgatttttatacaggttcaggcccttgaattgtcatgtaataaccctacatcctgttggccgaagccggtcgttgcccttattcaccataatcacaccagtacaatatttagggtagcctatctaactgttgtcaacatggcagtctgaaggtctgactcgcagtcgacaacagggtagtcttcctcctcgaatccgtgctggcgagatcaaagatagcgctttcgtctctactgacagtgtccggagacaccataggggactagccgtgcctatctctgaagtcgatatccggcgttttgtcttggcgtatgttggcttgtatgttgatcttctgtcttgatctattattccgtagattgtggtgggtgttgattgtctgtgttcgtgtcccctctcctcctacgaggccttgtatttatacccataggtatccccttgtccaagtagaactagggaaacaaatatggatacaatccgagtagtcattgtcgtttccatgtagaactctggttgtctttccttatccggaactcctcctatatccgcaggttgtttccgtataggacatggtatgtggtgggtcctgccgagatttagtcaactactattaggtatgtggtatccataaccctgacaaataccacacacccaaagaaaaaaaaacacaaactagtgcattagcagcccagtcctagcaaagagatcatgaagcctagcagctcctgctaggcaccaaagagcgccctcattagcgatagctcggaggacatcggccaagcataggatagcaccattaaatacacaattgttcatgtgcttccgatcgaatttcccaagcgaccaagatgattaaagagtttagccctttcttctcattagtaggtaaaccccttactgttcttgaccctcaattggcaaacctagcaataacctgggtttgaaaagctagagtagccaagccgttgcacgaccaaacaccatacttatcaagaaaacacacaagtgactaggatgtgactaatagttttctgagctagatcacataatggacatgtaggcgggtgttgaagtcctcgcttgtccaaccggtctgttgtccaacaacgattattaattgccaaccatataaacaatctgtatttcaaaggcatccaactctttcaaattcttcttctaggtgcaaaccttaccgtcccaacaaagatggcctcatatgcagatttagaagtataaattcctgagtttgagagcttccaaacatgctgttctggaacaagtatcatattttaagacatactatcggtgaatataacttccaaaaaaacgtcatcttacgagtcaacgcgttgtagaaatgacatatattgctgttagagttatatccattttactccgttaacctcgtcacattttaacagtgagaaacggatggaacctaacggtaatggtatttttaggtaagttagcttgtacaatattttttggaagttgtgttgttggattttctcctaaaattcagcgggttactgtatcccttcgtcctgcagtccgcatggtcaagcggttgtactgcatggacgagctctagaggtgaacggacatgcacgagtacacaactcgagtcttctttacatcgtttttgcacatctcgcactcggtagcactgttctcgccgtacgcagaagcggcttcataccgctatttctactgtggtagcaggattcagaattcgcaaaattacataaggccacgaagggagacaggacaagacagcagggagacaacaatggcgttgtcgtcgtccccatgcacgaaggcggcaacctacacgctggcaaatcatgcaagatcacaggatacagaatcgccgaaggtaatagctttgggctgttccggccatacaactgaatggatgacagcattttggctggcagtgggccgtgcgccatggcgctgtccaagttctttaatcatgtggtgttattagcatctactcccggacagggtatatcgagttgtctttgcttggatggcttcttgtcttggataagcgcgagaaacctatcaaatttattctgccaggttgctttcatgaattattagtatttcggatggacctgattgatcttctctttctgtatgcatgccctgattaagctccaatttaaactctagctcgtttaagaaatccaaagtactctatggtttgtgttatgtggtaggcccatgctaatccaaatttatttccaaattccaaaccaatgatcttgcatctcccattatttgcctgttacatgtggtttggttttgctaagctggtacgtaacagaatgtcatttgcgtgcaaaagctgatgcttagtttatctatttctgttcatgtcaagaaaagccaataataatactccctccgtttaaaaatattatttgacaccgttgactttttagcacatatttgaccgttcgtcttattaaaaaaattataaaatatgtaaaactatatgtgtacatgaaagtatatttaacaatgattcaaatgatatgaaaagaataaataattacttaaattttttgaataagacgaatggtcaaacacgtactaaaaaatcaacggtgtcaaatattttaaaacggagggagtatgacctaacgaccaccggccctgaactatgagccaggcagtagttaggccctcactatattaaactaatatttgcggaagagaactgatcctcgtcgatagctttttatactttgctggaattgaatttcttattgattagttcatcctcgaagccaatcatttggcttcaatcatctggagcatatccacagacaccatcctaccagatactttaaattgaaaataaattcgcacggaaaaccctaaatcatccccataaattctgcaccacgcaaattaaaaaactgatctggaaaaaaaatcaaaaaactgttaagtcagtaaaccatcattcgcgtggctgacactggagcagttggctgtggcgctggcgccgcccagggggttaggcagctgcccggggcggcgcatgtgcgcgccacggacgtgtggcgtgcgcgccgtggccggcagggcgtgacgcgacgtgcacccgttcgagtggcgcacttgcgctcgccgcggtggtgacgctctcccggcactgcctgcctgcctgcctctcatcatgcggctggcacggtggcaatggacaaggtggtaacaaggtgaggggaaaaaaatgaattttgaaacttgattttaaattgttatggggtttttcatcgctttctttttaagcttgcttttaactgctaagagtgaaatataaaaattctatccttacaaatagcaattaaagatttaccactggattcacatgttataaactgttagcgataaattattgaatgccacatcttaaaattactaaaaagttaaatgctcccatgcactagttgcggctgatgaaagaaacaatgcaaagccagcgagatactgatgatacagtggtacggctctgcagctttgttccaacggcttctcgattttttcagcagcagaaacagttgtggcaacggtcatcactcatcggagctcagagtctgctccccccgccaataatacagtgatatgtgtacgtgttcgtcagttagtgcgagtacaattgcactgagaagaacaggagggaatagttctccttttcggtaggattattgaaggagatgggatgtattttatgcttgttttttcccatagccatctgaattccttgattctgtgggctgaacagctagactgtttcagcagtgaaatattggagaatgatctgttcttcggtggaaagattgaggtcgttcaaagctcgggaccgaaactgacatgcatgatagtggtatttttgtttctcaggatattcagagcatgcgaagtggctcatggaaaaacgttagttgcaaaatttcaagcacaagtgaattgatggtcttgtccctgctctttattttaggaaccttgttctttaattctgaagttgtacagttctgaatttctgatggctcatcctggactaattactgaaaattcaggtcatagaaattcagcaacgaaacatctgcaaaataattttggccacaatcatgccctgcttaggtgtaaaggacgaaagtttccatgcttagctgtagcatggggtctctgaattgctggaaactctgtgcaatagcaggcctctgaatatcaatcaagaacgtcacccaggctttttccgcaaacaaattcagtgcaacaactactgaaaaaacaagtactcctgtgcagctcgctttgcctcagaaactttactttctctcttcagatttttcagtacatgtagctgcactatacctgggccctttatcaccaggaacaccaaaacaatggcatcttttgactctccatggaagcgacaacatactacagtgtagcatcaaatgatatgggtcatcgagctaagtgtaacacattcaattaagtggtctgaagaaacttgaactccccaacaagttgcctatccttttttcattttgggtgaattgcactgcagtttttctatcattatgctttctggaaaagtttactgaatgatgaagccaaagtggttaggttcatgtttgcatcatcatccatccaaagcagtggcacagatctgtgctccattaagctgtgataaagcatcgacagtaacataactactgcaatgtaaactactccgatagtagtactcgtagtagttgttctctttctttaacacgcaactgtttaaagcaaagctgatcatatgcagcctgatgcaggaactgtatctgatcacgctaattcgacagtactagttaaaaaaggaggatttttacggtacattctactactagtatatactaccagtatatttaatttaacggtttaaaattcatccgatctcccttccaattatcctgcagtataaattgaaaagggtatatttgtctttttatctaattatgtgggggtaatttcgtgatttcacgtttcatcactggtcagatccgatccacggtcacccctttgtggaagtcgcgcccagtcgtcttcctcttgcgagcagcgagcgccgcctcgccgccgccgccattgggaatcgaatcgatttccctcctcctttcctcttcttgtgtcttttctggcgacccaaaaccctagttcttgagggaggcgatgggcaggcggagcagcagaagggtgcatgctgctgtggcataggcgcgcagcttccgcagctcgcagcggcaagggcagccatgcggcggcaggtcggatgcggggaagaataggctagggcttgagggagggcgccggggacgcgggagacgccaggcgcgtggaggttcggcttctcccggcgccggaggaatcgggatggaggcgtcggcgcgggagcaacgacgccggagcagcgacgcgagatgtatcgtgaagaagcggatgacgatatccacagaaaaaacaactgaaggaaattaatcccagtgaaaataattctctaatttaaatgaccaaaaagcccttttcagattttcacctaataccaaaactaccctttcatatactggtagtatatactagcagtagaatataccataaaagtccttaaaaaaaggtttctaaactcgaatcgaagagggttctaaactctaaaagaattagccgctaacatggatggactgtacatcacaaattctcacacacatgacacatatattataatcatatatgtgcccccatcactgtcctttcgacgttggctttggatcccggacaaaacagaaagaatccttcgaagtgagggaaaggattaggcatcctggctagtaggaggagtacaacagaagaagccatacttctagaattcagtattgcataatgcaattaggctgtgttcttggtggaagttaagaacctcacctctcgacacgaaaatggaacgatggactaacatacaattaattaagtattaataaaaaaatataaaaaaaaaggttaatatgatttttttaaaaaaagtaattttcaatagaaaatttttgcaaaacacacattgtttaaccgtctgggaagagtgtgcgaaaaaagaggaggagttaggctgcgttcggatctcggagatgggaactcattccctcctcacgaaaaacggagtggtccattagcgcgtgattaattaagtattagctaacttttttttaaaaaaaataacttttatatagaaaattttttaaaaaacacatcgtttagccgtttgaaaagcatgcgcatggaatactagtaagagcggttgggagtcctttgcaacgaaaacagccttagtagcaagcacaaactaactcagctttagaggcccctcatattgatgtttaacttgttatggggcatttatttctacacagtctcatttatcaactgaaactaaaaaggttgtccaattccgtcctccttttgtaacggctcgcaaatacaatgggttgtttagattcatgtcattttaaatcatattattttttataaagttatcaaaatgtacatatatttatttatttttaccaaactttactaaatgagataatccaacaaatggcatttaaagcgttcaaatccaagaaatgccatcgccgttatgcttccgtccgtttcacgccgttaaaatacaatgttcatcctataacacttaatggtgtggaatggacggaaccctaacggcgatggcatttttgggataaagtcgtttgtacgatggcatttcttagaactcatatttgtcgatggcattttttgaatttggatgattgtcaatggtattttttggattatctcttagtaaatacataaggaatcatgccaaaacttgacaatattgtcaacttatcaaaatttaattgggattattttggcgataatatgaacagcccttacatttctgaagaattatagctcaaatatggctatggccctgtttggattcggagggctatttaatagccctccggaatcttgctatttaagagtattaaacgtagattactgataaaactcattccataacccctacgctattctacgagacgaatctaacgaggtatattaatccatgatttgctacagtaatcagccgctaatcgtggattaatatacatcattagattcgtctcgtaaaataggctagggattatggaatcggttttatcggtaatctatgtttaatacttctaaatagcaagattccgaagggctatttaatagctcggagcatccaaacaaggcctatgtttagatccaaacttccaactttttctatcacattaaactgtcatacatacataacttttcagtcacatcgtaccaatttcaacccaaactttcaactttggaagaactaaacacagcatatgacagtgcagttcagctcaattttgttcggagcctaaaaaaaagaaaagaaaaaaagctcaatttggataaggctatgaataaactcaaaaaagcatccaacctaaccaccacactggcccaccagggcccacgctccactcccgtgatcatcacctccttccctttccagaaccaccttctccttccttcctcctcttcttcttcagtgtactctgcctttataacaccctactcctctctctcacctccaccatctagctcactcacacagtctccactcacacgcattgcagaggagaggcgacaatggaggggaaggaggaggacgtgcggctgggggcgaacaggtactcggagaggcagccgatagggacggcggcgcagggcgccggggacgacaaggactacaaggagccgccgccggcgccgctgttcgagccaggggagctcaagtcgtggtctttctaccgggccgggatcgccgagttcgtcgccaccttcctcttcctctacatcaccatcctcaccgtcatgggggtctccaagtcctcctccaagtgcgccaccgtcggcatccagggcatcgcctggtccttcggaggcatgatcttcgcgctcgtctactgcaccgccggcatctccggtcagttcactctcctttggcttcctcccccaccttcaagatctcaagtcttcaactttgtcatgattttgccttggtttgtcttgctagttgatacttacttgttacctgcactttgcttggctcagtagtttcttcatactagcatgctcactttagtaaagcatgaggtatagaatcatgtgtactactactgctccttccataagtagcaagactttgaggcatatggcattaacactgaataattgatgaaagacttttagttacctgcttttggggtgttagatcagtattagtaactggaaattcactaaatttgttgtccatgctcttgtagttttaaagaattattatagctttctacaggtgttgaatgcaccaaaaatttatgacactaccttttgctcttgtaccatcatgtaccttgtctgcgcaaagatttgtcgctggcatattgtactgctgtggtatgtgaattttgttcttatgcaaaggtttgatttacgactagaagattaaggatttaaggtcatccgattgatttaactcttaacccagcattttcttcggtagtgttctaactgttgatgctgaaaccacacaaattatcacacaaaaatatattatttttagttcatcaaaattgaatgtgcacttggagccttggaggcaaagaaatatgtgatgccaaaattttctccttggttaatcttcctaccagaatattaacaaaactatatgaacaagtaaatatcttgtgttgtcaacttatacagtctatcacaactcgcaatcttagaagttaatttctgtaccagttttatataatgcttcaaaatctcaaatactaccttgttaatctcaaaatatgaatacatgagggtacactatacagtcttacttcaactgtcatgacaactgaccacaaaacaactacggcaattaagggcactactaatatccattatattgtctgttactgcaacaggaggacacatcaacccagcagttacttttgggctgttcttggccaggaagctgtccctgacccgggccatcttctacatagtgatgcaatgcctaggggccatctgcggagctggagttgtgaagggcttccagcagggtctgtacatgggcaatggcggtggtgccaatgtagttgccagtggctacaccaagggtgacggtcttggtgctgagattgttggcaccttcatcctggtctacaccgtcttctcagccactgatgccaagaggaatgccagggactcacatgttcctgtaagtatccttctcctttttgcagtgtgatatgtgaaagttcagtagtagttagtgtggtctaatgagttatgcactgtgataactaattcatcaccaaaccctaaagtgataatgtgcaaatcactaagcagtattttggttagcacctttacatacctcactcatacagtatgcctttaacaatgaactggtgtgctcataacttgtaggtgtgcgccatttatggctagacttttaactagtttaatttatcatgtttgctcaagaaattgactgtatgcgtatagttactggaagtatatatgggttttttgtgtgttgcataacgtatttctgtcctttgttggtgaaaacagatccttgccccactgccaattggttttgcggtgttcctggtccacctggccaccatccccatcaccggtactggcatcaacccagccaggagccttggcgctgccatcatctacaacaaggaccatgcctggaatgaccatgtgagcaacctttcttctctttttacctactcgccgttctcagcaattggttcctcttacattatcagatattagtcagcacatcattgataatcgatacattttttgttggcaaattgaggtctaagctgataaacatgtcagtatatataatcaaatgttctcagcaattggttcctcttacattatcagatattagtcagcacattactgataatcgatacattttttgttggcaaattgaggtctaagctgataaacatgtcagtatatataatcaaatgttctgatactttttttggttatatttttctctttgtatgggtaggtctaagatgataaacatgtcactataaccaaatgtagcagcatgctcttgctaaagtttacttagtagcttaccagcttactagcctttgctcaagaaaagagtagaagacacgacaaagagtttttccttacaaattttggtatctaaattttgcagtggatcttctgggttggtcccttcgttggcgctgccctggctgccatctaccaccaggtgatcatcagggcgatcccattcaagagcaggtcttaagccccgcgccgccgctgcgcagccgacgacatgcaacgcaatcgtgatgtcctgtttcccgcgcgctactgctgcgcatctgtcgattccctctatctctagtccccaagatgtttttcctatctgaaccctgaacaactcaatcgtgtaatccagtactcagtcactgtatgtttttatgtgatggagatcttaattcttaagttatcatctctgttgctggaaatccggtttcctcttcgtgcatgaaccgcgcctttaatacacgtactagaataatcttggcaggcagcaatgctggtatgatcctacgaagcctgaactatgaatgtgaagggaagaacgaagcaaaagagaaaagagaacaaaaaggtagctctgtctagttcccgaccgagtaatgccatgaaagaacaaatgaaccctagtgagtgtactataccaggatgagtgatgagtccagccttgcatccatcaagggctagggcttagcgatcgatctgatgaggagcggcggtttgaatctgtatgaatgagttagtggtgggcctggcttatgtgcgtcaggacaacgataacgatgaagatgaggacgattgatggtggccgggcgcggtgtaaagaaggccggctggccgggtagtgcgatggggacccgctagccaccgggcgcacgctactactactacttgctacgtaccctacggcagcgcggcacatgggaggtttggtggggtgtttggtctcgccactagggacttggaggcgccgaggcaaaaggaagttgaaacttggaagcaaagcgtgtaaaaatataatggagcagtgtagactgtagagatagatagatgaagtactatactagatacctgggtcgcatttagccatttactacccttttgcatttcgccttcgtcatcctgcttcagggaaatttggcaccagggaatattgaggtttatttatcatcatctcatccctcaaaaatatatgctaaatggaaaattaaaatggaaccgttccaaatgatcctatgaggatgcaccacccatcccatggttcagacgatttcccacttaagagctcctttgaatcaaagaattttatataggagtctcatacgatttaaatcctataggaatattttctttgtcgctatttgattcaaaggattaagggtttctaaatccaataaaattcctatagaatggctcattgcatatagattttagaggaaatctagcaagagctagattttagaggaaatctagcaagagctccagcctcttcaaaaatttcatttaagtctatatctctcatccaattcttacattttcatgcaatccaatcaaacgaccattcctatgttacacgtgtgttttgcacttgcatttctataataatcctatgtttttcctattcctccgtttttttcattttcctattcctccattttttcactaatacgattcggggtgcaggaa

SEQ ID NO: 8991 - DNA, 696 bp, Oryza sativa
agcaatgttgcttagtaagttgaattcgaatctttgcgctttcgcattttcgcgaagaacgctacgaaaggaccgagtgaatgatctgcaccgattgaaagaagtccgcaaaccagctttattcagtcggcccgatattacaaagggttgcgacgttatcataatcgcaatgttcgatcccgtgctttcctagtcggcgacctggttttgaggaaaattcaaactatacgagatcggcacaagttatctcctctatgggaaggccatttatcatctctgaagtcacccggccaggttcctaccgactcaagcgcgaagatggtacacttgttgacaattcttggaatatcgaacatcttcgtcgtttctacgcttaagtttatccatgtatttccctatcttgactgtcaacatcaagctttcttcttgaggttgtcagtcgggggctaccataataataatggagtgtgattttttatcaattcaatttgcttacttggtctatcattgccttgtttgatttttctacttagtttacgaggactgaaagtttttaatagcttttgcgggttttaggctcaacaaagcttgataaaggcttttaagaaatcaacagctaagccagaaacaccaagcacagcataaatacaccggtattatacaaattgtgcctccatcattcgtcattcgaaacat

SEQ ID NO: 8992 - DNA, 7708 bp, Oryza sativa
ccccatcaaccaccatccctcgtcggtcgaacaccttgtgcgcgatcgactccacccctctccatccatcctccgccctaaatatcccttagaacaccttatatcaaccatgttctagcatagtaagccctaaccgaagctctgcgtcgagttttacctcgccgcaccaacccgagcaccgccgcccccgcgctgctctgttcttcaccgccgcgaagtttttctggccgcaatccgtcgtttcaaccgatctcggtgagtttttccgtttcaaccatctacatactacctagattccattttagcaatccctttgcactaccatgctcccctctaagctgccgatgtgagcacggccgccgcctatggaggcgctcgtcggcaactattctccgcaccttgccaaaggtcggcaagctgccggaatccctctagacacctcgtagatgctctagaaccccctcccctagccatgtctaactcatatcaccttgatcaccattacagcctaaccgtaccaccgccgccctagtcgccaacccatccacataccaaattagctcctccgccgccgatcgccgtcgccggagatacctagctccctcccctcttcggccgcaaccactttccccctccatcgccgccgtaatcccaaaccctagcaccgccggctgcatttggggaaacggccgaaggtagaagaagagaagagagagagagagagagactgacaggtgggacccgcacacagtgccatttcacttttatttgatttttaaactttagaagctcatatcttttaaaatatagatccaattccaatgaaacttggaccaatattcttctaaaatcattctctatcttttgagcccctttttgctatttttgcattttattttattttctctatttttcatatttttggatttcatttgaattccttttaaatttgaattttacatatgtctaaccctaggtcttgaggattcttctgactcaatagataatatccatcaatctcaggacatcgagcaaggcaagttaccatataccttttgatcattcaagcctatattttataaattatttacttatagccttctattcaatattctattttctatgcataaatcaatcatagaaacccagataatttagtattgcttattttgcttacaatctggttaaaataccctatacttagattgggacagtacgtaagatttggctgatttccgggtggctagtactgtctcaatcaatataagttttaccagatacttatgttgaacgaacgagtacgaccgcagtttctagaatagggacagacctagttattatgttaattagcaatatggcacctctgtatagtggttcttatttttaagtcctcgtgcaggaggcaactatagccgcgaagggaaactttaaccattaccatgtacaggtaaatggtttgtgatactcgagtataaactatatggtatatttctaaaccctgatcgagatgacgtggtgtcatacgatcagttccccttaaataccttgggaacgccagaactcctcttgctgctgttaacattacattcagagcatatgaggatatgagttcatggaacaggtgccacaattgttaatgacttaatactggaccatgactaaagccgatgattatcagcaagtcatggactgcgggtaaagcgtacatctgctacagtagaatatctttgaaactattcgaatagccgtactcatggagttgagtactgggactcatatggtaccctggttagaaatctaaagtttatatgttttataaattcttgctataacttttccagattgtctagtactgctttttgcaaagaaccctattatatgtcaatgcataacatattcccatgataacttgctgagtattgtaaatactcacccttgctcttataacccctttttcagatctgggtcaagaggaggacccttatgactattactacgaacatcccgataacttagagaatccctaaaggttatacctcactagtcagaatgtatagaaacttctgttgtgtattaattagttaggtgagtacctattattgtaaaacccttagtattgtaagactttttaacatatgcaatgaagaaccggttatattgtatgtatcaatatttactgatccagggattgattcattaatctcagtcggattcaagttattagttttgggctccgacaccatatgtgcctttttcctctataattattccatcgcaacacagggcttctcaggtctcagctacactggtggagaaactgtttgtagtctcggttggtaaccccctttagtcccggttgtccaaccgggactacgaatccgggactaaagataactatctttagtcccaggtgaaataaccgggactaaagatcgatatttattcccggttcgtgttaccaaccgggactaaagattgatcagccacgtggccggccaaaccatctttagtcccggtttgtgttaccaaccaggactaaagatcggtgcaccatttttttttatttgcaaggccctgtttgctgcatggttgattatatatatatatacatatatatgcataatatataggcatatatatatatatacatatgttacaatacatatatatgcataatatataggcgtatatatatatatatatatatatatatatatatatgtgtgtgtgtgtgtgtgtgtgtgtgtgtgtgtatgtataatcataatattacacagacatatgaataatttaaagcacttaacattttatgtgcatatatatatgtcaccaaaatatatattaacacaaaagtaaatgtgtacatatataaatatatatatacatgcatatatagtacaattcatttgctcggtagctatagctacgactttgacgccggtgttatgtcagaagaggaaggaccgacgttatgaattgtcgatccgtcgtagtagaattcaccgtcgagattaaggacttcttcgttgatgaatcccatcagttgttcttgaacagccgtgataaaatccttgtgtgggagattatccctcatgtgaatacgctatcgttcgaaaaataatgacgtatgaatatatgaaattaataaacaacttaacaaatcgatacgcaatgaaattttgaatggtttatgtatacgtacatcgagctctcgtgttgtgcatatttggtttgataggcagtgggcatactcgcatacgtagtagccgcataagttagttccctggtcctgctttgcacactacatgagaaacgatgagagatttaatatactctttatattaactgtaattagagattcaatccaatataattttggatcatgcatgtactcactggaaaatcaaacctccgtccaagtttttctttccaagtcccgcggaccaattgacggaaccgatcccaagccctacatatgcagttgcaagctatgattaattaattattacttgagatcaacataatagcaatagattccccgcgactttggaatagatggcattatattacctgtctatcagtttgaagaccttatcaaaaatcttctcctctttattcattgagtcgtacacagtgactctgcatgcgtccaagtcgaagaataacaggacccagtggaatctggaatatgcgtgagaagagatatatatgatcaaaaatgtacatgctatatgtatgggaacaaaatttgttcgaacgacaataaaaactcactctgtgttgtacggcagtagtatgtacgtcttgaaatgttgctgcgttaggagatggacgagattgtcctctgtgtctttctcgtacttgtcgatcatttcggtgttgattttccgagggtcgatgaacccagtatcgtagacccccgccgtcgggccctttgaatctccattctacaacgatgaaaggaaagtattattgcttacatatatgccaggagctaattattgaacgaaacaaatcgaactcaaagatactcacaaaatccatgcgctcagaagagagacgtcgagggcgtccaactggtacagatcgaagagatccttgaaatggatccagagaacatcttctccttgcaagaagtcggggtttctgatcctcgctccgaacatctctctacccttggcactcatttccatgtaccattcatggaatttgtacatctgtgtcggtagggactgcagctgtttagttttgacaagcggtttaccgagttcaaacttgtatgccacttccgccttcgggattggtgctcctccaaccaactgatccacagttagaccggtgtctgaaatgaattccgttatgccaaaatcttcgccggtcaccaacggctcgacctcttggtttggttgttctccaagctgagggactggtttggacttcttgtgataggctctctgaagtgttcggtcatagtccgatatctgtaacgcctccttgtttgttgtggacattcccttgaagaagttcttcacgctcgggtcaataggtatcttcttttcaggactccaaggcttgagttgcctcttcacctctcctgccacataagcatcaagctcctcttgactgcaatcgtacggtggctccttgtctttggtggcgtcaactttcgccttctttgttgcccttgtgcgggcaagcagtggagcttggcgagaccttgtcttgggaggtgcaggcgaacacggtggaggcggaggagctacaggagccggaggagatggtgcaccagtgaggtggcggaggaaccggaagagatggtgcacgagacgccgcttgtcgcccaggaaggatgatgtactgcttgcgccatagtatgatggcgtggcttgtgtctcgtagatgcgtctcaccgtctcctcctgggtagtccaactcgaggtcctcgtacgcggcttccaccaactcaacttcgacactcgagtatcctgctagaatcggcctgtagtggtaagtcccggaagggtccgttgggatggccattcctgacgccaccttcacgtgatgagaggttatctattagtaatcaacctaagcagcaacttgcggaatgtacaagtcaaaaatcatcaaactatgagcataccttgattgataagttcttgaagggaatatgcagctcacatggtgtccgctgcgtgatctcatcaacggggcaggtggtttcgtcctgggtttgcatggcgtccatgctctgtgatccgacctgccccgttgagacgcagctgctacgattgcctgatgggctgaccattgcaggatgaatgtacggctggggatcctgggaccgatgtgcggccatacgttcatccaccttccttgccaccttctcttgcatgctgagctcgtagctcgataccctgtactcaagatctgcaatcttcgcctcggtatctctcttgctcctcatccgactcctgtacgtgtggatgtcctccttaaatccaatcttccagggaatcacacatttccctcgtgttcgtcctggatgctcgggagtctgtagggcgagtaacagctcatccttctctctgtctggtcggaatgtgccctgacaagaggctaccactgcgtccgttagtcgactggcggcctcgtgtatctgatcgctaaagacaagggagccatcaactagattaagcgttccaccgtgagcatagtaccagaacttcgatcgatccggccatttagtggtggccggttcgatacccctctcaatcaaacttgcctccatctcctcccacttcggcattgcgacgctatatccgcctgaccccaagtggtgatggtacttcttcttggcggcattttctttgtttctggccatcatcgcttgcccttgtcgccctgtcttgtaagcaacaaactcatcccaatgatcccttagctttgggaatacgtcgaagttcggtgttagtcccttcaggatgtatttcttgtagagatctcccttgaagctctggaactgttccgccattttcttcagagtccactgtttcactatgttctccgtacccgcgggtagcgtgaacgtctcaagcattgtggtcccagcatctctttcttgagtccgggcaaactgtcatatccctgcgtgcccttgttttgtgccagtacaccgtgctgacaggcacgttgtccctcacaacccaaccgctgtggcgtacaaaattcttggctgcttctgccgaggcactaggtcggccgtcttcgtccacctcagttatgatgtgccgaccctctatcttcttcgcggcacctcgttgtccgagtgccctcttctgtccagcggagggatgacttccactagcctcctcctcatcgttcccctcctcgctcccctccgcatccctctccacgttcccctcctcgttcaagtactggtttggatcctcgttcccctcttcttcgttccagtactggctgcttctctctgcgattgtatcgtatagtatctgttcctcatcgcgatcagccatctgtgcatacaaaaaatacttgttaggtatataggatgtatttgctaaccgtaatattaaaactctactaatcttatattaaatctctaataatcttatattaaatcgctactaatttcatattaaaattgtaataatcatatatatatgctaagtataacaatcttatattaaatcactgctaatcttatattaaatctctactaatctcatattaaatcgctactaatattatattaaaattgtaataatcatatatatatgctaagtctaagaatcttatattaaatctctaacaatcttatattaaatctctaataatcttatattaaaattgtaataatcatatatgctaagtctaacaatcttatattaaatcgctactaatctcatattaaaattgtaataatcatatatatatgctaagtataacaatcttatattaaatcgctactaatcttatattaaatctctactaatctcatattaaatcgctactaatcttatattaaaattgtaatagtcacatatatataataagtctaacaataatatattaaatctctaacaatcatatatgctaagtgttacaaacttatattaaatcgataacaatcttatattaaaattgtaataatcatatatgctaagtctaacaatcttatattaaatatctaacaatcacttctttacatcatttgcctgcgcgaattccttcgatggctagctaccacttcggcttgagggacgacgacgatgtcttctctgcaacattatcaggaaaatgtattagtctaaacgggccaagttacatatataatcatatatgtattaccagtaaatcgtattagtataaacgcgttcgttctcacacttttagtacaagtgcatacacgttcgtaagcgtttcgtgcacgttcgttcgcgttccgtaatcgtttcgttcacgttcgttcgcgttcattaacgtttcgtgcatgttcgttcgcgttcattaacgtttcgttacgttcgttcgcgtttcgttacgctcgttcgcgttcgttaacgtttcgttcacgttcgttcgcgttcgttaacgtttcgcgcacgttcgttcgcgttcgttaacgtttcgttacgttcgttcgcgttcggtcacgtttcaatcacgttcgttaacggtcggcaat

SEQ ID NO: 8993 - DNA, 6019 bp, Oryza sativa
aaacgtaaataagaaacaagtaattgaaaatatcataaaagcagactaccgtcgattgaagagattgagcaatcttttctccacttggaacttccaaataaacctgtattatagcttaaaaggtaatatgagtagctacaaggaagaagaataaggaaaaattggaaaaaaaaaactttcactaaactaaacaggaaaataggcagagaggaaggttaaaaagaaatttaattgttagtagctacaagtcagacaaatatatctggaatatataaacaaggttacaagagttaaaaaaaacaaaaaccaaaatatgtaattttaaagggccaattagttaatctctaaattggcccttaaaacacaatcaacctcaataacaaagggagcctggatgcatgcatttatgaactattccctctgcataactatatcggccgtgtatttttctcgcattaaaccaagaaacccaatgagatagcctaaatgcccatatttatggctccataagagtattgatgcaattgttgcctggctctaatcccagctgcatgcatgcatgaattaatcgtattatcgatcactcaattaaaagatcaataccgtatgctaagagcagtgataactacattagcaagcactctagcacccaaattatacaaattggcaaacttcatcagcaaacactaataactaaaatggatcagtaaaccaaacatgtaaagaagcatattggctatatagactgcagcgctaaaagaagcatagtccaggtgctattgggagctgaagcaccaagcagccaaacatcagtgctctaaaaatcggtgctaggcgcctattagccgcctgggattaggcattacattgtgtactagacggctagccatccttaggtgctcttgtgcgatctaatttagtgttgtactgtctaatttttatgtaatatgcttgctaatttcctaggcgccagccctgcagacactctagggctattgtattgtctaacatttgctagtttaagttagacatgataaaatgtatagtacatagaaaatcagcagagtttagtgcatacaatggtaggaaaaggcggacgaatgagtgaactaagtatctgtggatcagatacatcagcatcgcgccagacaagtgtaccaatttcttcttcgttgtcaagctgctgaccccggaggtacatgaagcggggttgcaaagcacgttgtgcctccagaaattcatcaactgtagggttaatcagcgtgtgcacctgcatgcccagctttccaagttcagaactgacaaacaaaatatatgtacttaagagcaagtttaatagtagatctaactactagatataagctaatcaaaaagtagcattagggctcacatgtgtaacagattagttataaggttgtctctaattttcttctctctctttttctcatttatataattaatgcatttatcgtagacaggggtggagctatcaaaaatatcattgaggtcactcttcacataccatggtgcaaatgccaattctaagagtaatttattagttccaagcatatttaataatataattagcaaaaataattggtgtcatcagtaaccatacactggatccgcccctgatcttagagcatgtgtatagctaactttttatacacaagagcttaacactttttattctccaggttatctctcctccacataggtttatactagatggattatagcctacaattaaacttgctccttaacaaaaataaacagcaaaaggatacttacctccaacctcccggacgagatcaactccgggaatgggtacgatggccgctgctgctgggacccaggcaccggacaaggtggcgcccgctgcttgcctaccttcccacacagcactgcaagcaccgtgcacttcacccttgagccgctagggaaatgaggcatggttgaaaacctgcaagggtttgcacccatagcaacagcagatcgatcagacctccacaatagttctccacccgaaaccaacaaggaacacaaaaggaaccgagcaaatcaaacgaataccccagatcggatcgagcagcgaaaatgggatcgagcagagaaaatcggatcgagcggatctaagctaacaggagaccaaaaccgactgccacaactcggaatcgggactcctgagccgctaggacgccggtggaagcgctcgatccatttggtggtggcggcggcggaggtaagaggaaagggtggagctgggatatgggggcgagaatgcaacggaaccctaggtttcctctcggtctcggatcatttaatagagccaaaaatgaaggggaaaacgccgattaatccccagaagcgaagcaaaaaaggcaaaatcgtaacggcaaaaaaaaaaaaaatcgattggccgggagggacgaaccgctcgaggcactggagatcgaacgatgcacggaaacgtgattttccccaattcctcacatttgctacggctgctgctggcctgctgatgctgatgctgatgacgacgacgatgattcatagcttgcggagagaaaaacaaaaaacatgtcggattaaattagctttctcgcagcaggatttggaaggagaattggagagaaaaattaaaaccgaatttgttctgtgcttttctgggcgcatacctcgatcagctttgattatctgctgctgcggctgctactgcttttgggttttttcggccgcatccatttcgatcggatcggatgcgtcgcaggcccgggtgttgttgtgtttggctcatggcattggctccggaggagggattttgggaggaatcgggatcgcacggcaggtctccgggcgggagacgtgcgagcggaggcgccatgttggattgcttcgaggggtgatggtgcgtccagtactccagttcctgcatgttcgtccggctcttgatatttcgatgacaagagtgcgaatgaacaaatgcgagcggaagggagatggggatggttgatgcgcgggcggtcgcgcaccagctcgatcagtttccccctctagtcttttccctctctctctataagtatattgatacgtatatacacgtacacatacaaactttatacttcctccgtttcacaatgtaagtcattctagcatttcccacttcatattaatatgtttagattcattaacatcaatatgaatatgtgaaatgctagaatgacttgtattatgaaacaaaggaagtattttactagaaaagatactagtgcgttgcaacaggtgaagattattttaatcttgttattgtcatacagtttaattgctgtgaaatttattgtagaaattcgcctggatatatatatatatatatatatatatatatatatatattaaaaaaagcgaacttatttccaaaagcgaacttaaaaacggactcatacacggatgatgtactaaagtaccggtaaaaacatcttcaatttttataatagtagagatgtgtgtatagataaaataaaccgaaagatacttatatatttaaaaactgaaataactgaaacaaaaccgaaagaaaactgaaaaaagaaaaggaaaaatcgactcttcccacgcgctccatgagagagaatctgacttagaccctgtttctttccgcttaagattattataatctagattattgagttagattactataagctagattgttataatctgtagtagaatacccggttagttgtttctttcctagattatttgggtttgcaagtctaaagagggagtggggtgacatggtgggtaatttttcacccaataatctagaaaaagctcacctaaatgagtttatcatattataataagctgggctccagattataataagctacttcaataagttgtctgtttctttcagcttactcccaataatctggattataataatcccaagctgaaagaaacagggccttatatgcgagggccgactaaatagcttttttctttaacttattttgaaactagtatggtgactcatcgttataatttttctcacataatagcatttttttcatattttatttttaaaatatattaaaatggtaataggattttaaattactagcaacatgtatgtgcgttgcaacggatgaaactaatattaatataaacaacaaataaatactaaaattaaaatttaagtgtcacaacataacgttacggaagaatttaattttttggctaaatttcttattggccacatttggacaaaaaaaaatcaaagtgcaaaaatattcctaaatggtaactccgttgggccaagaaaataaaggaaataattcctgcgagcctgacctgaaggcctacgaacattttaattggtcgatcacggttgacagggggagcaggttggtttttctttggagttcatgtctagggttttccctgcgaaattttttatatttttttagatatttttatgttttaattttattaatagaccattctaaaaaatatttttaaatctggaccttttggcccgcacgtggccaaataactctgtcacgccgcgtgcagcgggcatgacaattttatcctaccacgccagcgagagcggcatggccagataacactgtcaagccaacgacgccggcgtggccaaataacgctatcactccagcgggagcggcatgtcacgcccagaaattcactagtaatttccaaacttatttgtgcattaaatcctcatccagaaatcagccgaggtacacaaactgacaatttaatatacagattcatcaagttaactaaaacgataaatacttacataagaggcacttagtcctcaccacgaagaaaactgcagcggaaaataaaatctagcgaagctccggctccactcccacaggcagctcaactagggtataagccaaacatcttctccttcgtaacttttcttcaactgaggtttgattgattattacaaggtgagtacatggaatactccgcaagccacacagcaaatatgcaagtgcacaaggataccaaaggatgacataatatagggctcatttgcaaaagcagcatttagcaaacatttaagaattgtaaaacagtagagtaattaatcatcaatattaatcaacactgaacagcacacccatgctgcacaggcccaaccatcctgaacaaccatacccggctgtacagatctatctccaaaccaggaataaaccattcaaaaccaggagctaatcaaattattaccagttatagcatcatttattatgatgaaaagtgtgagactaatcacgaaagacattgttagacctgcctataaccgcgggcacggctattcgaatagttttactctggccagaggtgtaccactgtacccacaagacacgattccacacatgttaccatgccctgaagtaccaccacgccactgcaaagggggaaatcgtgacagtacccttcgcacaacacaactcaaagcagtgcaccgttcctggatcataatcacccccttataaacacaaggcatggactccccagcgacccccgtgggcttatctccgccacttctcagtctggtgccccgcaatgaaccatgctatacaaaagataaagttgttgcccatactggcttgtggtttgcacggttaatgtttcacaaccgaaactcgtgaaccagtccttaattgtcatgagcacgaccagcaaaaccatgtgctcacaacccacatttatcaagttttagttggcaaattaattaattaaccaatcatgattagccatcgtgagctaccattatcatgtccatcattaagtagtagtgaaacattagttatcccaatagtgtgctaatgtttctaagcatggctaagcaattatatctaatatatctagctgaaccaatatataaagctcaactagtcaaattgtaacccaaggtatcaaaggacagagtaatcaatacaaagtggccataacaaaggtatagtttcacaccaaccgg

SEQ ID NO: 8994 - DNA, 1485 bp, Oryza sativa
agctatttgcatgcatggtccatagtaaagctaatttggcttgacccaaatgcccttgattcagccactccactcaccgagcaagatccttatcaccgtggggcccgctcgccaggagcgtgttccacgtccgcccgacaccatccttatctcttccggcgaactcatgcaacaatgccctctcttgatctccctcctcgggtgctctcgccccagattgaatgtaaaaatcgactgctctcatcctcctcattagttccccccacaaatcccactcaaatcggcttaattccgttgtggattttgaagtccctcttcaatggcgagctccgccatggctggcgagatcgatagccatactagtgctgctgctgccgcccaaaccgcaagatgcgcggcggccgtccgtcgatcatgatgaggagctccatcaagttctcgttgggcggtaggcaggtggcctgtaccaggaacatgtcacaaccacgcacgcttcctcgtccgtggaccgcttgatctttacccgacccaactccatgccaagatagcacgccacctcctgcgccagcgtcgggttcgctgtgccggagaagatgcgcagccgactgctagagctcggttgcgatagcgctgggactgggagcacgtccgagctatgcttgccgtccggctgcgattgctagaggaagaagacgactggatggagatcgatctgtccctctcatgcaagtcaacgaaatagccataggggcaaaaaagtccgatcatagtggataacatttgcaaataaccgaaattggatgaaatggcaatgtggcaagatggtgacgtttgaagatggcattataacgaagccacgttcggggatggcattctagcgaaaccccaatccgagaatggctaaatgtcaattttctcatgctagagagccgagaggaccaatcatcaacagaacttggcccggcccggaccaactataaactaggcccggcccggcccggcccaactatgtctgggcctctacctctccgcatcacctcgggccgccgccgccgccgcttcgtcgccggcctcgcccactcggaaatggcggaaatgggcgccgccgccgccgccgcggtgccggttattccggaggacgtcgtcatcgagatcctcgcgcgggtgccggacccgacgtccctcttccgctgcgccgcagcgtgcaagcggtggctccgcctcatcgccgaccaggccttactccgccgccgctggccgccgggcacccgggtgccctccctcctcggcttcttcgcgcagcgccaccagatccaggccaacgcgaggcggaagctcaccaagctcttcccgacccgcgcgccgccgctcgtcgcagcgccgagcaggggcacaggtgacccacccgttagcaccgggcgacgaaggcggctgttcctcaccgacttcgtccgcaacgccgccggcgccggcctcttcgaccag

SEQ ID NO: 8995 - DNA, 1353 bp, Oryza sativa
ttccatggtatatatcctttgtattgtattgttaaatgcagaacataatgtatatcaatttaatgaaaacctaggcgataaacctgccgattgtgaataggattcaacaaacaatttaaggtgaatgaaacacagctgcatggtcaaactatttttcacctgtttcagtgatatccactatagctcccaaaaaatcttgatacaaaatttgtacttgaatattaaaatcagttaaagcagacaaaaataacaggcgaaaaatattggaatcgtcatacttgagaagttctggagatgggcaccaacatttcaagaaattggtggtaccagctattacattggtttcctgaattctgcttctgaatttgtaagataaggtcataagggaatttcacgatcaactgaacgttggaaccaaaacatcacttagttcgcattaagattgaacatggaagtgcacatatgcgaagcactagatcattggcatttgaactttgaaacagtatataaccatacaaagtagtgctgaacaattaaaattgtccgaaaagcatcatcactccaataggtatacaatgtcagaaaggagatggtgtcttcttgcattatcattgacaagctaatgttgtattcatgtttgcgttttcaaagtaataccataaacctaagtacctaactcactcttctattagcttgagatttttctaagatggaaatgattaaccattacagctgtatgttgatgagggagcactaagctatcccataagcaatagaacacctagaaaaacagaaataggtatgacactttcatgaagaaaacatgttatcctataaaaaccacatgagtaatttagagaacaacagggaacatgaacacatctaagttttgaagtaaaagtgtaactgtaatgtgagtgcaggtaccatgctacaacaacaatactacctcttgaatttcctatgggatatgattatgataatcttgaagcatccgatgcatatccaaacaaaagaacaaaactgcatatatgctggaaatattgtagttcagccttcagacattagagtcctttggagatgataccaagctttgcttctcctcatctaactcagctgtatcattatcagccttcccttgtttagctacagcctcacgctgcactgaagaattcccttttaatgtaactgattgctgatagagtaccccgccagccagagtgaagagcaagcaaaccagaccaaatgaactcgcatgcttatcccagatcataacattgattgcaactgtgagaaacttgttgacaacacctgttactgtaaaagccgtggcggagattgctttccttgctg

SEQ ID NO: 8996 - DNA, 1781 bp, Oryza sativa
gtcgcagcgccgagcaggggcacaggtgacccacccgttagcaccgggcggcggcggcggctgttcctcaccgacttcgtccgcaacgccgccggcgccggccttttcgaccaggccaagccgttggcggcgcgcggcgggctcctcctcgtgcgcgtcctcccctcgccctcgccggcgccgcagaacgcgctccacctctgcgtctgcaacctgctcaccggcagccacgacgtcctgccccctctacccatggattgcttcgagaaagacggcgccagaggctacgccatcctcacagccgccgaccaccgcgtcagccgcaacccatcaggtggctacaacaccttcttccaggtgctcctcctcagcatccaccatggcaaccatcaggtatacctccacagattctcctcagccgctgccagtgccgccgcggcggcggtcatttttgagatatcctggagcacgcccagaaattgctctgaacaaatccggggctatgtctggggtccctctggaaacagagttgcagctgtcagccatggcggcgcacactggctcttcagttggggagaagaaagcctctacacccttgatgtgagcattgacacagacaacatcggcgcaaccaatatcccaattgatcctccccccactgtcttccaccaatcttggttgtacgtaagcgtcgacgagaggctttcgcttctttatctttgtgacaacaaacttcatatttggaccaagctagaaacacaggagagtggtcgtttgctctggaattgcacccaatcgatttgtgttggcgtgaagatggggttgtttggaacggagtcgctttccactgtgtgcataggggaggagagtggcaccatgctcaccctctacctttcggaccctaacagcgcatatgtgctcgacctcccatctgggtcgattaccagtgtggacgattggaaacgctggttcaactacatgacggctgtgtcctttgagatcaactggcattcattcttcttgactcggctaggggacttctggtacgcatagatgaccagacttttgtaatttgcacttttaatgtgtttaaacgcatgttttgctgtgagattatgactgaatcttgtagaagttgacatattcagctggcaaatgaatcccatctgatctcacttactaatagagtagaatagtagatcttatgcatcttcaggtaagccgtgcatttaagggagtcctttattctgcaaatactgaaccatgttcttttggcgtttattatctaaatgccatgattggaataaagaagtgtccatgtggtttctagttttgttgcccaatctgtgtcaattgtagctgtagttggtgggtttgaaagattgttttcagaattgttccacggtcatcttcacaaatgatatggcaattacatggtttcttcagatatattcatcctgtaaattagttcttcgtatattaaaagagcctcatttctattgcctgcatgtatttcactaaagtcgtaacttgaatcatgattcatgaatatgggacagtttatatgttcaattacactttgctataactacctgggctgctgggcaactgccatgagctacgtcctacagttcctgcatatttaatacaatcaaatttttcttgttactgattctgtggtctagtcaaattatctatcagaagctactccctctgggctgataatacttgtcgttttggacaagggtgaggtcaaactttaaaatctttgattatcaatt

SEQ ID NO: 8997 - DNA, 1956 bp, Oryza sativa
atctttagtcccagttggtgagaccaatcgttgatggttacgaacagcagcgctcgtaggttaaactccttctgtttgtcctcatcccacacggggacaccttccttcttccacaacagtttaagatcttcgaccagtggtcttaggtacacatcgatgtcgttaccaggttgcttggggccttgaattataatcggcatcattatgtacttcctcttcatgcatagccacggggggaggttgtagatacacatcataacggaccaagtgctatggccgctgctcatctctccaaaaggattcatgccatccgtacttaaaccaaaccgtatgtttcgtgcgtcctttccaaagtctttaaattttctgtcgatgtttcgccagtgcgaaccatcggcggggtgtctcagcatcccgtcctattgacgctcttcagcgtgccatcgcatcattctagcattccccttgttcctgaacaaacgccttagccgtggtattatagggaaatacaacatcaccttaacaggaattcttttcttcgttagctgcccgtcaacttctcctggatcatctcgtctaatcttgtatcgtagtgctttgcaaatggggcatgcttctaggttctcgtactcctcaccgcgatacaggatacaatcattcggacatgcgtgaatcttctgaacttccagtcctagagggcagactatcttcttagcctcgtacgttgtctcgggcaatttgtttacctccggaagaatgttcttgacgagtttcaataaatcgccaaatgccttgtcactaacaccattttttgccttccattgcaagaactccagagtggtatccaactttttgtgcccctgctcgcaacctgggtacaacgacgttctgtggtcctctaacatcttgtccaatttatgggcccccttttcactttcacaatcctccttggcgtcctgcaacatctaaccaagatcatccgcaacgttgttaccatcagcatccctttcctcctcacccgttttatttccttcaaatccagcgtactgagcaaagtccggaatattgtcgtcttccacttcatcttcttccatttcaacaccttgctctccgtgggatgtccaacaattatagcttggcatgaaccccgactcaaacaagtggaaatgaatagtcctggatgcagaatactccttccgattcttacacttattgcatggacaacaaataaaacccttttgcctgttagcttcagccactctcaaaaaataatgcacaccatcaataaactctttggaccgacggtcagcatacatccattgccgatccatctacatgatatgaaaaaaaatcgtacacacataattattcgtacaataatgacagtcatacaataattataaaataattacaaactctttcaacagtcacacaataatgacatatcattattcatacaaaaattatgaaatattacactgaataattatatatttactatttataaagttttaaactaatattaatgtgttgtacttattttaatttttcattttactttgttttctattattcaagattaactttcactatattttccttctcagctattttataaaaccttctttagcaaataaactaaatttctatatattctttcttctccacacaaattttctctctcatcaactaacaacaaaattttggagacaaaaaagtgtgcaaaacatagctccaaatgtaatatgaaaaaaaaacattggaggataaagttgctaaccttttaggcacctccgatttgtatataatcaccaaaataaattcactagaaattttggcatgacctcccctcttttttgaagaaattttgaagcttgctcgggctggaggaggaagaagacatatatataggggtgggactttagtcccggttggtgttatgaaccggggctaaag

SEQ ID NO: 8998 - DNA, 4284 bp, Oryza sativa
accagtaatatctgtattgataaacatgataattactataatgttttgataacaggtacattgatagttctggcttcagtggtccattcccttcaacattatcaaaacttaagaatctggagaagctgtatggtcaacaacagagccatagtagttatatttgttgtgcttcatatgctcaaattgtatttatgttgttgttcttgcaggtgggcatcagataatgatttcacagggaaaatacctgattatttagggaccttgacaaagttggtggaactgtaagatttattgttaacttatcagtttaatttatgttatttatcctatacaggatacaaatagatcgattgtgcaacatatctgctctgcatatattattttcatttgaattaggagaaatattcatcaacacaggcatctgcatgggcaatatgttttatttttggtggatcagatatttatttatttttctgtagactctttgtgttttttgcatatttgatcagtatctaacaaaaaatagattctaaccatccatgccaagcagttcatacatgtaggctttcttcaaatagcttttgtgactaactcaaactccatctcaatgtatgtgtgcatggtgttttgaatattttcttagttacttatattggggactcaagacacttgtataaattttaatagaactcaaacatatttgttagggtatctgtgcaatacaccaattaagatattgatcctcttcctatctaaaggatatgctggttaaatagattggattgttagggtttttctccttttcttgattattttgcgaaattttgattaatataggaatttctgcccttttagctatctacgagtaacgtgggggtttctaaaaaagggtcctggagtatagtgtaaagaaagccaaagtttcactttccagttcttgctatcttttgcttgaactctgaaatttgtcattccaagctctttgaaatgcagagcatacttcttatgttaatttatttagcatattcctaccttttcttaaagtgtaaacttgtaggaggttccaaggaaattcttttcaaggcccgattccagcaagtttgtctaatttgtccaacttgacaagcttgtaagtacttctttcttaggtgacattttccccctgatggttggcaaggccaagcttgtcatgataatttgtgttctaaatacacatatgcagacgaattggtgatattgtaaacgggagctcttcgctggcctttatcagtaacctgacgtctttgaatatcctgtatgtgacatgttttaaagttttattaaacatcttacagttttatacattgaaaacttgtttctaagtttggatcttttgttctttcagaatattgaggaactgcaagatatccgataatctcagaacagtaaatttctctaagcttggaagattaaccttgttgtaagtttttcttgacatagtaccacgttctattgctattggttattatttctcgtagttttatgtgtgtttacttaagtaatattgctaaacgtatgccatagggacttgagctttaataatatcacaggcgaagttcctcagtccatccttaatctgaacaaccttggatacttgtaaggaattctttctgaagattattgctgttatagaaacgcctgttaagctgacatccatgttttgtcgtcttgaatggtgactcaattcaggtttctcgggaacaatagccttacaggaagcctgccagatgcgaagagctcctccctaaccaatttgtatggctgccaattcaacatatatagtattatagccaaaatagatttcagcattgcaatgatatattcatttcatatgttagtaatcttggatttttgcagagatttttcatacaatcaactcacgggaagctttccttcatgggttaccaataacaatttgcaattgtaagttaaaatttctgatgaaaaatggaaataaagacagactatgttgtatgaagtttgttgcctgacaagttacacgcgttgtttgtacaaggaatttggtggcaaataaatttaatattcgtgagaacaacaataggtacttgtgtcatttatctacaagcctatgttttttacaaaacctttttgaccattattttttaatgttttattccattacacacagtattctaccttcaggactaaactgtttacaacaagacactccatgtttgctaggttctccagaatgtatgttatttaaaacttaatcatttgtagcagttgaaaggattcgggaatttcagtaatggccataattttgtacatcttaactgcagactattcttttgcggtagactgtggcagtaataaatctatgaaaggctcagataatactatatatgaagtagatgctgcaaatctcggagtcgcatcatactatgttaccagaaatacaagatggggtgtcagcaatgttggaatattcaatgatgcctcaagtcgaaactatgtaataaatagttcccaacagtttcaaaacacattggattcagaattattccaaaccgcgaggatgtcaccatcatccctaagatactatggtctaggacttgagaatggaaattatagtgtcaagcttcaatttgcagagtttgcttatccagattcaaagacttgggagagcacaggaaggcgaatttttgacatatatgtgcaggtagatacatatcacaatgcgcattaatttgtttacctgattttttttctttatatgaaaatgttcacttgacatttgcatagggtgttctgaaagaaaagaattttgatataaggaaagcagttggtggaaaatcttttactgcagttaacaaaatatataatacaatcgtgtcgaaaaacttccttgagatccatctcttctgggctggcaagggcacttgttgtattccaactcaaggttactacggaccaatgatatctgcactaagtgtcaccccaagtaagcccaacaattgaataatttaacctgaataatggattatagtatattctaattactaaaaccctttttccagattttactcctaccgtgagaaatggagagccaaaaaagaaaagtaaggcaggtgtgattgtcggaatagtgatcggtgcattagttttaggatcagcagccttagttggaatctttatgttgataagtaagagaagaaaagcgacccaacagcaagaaggtatcatcatttattagtgcagctattcaaaaattgaaattttcaaatggtttattctttcccatgtgtactgaaaattgcagagctgtacaaccttgctggaaggcctaatgtctttagtaatgctgaactaaagttagctacagagaatttcagttctcaaaatatggtgggagaaggtggatatgggcaagtatataaggttagtggccccccaactcaatccgtgaaacttatcttactaagttgaactgcctttgcaatttaattggtatataatcaaaatatgtatgtaacctagagatcttcctttggcagggtaagctacctgatggaagagtcatagctgtcaaacaactttctcaatcatcccatcagggaaaaagcgagttcgtgacagaggttgcaacaatttcagctgtgcaacatcggaaccttgtgaaattgcacggctgctgcattgatagtaacacacccttgttggtttatgagtacctcgaaaatggaagcctagacagagcactctttggtaagttccattttgctcatcactagcacctgttaagctccttgcttcatgcactctcgagaattatcttctctacattagaccatcatcttaattatcaagaccttatttctacatgttcaggaagcaaaagctttaatctagactggccaacacgctttgagatcgttttgggcgtcgctagaggcctaacttatcttcacgaagagtcaagtgtgcgcattgtgcatagagacatcaaggccagcaatgtcctacttgacaccgacctcaccccaaagatatcagactttggactcgcaaggctctatgatgagaagaagactcatgtcagcacggggattgcgggcacattgtaagcacatttcaccatttctcttgtggttgtcctctaaaatgaaagctaactaaaacttgtctaaccttttgtcaagtggttatctggctcctgagtatgcaatgagacgtcatttgactgaaaagggtgatgtttatgcattcggggtggtcgcatta

SEQ ID NO: 8999 - DNA, 6966 bp, Oryza sativa
atcttccattccccaaaaaacctcgcaaaaccctcggccctcacccgccgccgccgccgtcgcctccaccggtaaacggcagcatgaggtgagcgattgctcccctcctcctcctcctcctctcccatcatcacttcggctcccgattcggcggagaaacccatactccgcgccgcccgcacgcgccgtccagcgccgggagcggttagatctggagggggcagccgctgtgcacgcggggggaagatccccggcagcgcgagagggcccgtggggtcccttccgcgggcgtgggcttgacgctagggttcgtcgtgttttgatttctgtgggatctgtttgttgctagggttggggggttgggggttggccgtaggaagtttagatggtttttggtggtgcgcctcagttcacggccatgtccccgcgcacgtgcgcgggttgcccccagctatcggtgtgttggtagatctctctgctttggtttcccactgtgtcgggttggttaattatgcttgtgcggcagctactgtttaggtgtagctcgtgtggtttattgagctagccagggttttatttggttaattggaggtgatcatctgctcgtatagtcctatagttaacgaggataacttcgcactgacgaccaggagtttaataataaagtaataataagctcaagtttaatagtgggctataagccaagtagccaaatgtaagcttatgtggaagagagagtttgaaaaatgaagagggttgggtctcagtctcatgtaagagctaaccattcacatactttaagatggataagttaattgtatagatgagatagagaggagaagaaaaatatagataagcttatagcttatctactatgcatgtcaactctaatatgtgctataagttcatagttggctttattattaaacttgctctaagttggttcatgccatggtgcgtgcagcttctgataactgttaggaggcaattagtttatctcttattcctagatatctcttattagtagatatttctgtgcctttgtagttttgtctatcgattgtgatatttttaagagattgaaatctggtttgtaatacatttttgcattagtgctttctcattgtaagtgttagttcatgttcagttgtaggtaactctgatactgatgccaatggcaattgtgtctcggtattctctaaggattctttgttggttttgctttatgataggattaccagacaccaccattttatattcattaagaaaactttcatttttatcagtattttgtataatactccctgtgtttcacattataagtcgttttgacttcttttccagtcaattttttttaaagttcgtccaagtttatagaaaaatatggcaatatttccaacacaagacaaacatattaccaaaatatattcagcattacattttagtgaaactaatttggtgctgtagatgttgctaaatttttctataaatttggtcatacctaaagaaatttgactagaaaaaaagtcaaatatgatacggagggagtacttgtcacttgttcatatagcatggatattactggcacacagtaaacttgtggatttttgtaggctgctgatgtatttgtattggagtttaacctcaaagggatctaaccctcattcttttgcttcttgtaaggtgctcagaattgaattttttttatggttttctttttgtttcctgtagtcggcaccctgaagtgaagtgggctcagaggattgacaaggtttacataactgtacaattagctgatgctaaggatgctaaggtcaatctggaaccagaaggtgtattctctttctctgctacagctggaactgatgggaacttatacgaatcaaagctagagttgaacgacaaagtaaatgttgaggtaatacatgctcgtgcaatagctatatgactgcagtttcctctatattaaaatgcgtggttccttatcccgtgtttatttgttttgattctacaggagagcaaaataagtgtaggtgttaggtccatattctgtattgtagaaaaagctgaggccaaatggtggaagaagcttgttcgagatgatcaaaaggcaccacactttgtgaaagttgactgggacaaatgggttgatgaagatgatgatggtaagctatgcacttcttttgcggtgataaactgtggacttgttttctcatgtttgacgcaactagtagcagcataatgagaacaagtgagatgaagcaagtgcgcctaacatgttagaatggagtatcatttgatcatagcacataatgacatgtttgaatttgaagaatgttccatatatgtttctctttaaggcattccatttgtttttcaactggtcatggtaaaaaaaaatcatgcgcaggacaaactgttattactcgttatgttggatataaacctacattgtctcactcgtttagattccacattcaagccccaaaactaatatcagtttagggacctaatctgctcttataatatattattttttaacttaattatatagatattccaggaaatttaatctggccttattaatgtaaataagcccttgttccttatccaacgttttgatatgcatatattttattttttaggtgctgatgtcaacgtggatggaatggacttttcggtaattagttcttttcagatttcatgtttattcctagatttcctttttgctcatgcatatattgttttttaaactaatgtttttctttatgtctttttttatagaattttggtggcatgggtggaatgggtggaatgggcggaatgggtgatatgatgggtggcatgggtggtatgggtggcatgggtggcatggctaaaaagatgggtggcatgggtggtatggccggtatgggtggcatgggtggcatggatgagttcgaggacgagagtgacgatgaaggtttgtcttcctttattgtgtccacagattctcattaatatccacttgtttctattagctatatgatagcataatatgattctgtgaaaatataaattaaggaagcattatttttgcagtttggtaagattagtatggtttagtttgaactgcctgaccagatgagtgatatgactcatgcacgtgacaaatgccattaattgaaaggccaattcttgaaaaatctgcaattgtgtgattcgtactcttaacagcagtgatcaaaatattgcacctttcatgcttggcacatataaatgcaactcaataggataaagctatttttttcatcatacaggactgtttcttgatattgtgattgtagaagtaaaagtgctatttaatggttctcctgcacattttggaatagtttggcccgaattatgttgttcatgctgtaactattatggtggtaattagtctgatatgtttcttacttgcattgattttgtgataggtatgatactaaccttaatcacatgcatcaaaagtttcttaaccattatacttacatactggttaggaaactttttgatgcatgtaaagttagtgtcactaggtgcagattaaggttagtgtcgcgtgtactcgtattcatcatattgtacttacgtctagagaactgaagcacattcccaagaaattgcaaatcagtttgtattcatcatattgtacataaatctagagatttgaagtacctccaagaaattgcagacttgaagtacatctaggcatcaattataagcaatttaaacaactatgttatgtcaattaagttgatataagagtgccagttatctttgtttttttatatatcttagtaccttttaattgtaatcttgcttgttaaaagtcctcatgccatcttttttgactttgttgctcccttgtttagaagaagtgtctaaacctcaagacgcagagaaggctgctgaagccggaaaatcccaggagtcggacgctaaagccgagacaagttagagcaatcgaaggcccctctacataattcctttctctgttgcatcccgtcttttatggatctggtgaactgaagaaaacattttacgttatgacggtagggatgggtgctcccttgtagaacgatgctatgaaactggagctccaactgagtacgcaaaccattcttggattgtttttcttaatgcgctttgatgcttcatcgctctgcaatcatatattaagctttggatgctttaatctgcttttgtgagatactgctgtgcccgtgctagagtccactgagcatgcaacaattcatgtgatctgacgatgcttgtgctagacgagtgaggcagtagcactgttagttcccaagcttgttttgaaaggatgcatagtgaatccctatttatttgtttcacaactctgttctgcgctaattggttgaccgtgagaccttttggccagcgtagaacgactactacctgtttgcatgtggtcttacggtcaacgtgcatggcaggatgtaagtaaggtccctgactcctgctgttaacagagtaacaggaacagggcttttccggaaaagcccgcattcatcagattgaggcgaacgtgaacaaacgtttttaattgaattcagattaaccaacttgttaatgcttgttcaattcaaacgtaatgctaaaaaggggcctaacacaacatttaggagtgttgataagagtgtcaccctattagtactgatttattccctctgtttcgattaaaaataatcgacgtattgtagaaaaccaaaaattatcatcgtcgtacttcaaaggcagcacccgacacatctcgcatatgcgcttcgttttcttatcctcgccgcttcgtatgccaaaaacctcgaattttgttgagaattaatattatttttatggaaaatcgcaaaagtagtggccaaccggggaaaatcgcgaaagtaggtccctgtcgaacgggtgcaattcgatagggcacctatcgaacgacgggcagtcgacaaaggcatgtcgaacggctggcgttcgacacgctcacctgtcgaacggagggagttcgacagggcccaccacccggcgccgcgaggcctgtcgaaccgggggcgttcgacagggccctccaccgaccctgtcgaacaatgggcattcgacaagccggtttaaagccccgtccacccaggccgcgagttcgatttgttttgaggaccacatcgccagccgccgccgagagtcgccacatcgtcgccgtgagcgccggagggagcgaggggaggggatagcaggccggagaggaggccgaggaggcgccggccgggaggaaagggttggcgacgccctccagcagtgaagttaaggtatacattagtaatccctaagtacaatgcatatgaaagtttaataaaaaattggtttaagagttgttaattgtttcgtattgttcgatgttagtatgtatggttagcacatatttgttattgctaaatgttggtagaggtatttaagtaattgtacggttaaattagttcttagttagtacatattattgatatgttgtgtgttaaaatagatacaaaggtgttatattttatttggattattaaactagttgtttgttactaatagttgtaaattagtacacggcaatatagtataagttataatagggtaattatcgaatgattaaatgattaaacgtgagactatttgtcatgttttatcaggatgtcaggtgatatgcccattcgtctgtattatggcgatgctcctatacaaatatgtgatagcggggtggatttgactgtatatgccttccatgatactagtctgaatgcaccggagcatatgggtttgaacgacgtgttagggtggttgtataatatgtttggggtagatccagtgcacgataaatttgtcataaataccgtgtggccagtgaggggtcaacatgaatggcagtggagagtagtggaggttgcgtcaactgggagttggaggaagtttgttagtaaagtaagggagaaaggctatagcctggcaatagtggtgcagaagacaacatgtgttgatcgatcgggggagtcaagtcatgccgtggtggaagaaactccgttggaaggtggacaagctgaaaatgtttggcggactgagcaaggtcgaggggaagaagtagtagagggtaatacacaaggagaggtcattgttcgtggtactaatcgtgaggccaacgactcggacgatgaagaaccggattcgcctatgcgtgttgatgcagcggaggagaatgaggtggtagtggatcagatggaagtggaaaacgaggaataccttgcgcttgtagtggaaggagaagatacaacactgtgggacaacgaaactaacatacccgatgattggacgaccatatcaatgagtcgtatgaaggtaaacgatggtttagatgcccactggtgttatgatagtaagcaggtgaaagttggacagatgtttcatgacaaaggtcacttacaagatgcggtgaagaggtgggcatttgtccagaagcgtgagttcagggtgaaggtttcaaataggacgacgtatgacgtgaagtgcatacagggtggatgtccttggagagtgcatggttacaagccacaacatgacactttatgggtaggttcgagggttgagcaacatacgtgtttattggagaatacccgtctggtgcacagaaacctgacagcggcatttgtggcacaaatggtatattcaaaggtggttagaaaaacatctttgtcccctttcaccataatgcatgacgttgagaaagagtacggatatgagatatcgtacgacaaggcttggagggcaaaacagaaagcattggagatgaggtttggaactcatgaggattcttatcacaatcttcccccactattggaggtgatgcaggcaagaaacccgggcacacacatggctattctcgatgaggtgaatgaa

SEQ ID NO: 9000 - DNA, 1566 bp, Oryza sativa
ctagtagcaaaatttggcaaagtatggtgtaactgatcatgtagagtaacatacgagctactgtacaccaataattagattgaggaatattataagatagaatcaaattgtactactccctccgtttttaaatatttgacgccgttgacttttttaaatatgtttgaccattcgtcttattaaaaaaatttaagtaatcattaattattttcctatcatttgattcattgttaaatatacttatatgtgtatatatagttttacatatttcacaaaagtttttgaataagacgaacggtcaaatatgtgctaaaaagtcaacggtgtcaaatatttagaaacagagggagtatgttgtaacgattggaaagctctaccatgcatgggttacttacactgtgtaagttcccaatatataaaacatggaaggaaggactattggactaataataactgcatgtaaaaagggaatcatgttcttgtgaaactatatttgtttggtcttttgtaactcattttctagtttagtcagtaagtaaactaaaaagggatttttttaatataaaatagagctgaccttgtaaacaaggccatagcccccccttcctaggatgttatcctggctaaagttgttggtagctgattttatttcaccataactgaagacatctggccttccaactacactgagaagctctgcaaaatccttcacattgtcagacaaaacaagggaatcatataaggctatgtttagttcacgctaaaattgaaagtttggttgaaattagaacgatgtaatggaaaagttagaagtttgtgtgtttagaaaaagttttgatgtgatggaaaatttaaaagttcgaagaaaactttggaactaaacacggccataaataagtcccactttttccaaagagtaaacagttatgtaattttaactacctcccatctccgcctccatttttttccttttctgtctccaaagaaatgtccctgtggataaaaggcctaaaactatagtacagacaacaactccagctaccaaagctattttacttttaccagcactgtttttaataggaccaggatcaaccttattgcctgcaggtcgactctagtaggatccccatgaaacaaaatagatgttaattataagatgatcacatagaaccaatggctcttgatcaagttaggtaatgaacagtaccataaggagatacacttaatgctgagattaatggcccgtaggatccctgtctaggaatgcaacaagttccttttccagcccagaaaaggtgaatctccatgaaattttctgtaactctaacaacatactgcctcaaaacaacagtataagattttccatttgtttgtttctttatatcgaaatccttttctctgagttctccctgcagtaaattgaaaaatagaaggtgtgaatgcacaagaaaacgtgcaacataactgttgcacactattaaaaggtatacttattttccaaaaataacattcattggacctttataaaaaatccacctgaataaatatgtcgaaaatccttgttcc

SEQ ID NO: 9001 - DNA, 14494 bp, Oryza sativa
aagggtacccggttttccgcaccccacagcagaatgctgttgccgcgatcaccctcctcgacaccctcctcaaggaaaacgagctcaatcagtctgaccacgtcgtcaacatcttgaaccagacaaagaccatgattacggcttcggtcccagttaactccggaagcgtccgcacgccgagcggtagccgagtccctcatcttcgatctcacgactaccaccagccaagccttagcatcgctggcgcatgatctaatcgcaggagcaggggtcacgacgagcgatctgtccactcgctcccgaccatcatagggagcgccgagtggaacgaccccgttcgccacctcgtcatcgccccgtcgatcttcgcgacacgatcatacagcgccgggcaactcgaggccatcatcattcaccggatcgccacgacgatgacctagacggagtagccgctttcaccaacgacctgcgtcgagtggattggccagccggctttaagccgactggaatagagaagtatgacggtaccaccaacccggaatcatggcttaccgtctacggtctcgcaatccgcgcagcaggaggagatagcaaggccatggcgaactatttaccagtggctttagcagattccgcccggtcctggatccatgtattgccccgtggtacaatcggatcttgggccgaactacgcgaccacttcatcgccaacttccaaggcactttcgagcgccccggcacacaattcgatctctacaacgttattcagaagtccgaagaatctcttcgagattacatccggcgattttctgaacaacgcaacaagatctctgacatcaccgacgatgttatcatcgccgcattcaccaaaggaattcgtcacgaagaattggtcgacaagttcgggcgtaagcctcccaaaacagtcaaacttatgtttgaaaaagccaacgagtacgccaaggctgaagacgccgtcatcgcatcaaagcagtcgggctccagttagaagccaaaaaaggatacgctggctacgggagcgggtggaagtaacaatcataaggaccgcaagcgtaagcctgaggaacttgttgcaaccgctactcactcttctcgacagcgttcacgcgtcaacacattcgacaagatcatgaactcccaatgcccgcatcatcctaactccaaccacgtggccaaagattgtttcgtctacaaacagttcgcggaacaatacaccaagactacacggaagaactccgacgaagaacaaagcacgtcgaagaagaaggacgatggcgaccccccggcaggttttcaagaccaccgcaaggagcttaaccacatcttcggtggcccccttggcttatgaatctaaaagaaagcaaaagttgaccgaacgggagattaacgctgttcagcccgacacaccccaatatcttcgatggtcagagacagcaatcaagtttgaccgctcggatcatcccgaccgagtggtccacccggggcggtaccccctggtactagacccagtggtccgtaatgtcaagcttcgcagaaccttcatcgacggtggcagtgcactaaatatcctcttcgccaaaaccttggatgacatgcagattcctcgctccgagttaaaaccaagcaatgcgccttttcacggagtcattccagggttatctgcaactccactcggccagatcacccttccggttacctttggcactcgggaaaacttccgcacggagaatatctgcttcgaagtcgccgatttcgagacagcgtaccacgccatactcagacgcccggcgttagccaagttcatggccgtcccacactacacttacatgatgatgaagatgcctggtccccgaggagtcctatccctacggagcgacatcaagcaagccgtcacatgcgacaaggaaagttgcgagatggcccagactcgcgagatggcgtctgcccgagaagatatccgactggctgcaaccacggcaagcgaaggagaagtgcccgcgaccaaggtctcaaagagcggagaaagcgaagctaagactaaaaagattcccctagatccttctgatcccactaaaactgctgtaataggcgccgagttagattgtaaataggaaagcgcgctcgtcacctttcttcaaaataataaagatatctttgcgtggaaaccatctgatatgcctggtattcctagagaggtgattgagcactccttacatgtcaaagaagacgctaaacctattaaacaacgactccgccgcttcgcacaagacaggaaggacgcgatcaaggaggaattaaccaagctgttagcagcaggcttcatcaaagaagtccttcatcccgacaggctggctaacccggttctagttcggaagaaagctgggcaatggcgcatgtgtgtcgattataccgacctcaacaagtcttgccctaaagatccttttgggttgcctcgcattgaccaggtagtcaactcgaccgccggctgtgagctactcagttttttggattgctactcggggtatcatcagatccgactaaaggaatccgactgcttgaagacttcattcatcacgccctttggggcctattgctacatcaccatgccattcggactaaaaaatgcaggagcaacttatcaacgtatgattcagagatgcttctcaacgcaaattggccgcaatgtcgaagcttacgtggatgatgtagtcgtcaagactaagtagaaggatgatttaatctcggacctagaagaaacctttgcaagcatccgcgctttcaggatgaaactaaaccctgaaaaatgcaccttcggagtaccgtcagggaagctgcttggttttatggtgtctcgtagaggcatacaagccaacccggagaaagttactgctatcctcaacatgaaaccgccaagctcccagaaagacgtccagaagctgactggatgcatggcggcgctcagccgattcgtttcacgacttggcgagcgggggatgcccttcttcaaattaaagaaaacagacaatttccagtggggacccgaagctcagaaggccttcgaagatttcaagaaactcctcaccgagccaccagtcttagcctcgccacacccgcaggagccattgttactttatgtatcagccacctcccaggttgtgagcacagtcttggtcgttgagcgtgaggaagaaggccacgtccagaaagtccagcgaccgatctactttgtcagcgaggtcctagctaactccaaaacgagatatcctcaggttcagaagctgttatatggtattctgattactaccaggaaattatctcactacttccaaggtcactcggtaacggtggtcacatcgtttccgctcgtcgatatactgcacaaccgcgaagcaaacggacggattgctaaatgggctttggagttgatgtctttggacatatccttcaagccccgaacttcaatcaagctagccgacttcgtcgccgaatggaccgagtgccaggaggatacccccgcagaaaagatggagcactggaccatgcattttgacggatcaaaaaggctttcgggcactagagcgggagtggttttaatttccccaactggagaaagattaagttatgtgctttggatacatttttccgcatcccacaacgtcgcagagtatgaggcgctcctccatggactacggatcgcgatctccctagggatcaagcgtctaatagttcaaggcgattcacagctagtcgtcaaccaagttatgaaagagtggtcctgccttgacgacaacatgacggcatatcgacaaaaggcacgcaaattggaagacaacttcgatgggcttgagcttagtcacgttctccgacacaacaatgaagccaccgatagacctgccaactttggatccaagcgcgaggtggcgccctccgatgtattcgtcgaacacctttatgagccgaccgtacctcagaaagaaacaactcaagttgcggacactcatgacatagccatgattgaagccgactggagagagcccctcatacgatttttgacttctcaagaactcctccaagataaagatgaagccgagcggatttcaaggcgaagcaggctttatgttattcatgaagccgagttatacaagaaaagcccttcaggaattctgcaacgctgcgtatctctagaggaagggaggcaattgttgaaagacatacattctggaatatgcggaaaccatgccgccgcacgcaccattgtcggcaaagcttaccggcagggttttttctagcctactgcagtgtccaacgccgataaaattgtgcgcacgtgcgaaggttgccaatttttcgacagacaaatccatctaccagctcaagagttgcaaacaatcccactgtcttggccgtttgcggtttgggggctcgacatggttggctcgttcaaaagggcagtcggcggttacacgcatctctttgtggccattgacaaattctccaagtggattgaggctaaaccggttgtcacaattacagcagataaagctcgagatttcttcatcaacattgtgcataggtttggagtgcctaatcggattatcaccgataatggcacacaattcactggcggagtttttaaagacttttgcgaagacttcggaattaagatttgctatgcctcagtagcgcatcccatgagcaatggacaggtcgaacgagccaacggcatgatacttcaagggataaaagcgcgagtttttgaccggctaaaaccctatgctggaaaatgggtggaacagctgccatcagtactttggtctttgtgaactacacccagtcgggccacaggccagtcaccttttttccttgtctacggggcagaagcaatgttgcctagtgaagttgaattcgaatctttgcgctttcgcaattttcgcgaagaacgctacgaagaggaccgagtggatgatctgcaccgattggaagaagtccgcaaagcagctttaattcagtcggcccgatatttacaagggttgcgacgttatcataatcgcaatgttcgatcccgtgctttcctagtcggcgacctggttttgaggaaaattcaaactatacgagatcggcacaagttatctcctctatgggaagggccatttatcatctctgaagtcacccggccaggttcctaccgactcaagcgcgaagatggtacacttgttgacaattcttggaatatcgaacatcttcgtcgtttctacgcttaagtttatccatgtatttccctatcttgactgtcaacatcaagctttcttcttgaggttgtcagtcgggggctaccataataataatggagtgtgattttttatcaattcaatttgcttacttggtctatcattgccttgtttgatttttctacttagtttacgaggactgaaagtttttaatagcttttgcgggttttaggctcaacaaagcttgataaaggcttttaagaaatcaacagctaagccagaaacaccaagcacagcataaatacaccggtattatacaaattgtgcctccatcattcgtcattcgaaacatttacatttaatcagtatcagtcttctcatcatcagagttattgttaccagtcggcctaaggtcggtatcctgaaaccgatctacgacgtcaccagcaatcttgtcggctgctttttgagcgtcgttgataagatcaagggcagcctcttcgcttgtcccgtccgcaaaaccatcaacagtatcaatatcgatcttagggtacagggatttggtcattgctaacgctaaacctgctcccatgcttccggcttctctaatgttcttgaaataggtgtccgaagcgattctcagcttgtcaaacacttcggaagcatcgaatctactcgggccattgttattatagaacattgcctggacaagcggggtagcagcattggcgacctcatccctggctccttcaagtcttttgatcttgccaaccaggacgtcgaactgggcttgggacttgatcttgcggtctacaataacaaattcatgtcaataatctgctgcatcaaagagagaaactcaggttgttggctaacaataccttcaacctccttcaaagccgagtccctttgtgcagccaattctgccttgttattttctaaggcttgaattcgtttctccagttgagctatcttggcagcttgcactgtttggattccagacggttgaggatacaattataacagcacaaattaatggggcagatcttgaggttaccttttgatgagccacttagttcaaagttcgaatcctggagttgggtaatccggtcccttagatcatgctctgtctttttggcaagctctttggcttcgtgtagctgatccctaaccgcttcaagggtccctaaatgaggaaccagcttttctaaagttgtggttttggcctcattacggagatggattctctgcgcaatgattcacggtttagtcttgctgagaaaaaacaaggtcaccaaaggcagccacctggaagacttacatttacaatgcgggtagcttctccgagtgctttcttcaactggcgcacctcttcgtcttctttctgtcgatttatgacaatgcctgcaggttgcaagttctcgtcccaccatttgattaagatggggggacgagagtcagcagctgcctttatgcgagggatttcatctctgtcaccgcctagtggtcctgatgtattcccagacattagacaagcaaatcggagttattcagattggcattacttgagaagatgggttacctgaggtgatttccggttgagcgtgaggtgatccttgccctttatctggagacccaggcgttgggtcgttaccagcgtccggtctctgggaagttgtagcctgaacttcaacttcaggaatttcttgatctggacctacttccgactgattgccagtcgggggctcttggtttgttgcggtttctgcttctgccgactggtttccagtcgggggctggtcgcttggattgaccttatcagttgaagtctaggctccagtcggctggtcctcagtagtcggcccagcttctttggatgaacctgtctctgtgttagccggatcagaatccttcccggatggatctatgtcagacggtttcctgcaaagtttccttccagttttcagtattatcttcatgagagaagcatgtcgaagtgaaacggtaccggatggtttatacctggaggattttctaaactttggcatggggcggttagacagtttcttcttcggagcagtgtgctttggtaattttttgggtgatcccttatccccaaatttattattgtcgtcgccttcgtcgtcattcatcacaagctttctcttgcgagaatctgtctgcccagtcggattgggagttttggattaggagtctgacctgatttttggtcctccactcccctgaacggtctgatgacgaggggatcagcgttgagcgattggggggtcagactttatcaaagcaaattcctgaatgaaatgcctccatggtcagttaattcaacaagaagacaaaattatgttttgatcacggtttgaagtgttctgatacataccagcggaggaggattgaatgcattatatggcacgactggcagcagatgcgaataactgacgacaatggcatttgagaatatcttgtacatcctctccttcatgatcttaaagtccagagaatctgggtcttcacggtttggatcatgtttgccgtcaaactcgaatgctgtacgagatctctctttgattggagctaatcggcacttaatgaaatgccgagtgatttgctctccctgtaagccttgctctttgagcttcaacatgcgctccatcagttctaaggcttgggcagcttcatctcccatgggaagagagttccaggtatcttggtatactgggggaagacaggagtactcgggaagagcgggctcgggattttgaacataaaaccagttggcgtgccatcctttgtttgaagtcttgaagggcatagaaaaatacttttggctcaaagtccctctcagctgaaatccagcccctccaactacgcatggtttgtttttgttcggttggggcttaaggaagaagattcggcggaacagagcaaaatgaggcctaatgcccaaaaaagcttcgcagacatggacgaaatttgcaatatggactatggagtttggattcaaatgatgtaaactgattccatagaagttcaatatcccacggaagaactttgaggttggaagagcaaatccgccatagaaaaaatgagagaaaaccacgacctcatgtgtatcgggggttgggaaagcttcaccacatgctggccgccatccgataatctccttggctgggagaacgccgtgcgccaccatctccttcaagtttccctccgtcatgtcggacgacgcccattggccttcaaagctttctttttcttccgccatcgatttgatccgaatgagctgatttgattcgagggatggctggggagagatgtggaattgaagcggtgagtcgcggggaggattttggtgaactttttggaggtggattggagcggaatggtgaaccctagtttcgccggcgcagttctgtactatagcacggaatggggaaaatggcgagagttccggcggggaagacgaagcgccgcttagacttcgggattttttgttaagggtttcgggggtgctaatgggcctaggcctgataagtacttcagcccaatattattaacagtgtggcccgttgtgctccttagggacttaggcatttttgctttggcaatttatgctcgcaatggtgtggcccaatgctgataaaatcctttttaatgcggttatataattcttcggaattattgcaatgcaaattaaaaggtacccggcagaaaagtgttatactatttttgtaagcttttttaggctgcaaaagctgtctgggttaatttgggatgacttgtttttacaatggtcattctcttggcgtgttatatgcctattttaattatggtgagagtcatagcctaggctattagacttatcaattaccatgatttttataatatttgatggattatctttagagttttttactcagatgcctgtcaaatatgttcatttgtgaactttttagcgtgttattcactcggatactttttactatggctgaaaagcagtcggctgaatgccttgttgggcgccgcatatgcttttgtcatatgatacatgattatgctattattttgttctcgactacatgtttagtttgttaactaatcatatagtcgggggctacacctaattaggtgcatctattcgatgcaccatgttttttatcttttcgccctttacagtctttgtcttcgctactcggcaggccttagcagggaaaaattaaagcactcggattattatttttgagaaagctatgttgttgactgcaaaggtctcgggggctactgtggagattatggataccccatatctacacggcgattatatttagactggatataggataccgaatatagatagaatatctttatttatatctcgggtttgtttcttaacttgtacgtcaaggaaataccctaaggcttagtcggttacgattgtattttatctgtactctcgtattctgataaggatatgagttataccttgtaatacggactccttcccctttataaggaggggtccgagttcttcctgagacatcaactttcttggagattatacatccaataatacactcggcggattcatccccggacaggagtagggtattacttgttgaataagaaggcctgaacctgtgtaaatcctttgtctccaaacccatccacttttctagcttgatagccaccccttttagtattgccgaaatcttgtttcgacagaaacttccttcaggtcgtcacggagttcaaaagttcagacttgagagacaagacatgattgacgactaccgtgtctaacacgaaattctaataccttgaatcgtgagggcacattgaagattttgattcaattgttggcatgatcggcaacactttgtgaataaaatggtgaatgaaatatggaggaatagttcatgaaagctaaaagcacagttgcaggaaataattaatcaaggttcagatcccctggtgagttgtaagcagaatttcaggacacgtaagttttagagtcttcaggttgtggttgtaacttgtgaagaacgacaattggtatatcatgaaaataatttcttgagaattattcatcttgaagttgggagaaaaaaaaaatgttgttccctcgtgtggcaattatatgaattaagttagctgtccccaaaagctgaattggtaaacacctgttaattaatcccccgctgtcagttatatatcaggtcaaaaccattttgcgaatgtcagtgcttgtagttctgttgcatgttgaatatagctcaagtgcttgctagctcagtatggtgcaagctgagttgctgacgtgcaccctcttctggcttgccgaccaacggcgcccgcatggcggagctttccgccgtgcctaccaccgtggggcgagaagcctgctagcctacttaccgttcaatttgcatccctatttccttttgggagctcctgtatttccgtggctcgatttcgggtgcatcccaatcctatcttagcagagctcttcatactccattggccgtgatgtatgccccatttcatggtccccctagtggtaaagaccagtgatttataggctgactatcggctcgtagacgccattttaaagtcgagatttgctccggtcaaaaaaaaaaaaaaaaggcctcgagatactagtacctcacagtaccaaatcgtttctgatcattggatctaacggtgtccatcctgtccagctagatccaacgatcataaacgatttaacactgtgaggtaccggtatctcgagatactttttgttggaccggagcaaatctctttaaagtctatacttgtagttcaaccagtattttctttttaggaaaactagttcagacattcaggactggtgtaggtggctactgggcatgacgtgcacgttgttcgctcctttttttttctgttcatctcagaaccacaagttgcttgtagcacaacctgccctctgaagttcttcttttcttgcaaggccagcaaaaacagttatggcaatcggtcttcaacaaattatacggaatattgcaacctcaaatttagtttggaccaagaaatatgtgcctagacgtgtatgtatgaaactacgagcacaaacttgccaatgttagtattagaatgggttgagcgtgtccaatagagtggattgagaacatcctaaaagaatttggggccaaaacacttccccatcactaagagctagcatcactaaatagattggcttaattgttcccaatccaaaacttttgggatttaggacaaaaaattactccaacagattcccctgctactaaatatttgaagttctcttacctgggtttgtcggtctctacttgtaggactgcgagggcttccaatccatctcattctgctgcagtgctgctttcctgttgcatctatgacttcccacatcgggctagggactaggatggttgtgcgaggagattgcccgttgacgaggtaggatttcagtagtttagcagagggctcactattttgttttagagaatcggtttagttttatattctctttgacagatgagtattttcacttcctatattcagtttaggaaaccaaaataaaattttgggatggattattgccaatctgttggggtgctaaggctaaaaaattagtttgttcgttggccactttgccagtaggatgggactggtccttgcaacgatcattgtttttttttctttttgttaatttcacaaaattacggatacattaactaaactatcacaaaactatatattttaagatgttatataaaaaaatacatatttaacatttaatttatcataaaactatatatttaaggtcaaatatcataaaactatagatttattaaaaaacttaccatgaaactagaactttcggatccatttaatcacaaaagcagagcataatttggtacgcgccgccaacaccgccgtgttgagcatgctcctccatgttaacagatttggctcctattcccaatgcgtcgcactcctaacaagtaatgccctccacacaaacaagcatggattcacaaacaatgtcaccatggcacatcgtccacaagtgaggacgcactccactgccctctggatgggccatcaacattcgagctcttggcagctgtggcacacaggaacaggttggagttagactgaataataatatgagtagtatggttttttacagacaatgtcattaggctgttctagctctctgaaaggacatgtatcctagtggttgtagcgacctgatcgagtagcacctcaaggtcctgagttcaaaatctgcataggagcggattttagattggtttatttgaggactaagttttctgattgatagactaagtttctagtttaaaaagactgcatatatctagttggatatagaggccgggtaaaaaaaacttctctaaaaaaaagtaaagctctgtacatggtgctatggctggctgatccctcttttggcctgtccctcacaactcaaggtttaccaaataatttccatttttatgtattttcacggatgcatgttttgttgtataacactcatgcaacaacagaacgaaaataattaatgggacactttcgaagcaaacacaaggattttcagtacttttgcactctgttttcagttttctcccttctcgttactaccatggtaaaggtcatcactgtctgttgaagtttcccagctagcatagcttccgttcactggccggctagcatagaaatggacttgttctttttatcttattcttagggcatgtttagatcctctaagatggtaaaagttttaccattttggagcatttttgtctattttatctaaacattagtagcaaaagttggcaatttggcatttgtcatttgctagtctagggtagcaaattttaccaaaaaatgttccaagacaacgcgctttctctttctctttctctctttagtgataaaatggcaaaactttagaatgcatctaagcaccaactccataccaaatcttttgccatcaaaacttatgccatttgctatttgccattccgaaaggatctgaacaggcccttgaattcagattcctgctgcgtcccattctcaatatgtagcccacaccacggaatcaccattttcacatgccttaatccctcggaattcctcatgcatgctcgataccgcttaattcgatcacacaactcaatcaggtaggcatcaatacttagctaggccccagtgttgaaatcagctactacatgtgagtgcagtgcagttatttatagacaaggtgtggctgaatcaataccaccacagaccccctcatctctcaagggttgtaacccatatacttgtggtgggtataggcctggttacaggtgggtggccaatgatgacaaatctcaatgaacacccgtcatagatgagtcatatgtgactggtgagtaagtcatctatgacggatcgtaaaatgtcacctgtcatatgtgagtcatcggtgacgtgtcgtaacttcccacccatcattaatgactcatatctgatgggctataacttacgaaccactactaataataaatcacgaatcatgatttttaaaatttaaatgcacagaagaactcaaaaaatactttggagttttactagccatcttatacataatcacacatcactacccacaaatctatgattttgtgactcatctctcatgggtcataacttatgaaccatcactaatgacaaatcaccaataactatttttgaattttaaatacaccaaaaaaactcaaaatatcttttgaaatttactagcaatcctatacatgatcacacatcactagccacatatcaatgaaatttcaagcaatgtacacacctatgtgtttgatgagttttgaagctgatgccttccactctacaaagagcacccttgccaactcatctattattcttttgacttttgactattccactctgaatcatgtaacatatatttaacactctaagtgacttcaaatgaaaacgtcttgttctacaacttttatatccggaagatctccatccgaggtcattaatagaatatattcaacatttcgtttttctcaatataaatctcaacttataatagatatttgggcttataaactatctcaaataaaaatattgtcaattataatattgtagatctagttgagttctacaacttcaataca

SEQ ID NO: 9002 - DNA, 3093 bp, Oryza sativa
ctagggccgtcgtatagcctccccaccgccgccatcgcgatccccggtgccggccgctgcttgttcgtcgctcgattgccgcgaatcgccaaaggagctccgattccctcgcgtcgccggtgagctctccatttttatccatctccggctggccactttgatcgtcgcgatcgtcctctccatccctaactcctctcctcaccttctttaggtgttgccgccgcccgtccgccgtccgtgtcgccggtcgtcgccgccgcctttgtttccccgcgccggccgccaccgcctcctcggtgaggaccggtctccctcccttcctctctctctctttgtcgcgccgcccaccgcttagcgccgccgctgtccgccgctcaccgtcgtgcgccgccgctcgccgccggtggccgcgccgagccgccgcgcgccatggccgggccggccatgctgtgcccgagcgccatgcccgggctagcctcggtgccgcccgtccccagccgcccgatcggccctcgaccgatcgtggccgtccatcccgtggcccacgtggccagccacgtggtgccacgtcggcgccacgtggtacacccccaccccggccccatggactcggtccacggcggaccaccccctttgagccactgacccgtgggccccacttgtgggcgcctccccctcccctcgctgacgtcagccctgggcatttattgcacaataaataattaaggacttttctttattagtaaaaacacagtttatcttctaaaattcataagtaattcatccgagctccgtttaagtccattcaagtctcagtaaatcaagaaaaatgcaaagaatccattaaaaatggtttggtttcctgtttcagtagtcttatagcatgttttgcttgcgtgctttgtttgtcgcgtagatttcggccgtttcgtcgatccgcggtttctcgaagacgttgctgtggtctcatcagttcgagagcaaggcaagtcatgcaatacgtttgatcatattgtacccaatttaccaatatctcgcatttctgttaaatgttgcattcttttgcaatgtcatgtgggatgggtcctattactcagccgtttattgtttaccatatgccattgataacttgggtatcaaaatgactagatgttggtttaggaaatgcttagccatgcttagttcaactagtacacaaatggggatcacattattacattgactatgaccatgagcatagctttggattggtgccaccgcaatggtgttaggtaaataaaatacactgaatggtgggctgtgggtgcatagttttgctggtcgcacccatggcagttaaggaccggttcacgggaaaccctgagagacttaccgtgcttaccacaagcgggagtgggtaactgcttgatctgaagtatagctcgacccttttctaggcaccggtggcgagggtgggcgtgatggagttgggtcggctggggtgtccggttgtccagctgctggattcaccgcggcacaagaggggaccgcccactgccttttgaggggtgggggtgaaaccttagcgtggtgtggatggttaggggagggttatgcggagggtcttgtcacgatttccccctttgcagtatcatggtgatacttcggggcatggtgacatgtgtggaatcgtgtcttgtggatacagttgtacacctctggccagagtaaaactattcgaatagccgtgcccgcggttatgggcgatcaccagattcaccgtgattagtctcacccctagtttagtttattgaactggtgtagttcaggtggttggttgggcctgttgcagcgtggtgtaacattggacagtgatttggttaatactgcttaattactacaatcgtttcactgttttcaactactgctttgaaatgcctgctttatgcaaaagaatctctagcctcctttggttatatcctgtatcatacctactcttccggtatgacttgctgagtacagtgggtagtactcagtcttgctctcttttcccccacaccagagttgaagttcttctcagttggagtcatctcagagaggttggtttcgtcgctgccgtcaaggtttgcctatggagtggagttgccccgctgctgaagtcaactttccaagtctagctcgttttatcttttccgctgcatttataatcttttatatttttgtaagacgtggatctgtatgtcaacaattgtcgtttgtgtaccctggctggtcctggacagggatttaatgcacattcagcttagaaattctggttcgtgaatttctaggtgtgacacaatctaaccaactaagatggatgcactaaaccaactgagagagtagtagttgcttgtttgaatgctacacccaaccgtatttaatatggacaaaataggaaacaagaaccctgcttaatgacttcttggttttcgaaattgtgtccgaaatgactaataaaaccaacccggagggagtagcatggttttgtattagcttagaagtgaagatttctagtatttagtatttaggattaggcatatctatcagactcacgtaaagttgatggacggtaagcggacttattcctaggagagatcctaggagagatgttcacgattccataaaagcgaagtgcggatcccgcacgatgtgcctggtctacgggccaaaaaccgtgtggtaaccatgaagctgcgtagattagcaatctcgcaatgtttgtaagcatgtttagctgtagattgtagattttagagaaccactgtaacattgtttataccttagggtatctgcatatacattgatttgtggtctgaattcaaagaaaaaaaataatatgtcgatttagataaaaacatggttaaattcatttctggaacagtggcatggcactatgctagaggagaaaattgacatttagccatcctcgggttggggtttcgccagaatgccatcttcgaatgtggtttcgttataatgccatcttcaaacgtccccatcttgccacactggcattttagccaatttcagttatttgcaaatattttccattgttttgcttatttggtttga

SEQ ID NO: 9003 - DNA, 5980 bp, Oryza sativa
gtccgccctcctcctctgctcggtcgtcgctgcgacgccgccgtccgccgccgctcctccacgcgccggctgctaccgcctccgcctcccggcagccaccaccgccgcggcctccacgccacgcgccgccgccaccgccgccgcgtcacgcgccgcggctgccatcgctccgtgtcccccgccgctgctgaccctgtgagagagagggagagagagagaggaagagggagagatagagtcgtgagagagtgtgagagagagaagagagaattgtgtatgaccggtgggtcccacaattttttaaataaatagaatgctgactggactgccacgtgtacgccacgtagaccaaaaccaccgtggattgggtcgaggggggtaattcgtccggtattcatagttgggggtgaagaatgtccggttctgtggttcggggggtaattcggacgaccgcgatagttcgggggtgtaattcgtactttttccttaacattaaggcaaagatgaaaatgcttctaaggtcttttggccaatgcaatacaccacaacttggtctcatctctaatagttgaagccctgaaattcctatggtttcatatccaccaagcgaccaatagtactaaccaatgttgcttagtgatttgttgcaaagcctgacgccactacttgctgaaaacaacgtcatctggccctgttgtttgatggtgcaggtccaaccaagaacagcacagatcagaagcaaacacacttgtcaacacacacatcaagtagtcagcaagtgctgcatgttctcctccaccacacacatatatagtgtgaattattcatggtgatcaagactgcgacgacccaatcggtcagcagtccaacaacgattcagcgatgctaaccacactgaaattctgcagcgaaatggagccccaagttgtccaaattagcttccaatgctcaaattattccaccccctgccccacacacacacacaaatgaccgttagctgatctagttgtaacttgtaatttgtaagcacacctgatctgaagaagatgtggtgtccatatgagttgatctcttccactccaagagtgaacttaatcccggttcaaatttcccaaagttgaagatattccatcagagggttggggttggtaaacctaccctgatgtttttgttagcgcttcataacgcgttcttcaggtagcaattctccttgtcacatgctcacaaagagatggcgcgagatcaaatgaggatttgccatgtaaccatttatcactactaccttaaaatgagtatcgtacgcgaaaagtaaccatcggttccaatgttctattctcaatcaccctcctagcatatctctaattgtataagcctagcctgttagtacaacgtaaagacattattactagtcagaaaaaaaagatcatgttgccatcctcagcaatagacatgactaatatgaacaacataaccaccgagttgggagatgctgtggaagatcgggtttagaaattacgagtactggttttgtcatcatggaaaaaaatcagaataagtactttcgtatttgttttctgcaacttacatcaacatacaattatataggcaggaataatatccaaaattgtcacttgaaaccaggaacaacaatggtttgcactttgcagctctgcattcaccttccttcgtcaatgcgtccagctatccctggatacgagttgagaggggcggtctccctcttctccctgaactcaccagtagtagatccagagtagtaggagctggtggcatagctagtgtcacctcctcctctgagctgccattcagtgatgtagctcggcttcgtcaccacctcagtcacctcaatatctccggctaggatagccatgactctggacattgatggccgctggtgtggtgacccttgagtgcaaaggagtgcggcacagatgactctcaaggcttccttctcattgaattccttgagttttgggtctacgatcccgagtgcttgcccgctctcatatagtgtccaggcctataaattagcaaatgcacagcttacattactttagggactagcatcagctgatgtgttctcctggattcaaagatcatcaatatataggcttacccattcaaagagatagatcttatcttcttcacgagagttgtcggtgtttggtcgaccagcaacagtctccaaggcgactaccccaaatgcaaaaacgtcggccttttcagtcagatggcctctcattgcatactcgggtgccagatagccacttgaaaaggtcaggtgaggataaaaatattaggttatgttttgaacataaactcggaataagagcatggtataaaatgttcatacagcgtgccggctatttttgtgctgatatgggtcttcttctcatcatagagctttgcaagtccaaagtcagagatcttgggggtgagatcagtgtcaagtaagacattgctggctttgatgtctctatgcacgatgcgaacgctagactcttcgtgaagataagttaggcctctagcaacgcccaaaacgatctcaaagcgtgttggccagtctagattaaagcttttgcttcctgaacatgtagaaataaggtcttgataattaagatgatggtctaatgtagagaagataattctcgagagtgcatgaagcaaggagcttaacaggtgctagtgatgagcaaaatggaacttaccaaagagtgctctgtctaggcttccattttcgaggtactcataaaccaacaagggtgtgttactatcaatgcagcagccgtgcaatttcacaaggttccgatgttgcacagctgaaattgttgcaacctctgtcacgaactcgctttttccctgatgggatgattgagaaagttgtttgacagctatgactcttccatcaggtagcttaccctgccaaaggaagatctctaggttacatacatattttgattatataccaattaaattgcaaaggcagttcaacttagtaagataagtttcacggattgagttggggggccactaaccttatatacttgcccatatccaccttctcccaccatattttgagaactgaaattctctgtagctaactttagttcagcattactaaagacattaggccttccagcaaggttgtacagctctgcaattttcagtacacatgggaaagaataaaccatttgaaaatttcaatttttgaatagctgcactaataaatgatgataccttcttgctgttgggtcgcttttcttctcttacttatcaacataaagattccaactaaggctgctgatcctaaaactaatgcaccgatcactattccgacaatcacacctgccttacttttcttttttggctctccatttctcacggtaggagtaaaatctggaaaaagggttttagtaattagaatatactataatccattattcaggttaaattattcaattgttgggcttacttggggtgacacttagtgcagatatcattggtccgtagtaaccttgagttggaatacaacaagtgcccttgccagcccagaagagatggatctcaaggaagtttttcgacacgattgtattatatattttgttaactgcagtaaaagattttccaccaactgctttccttatatcaaaattcttttctttcagaacaccctatgcaaatgtcaagtgaacattttcatataaagaaaaaaaatcaggtaaacaaattaatgcgcattgtgatatgtatctacctgcacatatatgtcaaaaattcgccttcctgtgctctcccaagtctttgaatctggataagcaaactctgcaaattgaagcttgacactataatttccattctcaagtcctagaccatagtatcttagggatgatggtgacatcctcgcggtttggaataattctgaatccaatgtgttttgaaactgttgggaactatttattacatagtttcgacttgaggcatcattgaatattccaacattgctgacaccccatcttgtatttctggtaacatagtatgatgcgactccgagatttgcagcatctacttcatatatagtattatctgagcctttcatagatttattactgccacagtctaccgcaaaagaatagtctgcagttaagatgtacaaaattatggccattactgaaattcccgaatcctttcaactgctacaaatgattaagttttaaataacatacattctggagaacctagcaaacatggagtgtcttgttgtaaacagtttagtcctgaaggtagaatactgtgtgtaatggaataaaacattaaaaaataatggtcaaaaaggttttgtaaaaaacataggcttgtagataaatgacacaagtacctattgttgttctcacgaatattaaatttatttgccaccaaattccttgtacaaacaacgcgtgtaacttgtcaggcaacaaacttcatacaacatagtctgtctttatttccatttttcatcagaaattttaacttacaattgcaaattgttattggtaacccatgaaggaaagcttcccgtgagttgattgtatgaaaaatctctgcaaaaatccaagattactaacatatgaaatgaatatatcattgcaatgctgaaatctattttggctataatactatatatgttgaattggcagccatacaaattggttagggaggagctcttcgcatctggcaggcttcctgtaaggctattgttcccgagaaacctgaattgagtcaccattcaagacgacaaaacatggatgtcagcttaacaggcgtttctataacagcaataatcttcagaaagaattccttacaagtatccaaggttgttcagattaaggatggactgaggaacttcgcctgtgatattattaaagctcaagtccctatggcatacgtttagcaatattacttaagtaaacacacataaaactacgagaaataataaccaatagcaatagaacgtggtactatgtcaagaaaaacttacaacaaggttaatcttccaagcttagagaaatttactgttctgagattatcggatatcttgcagttcctcaatattctgaaagaacaaaagatccaaacttagaaacaagttttcaatgtataaaactgtaagatgtttaataaaactttaaaacatgtcacatacaggatattcaaagacgtcaggttactgataaaggccagcgaagagctcccgtttacaatatcaccaattcgtctgcatatgtgtatttagaacacaaattatcatgacaagcttggccttgccaaccatcagggggaaaatgtcacctaagaaagaagtacttacaagcttgtcaagttggacaaattagacaaacttgctggaatcgggccttgaaaagaatttccttggaacctcctacaagtttacactttaagaaaaggtaggaatatgctaaataaattaacataagaagtatgctctgcatttcaaagagcttggaatgacaaatttcagagttcaagcaaaagatagcaagaactggaaagtgaaactttggctttctttacactatactccaggacccttttttagaaacccccacgttactcgtagatagctaaaagggcagaaattcctatattaatcaaaatttcgcaaaataatcaagaaaaggagaaaaaccctaacaatccaatctatttaaccagcatatcctttagataggaagaggatcaatatcttaattggtgtattgcacagataccctaacaaatatgtttgagttctattaaaatttatacaagtgtcttgagtccccaatataagtaactaagaaaatattcaaaacaccatgcacacatacattgagatggagtttgagttagtcacaaaagctatttgaagaaagcctacatgtatgaactgcttggcatggatggttagaatctattttttgtt

SEQ ID NO: 9004 - DNA, 3674 bp, Oryza sativa
tttttaatgggacaaatagagtaaagacatgctccaagaatagtactagtattagaatacgtcaaaattatcttttaaatcaataagaacatgtaacaaaagttttatgttgctttaatttgttgtaaaccttttattacatgttctgtcagtcaataagtcgtaaaaaatgaacaaattaaagcaacgtaaaacttttattacatgttcttagtgatttaaaagataattctaaaaataaactataaaaaattaaaattaagttttggctacggctgataacctataagtcaattaaatgatggttatcaccaatgctatttttttttttgcaataaaggaccaactaaggataatttcatttcatttcaacatatcattattataaaattatctgttatactctttaaaaatgtatcaagatgtaccatatatataagtggatgtatcaaatttcagtacttgtatagtatctctttgtatatatatttctgctttttttacacactgcactatataatgtcaaattcattcatttgccaataaaatctgacagaatataaacacatgcatgcacaatgatgtaggctaccaatatatgtacctatatataatgttgtggagtatgtactgcgactggagagctacatgcatatatatatactcccaacacaactgcagcctttgcaaggcgtttcaaaaagcctccaaaagtcatggataaaaaccttaaattccttttcatgcagtgataaaagtcgttgtcttcgtcacagcatgaggcagatacttgggtgctactcctttggctcctagttatttgttgtacctactgataagataagaagttcatatacatccgtttgaaaaaggatgacgtcctaataaaaaaacatgtgagtaaaacctcaaaatcttaaattattaataggtaaactatatatgctttatattaacagatttttgattgaaacactctttcacttggttatacttttagtaatatttataaatgcataatttgaaaattcaatggtacactaccagactgtcgatgtcgtccaaagcgctaagtaaaaaaaaggaacgtgggaagtaattatactgatactttttgtcacagacaagatatagtcattttcacgctatatataaatcgtagtaagatttgtgcatacattggcgaccgatgtacctctccgcgatagaataaatcaacttttgtacacaaatctacacatagggtctacatccatatatatttaaaagtttgatgatatactcgcatatacagtacgacaaatcgacgatatatatcaacataaatcgaactatacgatttttccgtatatcagtggtcgatatattcctctgtcccaaaataaattaacatttatatactaatctagatatatatgtgctatatatatccatatattcgtgtataaaagtttgtttgatattgtgctcgcatagtacgatgaatcaacaacatcgatcgatgtgctatttaaccagctaagctagatagatagcctccgtgtttgtttccggtgagagaaatcaagagatgggtggccacgtcatcgtgtggatattgctctcggtgtgctcatggcggatttcagctgctcaggctcagcaaccaccaagaaccgatcctgtagaaggtatagtaatcaatgtcgccgcgattgattaattttacttctctcgttgcctcaatcaatgcgagtttgatcatttttaatcgatcgatgcagtggcggcgctggaggcgatcctggggagatggaacaagaccaattcgccggtgtggagcatgagcggcgagccatgccgcggcgtccccgtcgacggcgtcaccggcctcgacggcaaccccaagaacaaccccggcatcaagtgcgactgctcctacatcaacggcaccgtctgccatatcacccagctgtaagtgttactatgttttttctggttcttgtttgcatgcacgccaggtgctcgacgcagtgcctacaagagaggccatggcgtctggaatctggatatatgagttcttgtggaaactaacttggaagtgcaactttgcaagaccaccactgcaactatgcataggtttcacttgggagtaactttttttatgtcgccaaataactgctctgctgttcaaatttcaccatgatcactacttggagtaattagagtaaattattttttgtttttacccctcgaacttgcgaaaccaggttaatctgggaccttggtcactggtcagtagtgaaatctgaggttgacaacacatctgtacacaactagctaacgcccactgttttctgccctcttctctctacaagctacaatcacgagtgaaaattggacctaagcagagtttcagtaaccaaccagacatggacatgcttgttgggctgtgtatgtgtgttagtggcgcatgagtatggtaacatactaacatatgtgcatgtatatttggagtaaacagcaagaattttcgtacttatttccaatttttcttactccttgtttatgtaattcaggaaggtatacgccttgaacgttgtcggtcagatacctgcagaattacagaacctcacctacctaaattacctgtatggtatctaactcttatcagctctgcctagatgctgaaacaactgtaggatatgtattaatatcttgcagcaagccagcaaattcaaattcaaacccatgtttgaaattctttgctgctaatgactggatgtttctggtgctgtttcagggacctggatcaaaattacttgtcaggccccataccatcattcatagggcaattgactgccttgacagaattgtaggagttatagttcaagttttatgttcttgcagtattaatcagttgatgtgttgtctgaaccatccttcgttcttttgtgtaaaaaaaaataggcatgtgggattcaatgcactctcaggaccaattccgaaggaacttgggaatctcacgaacctcaacttgctgtaagagatctcttcttgtatacctggtcagttttcaactatagattaatgttggcacaaagtatttaattatatagaaaaatccaaatccagaacattttagaaaattctaaaattcataacttacatatataggcacctcagtgtaatttcacttttcaactggtgtttcatatgttcgaatgaaatccaaaatgcaaaaattgtggatcaaaagggtgtgtttggggtttcgaaagtggatgcctgttcgaggaaaactaaaaggctcatcagggcaaacaatgcccgttttctcagctagtagcatagcatgcaaataaattatatcactcctgaaatatttcttttgtttcagaggcatcagtttgaccaattttactggtcaacttcctaaagaattgggcaacctgaccaaacttcaacgattgtaagtttgtaagccccctctttctaacttgacagatgctacttctagaagaacaaagtttaatttggaccagcaagatacctattgttgaacatgcatgattgttgcatttcattaataacaggtacactgatagtgctggcttgagtggtccattcccttcaacgttctcaaagcttaagaacctgaagctcctgtacgttcaagaacagagccacagttg

SEQ ID NO: 9005 - DNA, 7169 bp, Oryza sativa
tcattcatattatcttctagttataaagatttgcctatgttaatttacaggcttggagcttgtatgaaaaggagcaagcactcgggattgttgacccaagacttgaggaattcagcagggatgaagtgtatagagtcatccatgtcgcactcatctgcacacagggctcaccctatcagcgaccaccaatgtcaaaggttgtggcaatgctaactggagatgttgaggtggcagaggtagtgacgaagccgaactacatcaccgagtggcagttcaggggtgggaataccagctatgttaccagccactcaggatcaactacccctaagctcagcaggcagaaagagattgatcctctcactcaatcaccaacaatcaccggagttagccatgagcatgagggaaggtgaatgcaaagttgaatagatgcaggtgatcttggtttgaagtgacaatactatatgctattcgtgcttatgtgactatatgtaaatgtgaatcagagcaaatagcggaacttatttattctgaagtctgaactatgtgtcatgatgataaaagtattgctccttgtaatttgtaatggtgaaatatagtgctatatactaggatgtttggagttgatcactgcgtttgcatgtttgtgaacacgttcatttaatccagtgaagtttaattatagggtgccttttttgctatagtctagagagaatggatcttaataattacagagaatcgttgtccttaactctgctattcataagcgattttggatggccaaagaagcatagaatttacatttcgctagttataacttacaacgaattagtaacaataaaaagtcttcgaacttattaaattctcctgtcctcacttctcactatgatctttgactagctactttttcagatcacgtttagatcagtttgtggagccgtgcaggttgctggtaagtgtggatgattattctaactttccaagggataattggtttagtgacaccaaaagattatgtgtttagaaattaaatataccgtcgaaaagttgccgttacacctaaaatgcgtaatgcttcggtgttatcaaacaaaatttcccccttttttttctagataacagggtttttatatgtacaagtcgcagttgacatgcttgcatggatctcttccagctatgtcaccatcagttcttgatggggatgaattagtccatatgtcgtacaaattgtaaccttaattctccactcctctcgctatctagttggatacggaaatgataccttagcaacttagattacaatatctatacatcgatcatatgtttatggtcttacctcgtcttgcgacttgcagtctatggcgaagcaaggagtggcggccaaattggaccacgtgcgagcatctacggtgtctgatgttgatgttttatgatggtcaacacagactcacctaataacgattcgcagtaaaaacaatagagttgccaaaattaaaagatcaaaactagttagtggagtcaattttaaggttaattcactttcgtggaatcacaaaactaatttacgagtaaatcagaagagaaccatattcgtatttaaatgaccactagcttttgagcaaactagtaaaggataacctccttgtttttcaacataaaacgacaaagatcaacttaactctagggttgctagagcttaaccatgagaaagaatagactctcacgagctaccatcagagttcacaaaacctattggttttaatgaaaccgatagggagaatagctactttagtcactaaagtttctctgtaggatcagtttagtccctaaccttttaaatggtccaaagaaatccttaacctttatcataaggtctagaatagtccttgggtccatcaaaaatcatcatatggatatgccatgtcatcattcatgcaaaatctatgatgaattgaccaatttacccttacgtatatcatagaaaaataaatataagggtgaattagacataaccataggaaaaaaatacttctttttatcacccttttgaggtatatttttgctcttacatataccatatatttttttaacttattccttttttctccttttcctatgtgtaaggatgaattggacaaatcatatagattttgcatagaaaggtgacatggcatgtccatgtggcgattttggtgggaccaaggactatattagcccacatgacaaatttaaaggacttgtttggacaatatgaaagattaaggactaaaatgactcaggagtgaaactttagggaccatattagctattctcctaaaccgatatggttgttggtttgggaaagcaatatttgtacaatatttaccgaaagttgtcggtttacctttttttattttgttcagttttcagtaaaccggtgggaagcggttttcacttcaaaaggtaaaccctggctaccatacatgcactcgcaacaaatctacgcaatactcacatgagctgcatctcaccatataagtgatcagcaccaacacaaaccaaaaaaaaaaaaagactcaactgatcaacacatcaccatatatatcaaattaaacacggcagcctcatcccaactaatttcctttcctcggtggatcacaaattcctacacgcacaaacttaatttggtccctcaaaatgacgattgttccagctatcacaaataatttggcatttccatataaaactaattactagccaaattatgccacaaacatctaggggaattggagggcctgatgaaggacgagccatatccaccgtgaactcctcgccggccggagcggaaaagctccgcccggcacggctacttcttctaattgagtaggcaaaaacatctactggttgagatgaagctcaaggcgcgcaagggatcaccgagaagatgcgattgcgatacagcttaattagaatgtgcggccggcgccgaccaagtgctcaacgatatgtcggggctctggcgtggccgctgcgcttctcctcctcggtggcatggagatcctagactccgtgaacaagatcttcgttaccgcctctggcatcttcaatggcggcgcggcagaatcgcacccgcaggtggtgatcgacaccccacgccacgcacagccagctgctgggctgctcggtttgggctagtcccgggtcgaacacctagatggcaatgaacagtgtgctttgaatttttgtgagtaataaagagggaatttagatagagagaaagaaaggggataaactgcaaatgcaacagccaagatttgatttgaattacgagattgcaactgtgagtgcaaaatgcgccgctagaaattgggttttgatattttatttttaatattgatttaaacactccaatgacaccactatcgaatttaataatgacttatttgcacgacaacttattttcatagttgggttttttgaatttcatttggattattgctattttggttttagtattacgatggaaacaaaattaactttccaaaatagatttaaatacttaaatttaacttgtattttgtatgttacaaattgataattagctttcctttaattgggttgctcttgctgtagatatggtccaatttactcccgtaaactattttattgaatcaatcatctaaactatttttcgactcattttaccccctagctaagttcactttactggttaattacattttccttatttgtttctctttatacaaattatattttaagcttaaaatttttaaagccatagatgacaccattattaaagttataaaatagttttaaaatttttcatgactatttacttgaaatttaaaacctctacgtttaaattagtcttagtagttacaacctatgtaaacaccgattaaaaagtttcaaaataaaatattgagagataagttataatgtatatatcaataccacctaatttccctaaatattgagagataagttataatttatatatcaatccaccaaaatttcattgcaaaatatgacctatacatagatcagagacgaaaaagacaaatattgttagggagtaaggtgaaccattttcaatattttggggtgtaaaatgagccaagaaattatttaggaggttaagtgttccagtgcaaaagttcgagggagtaaaattgactttttttttctcgatgtaatgagttaacattaatatatatatatatatatatatatatatatatatatatatatatatagtaaatttgtttggtgctccatggtgcccgggcatcattgttgaaattgagtatatacccaattcaaatgagtatgaaactttttcaattacttaggtattaacattaactactttactaactagtttaaagcaagtttgaactgaatttgaacttgtttttgttagattttgattctaggtatatagcatccatacatataattagttaggtatgtaatcatggattgtgaaataaagttaaatttgagttgttttgttgataagtataggtatgaatcaaattattataactaggtatatactcacaatttgaaaattttgaaaaatttgagtgattttgtgcattagataccatggtgcccgggcaccatggtgccccatatgagtgtcatatatatatatatatatatatatatatatatatatatatatatatatatatatatatatatatatatatatatataaaatgtgaatctcccactgtaatcttgtagcgggagattcacattatatatattcctcaactttgattttggactttttactttccatttggcttggagatttctattatttgagtttttcattattttgaaaatatcacgcaattatgcaaacatacatactcaaaattaacaaaaatgattgtatagtactttgtacgatattaacgaagatgcctgcacgcggattgacattctagttaaacaggtgtgataaaatatgtgtatgtcctataagcaatacgcatatctaagtttgatcacacttacagaaaaaaaaaaggtatatttatatcttataggaactgttcactactgaattttatcttttgtttctccgaatgtacaataaatctagtctttcatgtatgtatataaacttactgcattatatatattctacgttaccaatttcttaagacttttttacattatgtgagccacatgtaagctatatatagatatacatattcacctagatgtaaaaaatcgtggtccggtattttactgcaacccttcattagtatgaacacagagagagatgtcgttgttgttgttgcagtagtgtgcccttggccaacttgtgtgaccggtagttggtacatgtgcgtcaagtaggatgaaagaggacaaataatggagcaagatgaattgaaacattgatatgataagtcgtagaaaataaatgaagcatctaataataacttacgagtaaaaattttatatacatgtcatagctatttaaaagctaaagctggaaaatagatcatgatgaaaaccctcaaatcaactctaggttaagttttaaatttacattttatcagcagttgataaaccaatagtcatatatatttatattaattggacactccgagaaagctctcacatcaataaaaagatatggccattagttagttggctcaaattattagaaccctatatcgtattaagaatttatattaaacacaatgtttaatagatttttaatttttactactgtatggactctttggatttcgctatcctacaacttgtatatatgaaattccacccatttgagctctcaatttagtagattattttttaattctgaaatccaaaattaataattagtaggttaattgcaaatgcgctatgccctagggctacagttaacaataggtgccgacaggcagtcatcgaaattcgaaagtgggtaatttaaaataatgatttccattccttcaaaaataaatattttctttctataaagctatgtccacaaatataaggattttttaacagataaaacataaggatttttgttatgtatctaagagcacattctataaatataaatccaagtgcatgtatccaggtgcgtagtaaaacatcctatccatggacatggacagaggtactgcttcatattttcagcatatctagagcgatcttattttcagttgattcattggatcgatgtcatgtcaaaaaggtcatgttgcatctttttttgattattttttccacggaaaatgatgtaatcttggaccactctctgtgacctgtgttatgacttatgactgtgctgcaaaggggagtatgaattattgttctcaaaactagagatcactcatgctccaggaagccttgaatttgtcttgatttatactgaaagtaacctggattcataaaattcttgtgttcgaagcgaatggttgaggaattatcgtttcattgagagagagatttcatctcagctagaaaagttaatacataaaaaaatgttgctagatacctcattgaagacagtttaacaccaatggaaaaaaaatgttgcaacatatacctcattttatttcaacattgcagtattaaaagaaatcttttatatatgctccttttaaaaaagcatcaagatgtacaagtttttaggggtttaacttggtcaggaagagaatgtgcatcattgtcaggaagacaacggtgtgaaacctgtcatgaatggtagcctcccgagacttgagctagaggacctagtaacaccgaggcatcaactagccagggatgcaagtaggcaatcaatcgaccatctctatgagagcacgcgtgctaatttagtttaacgagtttcagatactacctatgtcctaaaataagttaatttttcatccatcacacatataccaatacaaacatcaaaagattagaataccagtcactagatgaatagaagtcggggtactcaaaatcgttcatatgcttgacaagagagtcgagatgatccaaagtaaaacaaatacaagattattcgattcagattgaaaacattggttaaaagatagttcaaagcaaaacatcggtaataaaagatgatttaaagtgaaatttgctcattattatgataatagctcgtttgatttacgagg

SEQ ID NO: 9006 - DNA, 25377 bp, Oryza sativa
cacactaccacgccatgaactcgtggcgtggcaaagttatttggccacgctaggcgggatggcatggccaaaaggttcagatcctaaaaatatgttttgggaaggtctatttttaaaattaaaaaaataaaaaggttcaaaaaataaaaaaaaagttcccagtttggctggccggttcagatctgggaaataaattttggatgggtttatttttaaaattaaaaattaaaaaggttcataaaataaaaaaaattctttcgctgccgagccaagggtggcgctcccatcgtattgttgtttgtcgttgccaccacaaggtgagaaaaaggatgcagccaggtttttttcctggacgtgatctttggttcctgtgagccaacctatctgatcgtgttctcgaggttcacaggcaggaagatccattggattggtttgatttgcaatttctgtaactttacctatcagtcttaccaagtataatatataaattagctctgtgttgctgtttggaaatattcagagagtttttattgtgttggtagctattggtaccgtgaaagagagggataaatcagggcgcttgctgtagagtgctcatcagagattcacattcgcggagttctctaagggttcaagttagggatattagtggtcacttcaaatctagagaagcttatagggatgttgagttgaaaatagggcacctcttcctagggctttgttcggtgaggttaggggtaatcgagacccagctcgttagaggtccccaatggagagtaggattcatatgatcccatgtctcccctcttatgcaaatcaatgtatttcgtgtgatttcctgctttgtggtgctaatatgtgtcctctgtgaggttggcaagtgttggggttccgtgagaatcaagactttgtctcgtgaggcaagaactccagaagttttggaaaagaaccactgaagtaccgggcagacctctctgtcttcggttgatagctgccgaaaaatttctgtcccccccctcttctaggctacaccttggatttcaggtgcagcttctgtacataagattataagtattatggatggcaatgcaggaaacaatcaaatttttaggctgaagaagatactccgaagactgcttttagatgttctggagcaattggcttatacgagtgggttgttatgactttttgggttaagactgctggtgctacatatcaaagatctatgaattatatattcatgatctcatcggcttgttgggtgaatctatatagatgatgtgattgtgacgtctaaaagtgttgatggacacttagctgatttatgaagggtgttagataggacaaggaattctaaaaataactccatttatacggctcttaatccaattttcgctagcgaaggctaaagaggaccacatggaaaaaaaccgccctatatatcaaatagctccgcaccatctcaactttccccacatcccaacttcacgactccttctcttctctcaagccgctcctccctcctcctctcaccatacatcttcacctgtggagcgacagcgatggcgacgagggcaatgggaggcagatctgatggtggtatgggaggaggctggtcgcggtggcgcaataaagagtgtggcggcggtgaccctcccactcccctctcccatatccagcctccaggtgcgtgctctcgacaatagcggctccctccagcctcaacatgctctcggcaacggcgtccgtggtggcgatgggggtcaaatctggtggcaggatgaccggagaccgttgacggtggaagtagtagaagtggcactgacggtgacttccccactcccctcccatcctatccctatcctagatctgaccatagggaggcggccgccggtggcggtagctcgtccacggcggcttcagcagcctccaaggtcatcgttgatgacaatgagtagtgttgatgtttgcatgtttaaaatgcagtgagaaatcaatgtagtgatcttggatgtcaatttgaatatggattggatttgaatctagctttctagacgtggatttaaaatttgaaaatgcaacaatgtctctagatgttgatttttttttcccaaaaggatatcgctggcggtcctcttaattagttgtgtctcctgcgaaaattgattttgcaggcgatcttcttaagtgtctgcaagcaaaattctattatcgcaagtggatttaaattttcatgggtgatcatattaagtggtcgtaagcaaaaatctattatcgcaaccatgaacaaaaatctattgccggctagtagtaccgccagcgaaaatcggtttaggccaccatgaagaacactcttttaagtagtgattaggagtttgtattaaggaagctcttcgagtcatgcatcgagagaattttagtcccgtgaaatttcctcctcactcgtatcgtaaaacttcctccctaatttcatggagtcatcaactgcgttaggggatcgagcagaatcaaaaactgatcgagatcgatattatcttcgtagaccaaatcacagtaccgcacgttacgacgtccagggaccgcgtcagttggcgacggcgacgtgacggagtcgactctatcgtcaccgaattgatcgatggtggccttccggaggatccggatctcctactccgacccggacgccaccgactccgactccgactcggactccgccgacgccggcgaccacgatatcagcagccgaagcagcaggaccaacgccgccgcacgccggaaggtgatcgtcatctcgctgtccaggaagaagggaagatcgttatcgcagtccggtcgtcattatcgtcgtcgtcgttccgaaattccggcggccgcggcgaaggcggtggaggcggaagattggccgtcgtcgagcgacgggatgcgtcgtggcgccgtagcggcggcgaggtcggcgtcggcggccgccaagaagggttcccgcggcggcgtgtaccagcgccagcccgggcggtgggcggtggacttccgggacagccagctcaaggtccggcaatggctcggcacgttcccctccgaggaggaggccagggccgcctacgacgccttcgaggtgcaggtccgcgcctccctgtcccgcggcggcgccggcgcctcctcccccgccgtcgccatcgcgccgtcacctgcccgcgtcaagatccaactaccggcgccgcggcgtgcatctggccgccggaagaagacgcagacgacggcgacggtgacgacaacgacgacgacggaatcattatcgcaagtgacggcctcatcagcgtccccgtcgtccaaggaggcgccgccgccgtcgtcgtcagcttctgccgcgacgccgccgccgctgaatccgccgccgttcgtcgtcgatacattcctgggggaggatgaccacctcgccgccgacgaggatgaccgcttcggcttcggcctcgccgatcttgggcacctcccgctgccgttcttggatgacaacgacatggacttcaagctcagcgacagcgacgatctctccttcctcttcgatatcggcttcatgtgacgtacgtgacaaacccaacaccaacacgtacgtacacttttgttgtgatcgatcgattcttcatcgatagatcgatctctgcatgccaatccatgcatgatcgagttacatattacattaattgtaaatcaaccaggtaattcttccatttacctacaatcaactgtaaactgtgtaacatattattcatctcaatcagtagtagtaataattaattctgcagtaattggaatcatcctctgctgaattatattatctatggctgagttgacgacgacgacgcgagctgtgacgacatataagctagaaggagccggggcactcgaaggtgacgtggcagccgtcgacgggagtgagccggacgacgtgccggacggcggtcatgaacgccgggagccgcgccgccgcctggcagacgcacgagttgtccagcgacatgaggcgccggcagcacgccgtgtcgtgggggtcctccctgctctcgtcgtcgtcgtccacgttgcgccggtgccggtggcgccgccgccgcccacgcccctcctcgtcgccgccgcctcctccctgctcctcgccgtcggcgtcgtagtagtagtcgccgtcgtcgtcatactcgtcgccgccgccgccaccgccgccccgagactggagcccgtgcctgcggctcccgccgccggtgaccgacgtctcgttgagcttgagcgggcgcggcggcacgagcggcggcctcatgacccccggcaaggtgcgcatgctgcacgcctcgttggcgaggttgaactgcgaccggcacaacacctgggcgctcgccgtcacggcgagcagcggaagcagaagcagcgccattgttagtgctgatctctccatgcttgctttgttcttgtcttcttgtctttgctgatgatccagtgagctaccagtcatcatatcaagcggcttaaatagccacggatcctactaaactgtctcgtgatttaatttcaagatgcatggaaaatggggtcaaggagaatcagtgttttttagtgtgattttcaagatggattcgaggagaatcagtgttgttttgtggatcgcaaatgcttgttggtagaagttaggaggagaggaagttttcctatgacattagattgaaatttcccatgcttttctttggctgtaatgacgttttgaagaagatttaattccatcttggaaacaagaacacgaaggctagtttcgaatgatattcagctttcaaggatggaagataagcattgctcgacacgtgaattatgtaatcaattgatcaatataatagttagtagtttagtaccaggttagtttgccttgctgctgcataatgtatctttggaggtcaaaagtaggtagattcagagacttaatttaattttggcgtggattaacaccaaatcaagtaattgtaaattcgctatggttccatttttcaagcatttttcagagtaggcatacaaagaatatgggaacattttcatttcccaagacaattttacaatggtgacaggagaaattttgtcgtgtggcaccatacatctcaattatgaagcttattttctagttagctttagcaagttatagatttttttcaccaaattgccatgaaacgcacgacaacacatattaaaaaaaactaacatttgggcaaaatacttcacataatatcaccactacagaaatgatttttctgaacgagatcctcgttagattgcagacagaccataacaacccgcacctgtaaaaatcgagcaggcatttccgcatacgactccttaataggcccgcaaaaattcatttttgtatgcgggtctctttaggggccgtatgctcattttgcatgtggacccttaagaggtccgcataagaaaatcatttttgaatgcgggtctcgtaagggtctgctaagtctgatttgtctcatcttccctctccactacttcaaaaaaaaatttcacaagcagccttatcttctcttctcggtcctctctctctccaccacttctcctcttctcctcttccctctccaccacttcaaaaaattttcacaggcaaccttatcttctcttctcggtcctctctctctctccaccacttctcttcttatcctcttccctctccaccacttctcagtcctctctctataacctcctcctctcctctctctctctctctcggcagccgacggtgggcttggcgcccgcacgaccggtggcggcagctactaacgacggacgggcggtggttgggcgggtgacagtgacagcactacggagggttggtgatgacggatccaccgcccttgaccttgggcgggggcgatggggcgggtgacagcaggcgcgatggcgagcggcggcaaaggcgagaggagcacgatggcgggtggattggcgcgtcgacaggcagacgagcggcagcgacggccgtcctccgcccggatccagtggcagcgacaaaagacgcgcgacagcaggcgagtgggtgtgtcggtgggtggtagcgaagggcgacagcgcatgacgacaaggactcgaggtgacggcggtgggcggccggagcgggcgtccggcacgtggtgggatggctagagttttttttttttttttgccaaaaaatattccgcatgtagttggcttaaggtttcgtatgcgaaaattacctttttgcatgcatatgcgctaaccacatagaaaatagggattttcgcagacattttctcgcatgcgggccagacaaccgcataagaaaatcgattttgtctatttggaaaatcattttttagtagtgtgtacaaagttattcttttatttttctttccagatgattttgtgaaaacagaattaattaatttctcaaacagaagacaacgaaactgagagctgcaaaattacccgtacacccatgggcgagtaaggagtctggcatgcgcgcgaattgtctcgggtatatgtcgtgggcggaagaacctaaccgcaaccactcaaggcgcgtccttgaggaggccgaacttgtaggagtcacggtcgagcgggttgtggaggaagagatcggcgtgcgggtactgcggcgctagcacattccacgcaatagacggtccggtgagctcgaaccgctgtgccgctccgacgaggcagaccgctatccgcccctccacgacatttgtgccacctgctgcagctgctagcttcctgtggtctaacttgggcggtttctcgttgattttgacgagggaggaggagaggaggatgaggaagaagaaggccgcggccaagaggagggtgatggtgagaccatggtgatcccccttgtgcaccactagctggccatggttggaacttggaatggcaaaaggctagctagcttgattaatttgcttatgttgacgacgataacagtgttgacctgtgtatattaatttatatgctgttgtattgctatttaattagataaaattactaagtaacactactggagaaacgatcttcgatcggtcggccaaattttacaatagtctcggttctcttataaaccaggactaaacgtcattatttagtcctggtttttaaggacaacaggactatatgatctttagtgtcggttcgccggttgctagagggtgtcaggccggatctttagtccactaaagatgcttataagctgcatgttggcgagagagcgtgcatgtggtggttcgatcagagctaacccttgtgcaatcatgtacgtgttcatcgtgcttattttcatcgttccatgcgtgcaacgcgttactcgtgcttaatttctattataaatttagactaatctagatttggtcggtggatattagttttcactagaaaaaatacctgtatgttgcgatgggtaaaaatatttttagattctttagttttggaccaaaagctccctatacattttactctttgctttttgaacaaaagcttattccctttttttttcttttcagtttcagcctagaccgccacctcctttgcttagactgcttctctttgacctaacccacaagtagagctgtagctccagctcgtatagctgactgtcgtcttcaacctctggaaaatggtgaaaacatctcatgttcatataatgccagaactgatcctccccatcaaatccggtcaaatatttctagattttccaaaattggttgatggcttttatacaatcgatctgctctttcctttttatcaaaatcgaagcgaatccgcaaaaatcgggataaaaacattgacttttaaataaagactaaatccggtgaattaaaacagaattgaaaggtaaaaatgggaaaaatgataaaggagtaacggggaatcgatttttgcaattaattgaaaaataaggtgacgaaaaaaaagagtaaaaaagcagctgatgaagaaaaactgaaaaaaaggaaaaaaaaggaaaaagaaggcgaaagagaaggacagaaaaaaaagaggaaaaaccggcgaaaaaagatggacggaagaaaacggaaaaaatggaaaaggaaaaaggaaaggaaaaaagggtgaaaaagaaaaaaaaagagacggtcggatggaagaaaacggaaaaaagggaaaagaaaaaaagaaaggaaaacggcgaaaaagacaaaaatgggaagacggagaaaattttttagctgaagccttacgtatttctgggcgtggctgatgggcgatcgctcgccccatcccctatatattcctctcccccttcctcctccccttcttctcttcctactacaccataaatttaaaaaaaaataaaaaaaattagaaaaatttatgtatagaaatactatatataaaaaatatttgaattcaaattcaaatttgaaatggaaaaatatttgaattcaaatttaaatttgaaacgggtatataaactttttacttataaattttgggcctataaactaatatttgaatttaagttcaaatttgaatcgggtatgtaaacttttgacttataaactttgggtctatagactagatgtacagaaatactatatataaaaaatatttgaatttaaattcaaatttgaatcggatataattcaaactccaatttgaatcggatataattcaaattcaaatttgaatcgggtatgtaaacttttgacttataaactttgagtctataaactttaggtgtataaactttagatgtatagaaatactttatataaaaaatatttgaattcaaatttaattttttttgtggagataattcaaatttaaatttgaatcggatatataaacttttgatttataaactttgggtctgtaaactttagatgtgtaaacttgaggtgtacaaacttcaggtgtataaatttactaaaataggaaagtaatgcggtgcaaaaaaaaaaagaaaccacgtgaaggagatggggggcaacccgatcgctagggccgatcgatccccatcaggagtttcgcgtatttcttaattaggtactagcaaaagtgtccgtgcattgcaacggaaagaaaaaacgagaaaatttaattaaaacatattaaattctaatttgatgaaatatcgcagccatcgtttcactaacaaaaagtaatttgtgaataaaacttttatatacgtgttcttagcgatcaataaaaaaaatctcaaaatcagctccaaatttaaaattgaaaattcaaattttggttgataagaaaaaagcacaagtgaaaagatgaggccctatgactgtaagctttttaaccattatttctatatttgctgaaactgaattctaccctattatttaccaattgatttttacatccttatttctcattgatcggtcaggattgtcccaatccaacgcccgacgacgctcccacctccctcacccccttcctctctccgccctcccagagacccggactcatcctctctctcgcgttcatccaaaaaatcatgctgccccaccctcacaccaactgcacagcgacgcctcctcgcaacccctccgcccacgcatcgcgccgccgtcgatttctgcctcgagagcatcgttgcacgccgcgtgtcaccagatcggcgtcacagtcgccgacatcgatctcgctccactatcggagtcacaaacatcggcaatcaacccgaggctcagcggagtcggcgatttcgctgcttgcagtaccctgatgcaccagtgcaccactagccaccaatccaccagaggctctcttcatctcttttatgctaaatgcaacatttgtgtgctaccttgaaaacagtagtaactaattatgctaaatgcatcattatagaaataatgattttttattatactggtagggattgccgatactttccacgagtaattcttttcgctttttcttccgttctatttggtgtttttcagggttttcttacctgtcaggaatgtcaacaagccacggtgcccaggcatatatgcacatgcataaccaggtgagaccaaggaagctataacctacattagggattttctttttttgcaattatacacttcttattatgccaaacatttatcaaactatcgcaaattgtatatttggtatcattggttgttttccgtttatatgacacattgtaaacggagagatatgtggcatattaaacttcacatttatatggtctgtttaatatgcacagtgggaaaacataataaattgagataatccattgtatgccactgagtttgtcataggtctacaatttgccactgattttgtcacgttctataatatgccatcgatttttgcttaacttctacgatttaccaccgccatccggttagtctccgttagtactgtacactttcatccaaatgaccaaaatacccctgagacaaaaactttcaaattttggataaaaattctgaaatgtcagactttaagtttttggacaaattttgaatgtttacaatcttatgtttataatatggtatttcggaatttttgtccacattttggaagttttatcctaggggtattttggtcatttggacaaaattgtacagtactaacggagactaactggacggcgatggtaaatcatataagttaagtaaaagtcgatggtatattatagaacgtgacaaagtcagtggcaaatcgtagagctatgacaaactcagtggcatataatggattgtctctaataaatttgcaattatatgtgtgggaacgagcctcccacgtgcactgttactagttgttactccctctgtcctaagctactttgatcaataatatctataaaaataagatgttttaaataataagatttgcatattatgatagtttgtttaattataaatatagtaacgtcaattttacatgattgacttttttttattttttattattaatagtcaaagttaaaaatgtttgacttactattatgctaaaaatgcttacattttgagatggagagtatgtacgaaccacagtaatcgagtattcatggtctatgtggtatagctaactcatgtcacaaatatatattagagcagtggcaacgtgatatacgtatgcagatatatatggtcattacttggaagctttgcttgagattatattacaaaccaaaagccttacaaaagagagttccgcatgcaaacaacgtgcatgctaatcttgatggagactatctagtgaagtactagcttcaggcaactcatcgacccagcacggtgtgtatggaaatgcctggcttatgtattcatgttgggcgaagtggttatagtgttttgggtataagttacccaaatgttgaagctttgagctattcaaatgataggccaatcctttccttgatatagaattcagaaagatgacctctttataaggatgaaatccaagcaactcaaggtagtcgccatcatcgtgctcttcacagttaccttgattttctacaatattatcatcatcggaataccattcaaagttattttccgccggtgcatcatcatttggagaatgaaaatgagagggatcatagttcccattgtataactcccactctcctggaaacttttgactataaagatggtagttaacatcttgtaagatctacggtccgtgatcttgtttactattattcaggcgtagtagcatgggcttaaggttgttttggtgcttcaatacccacttaaactgaccacatgatttattgaggatccaaattaaaaggcaacagtccagcatatgaagtgatgcgaggtacactcctttctctgattttcctatgtaaatatatggtggttgtttgctcttgtaaattttgggatgcttgattacttgataggtcgtcccatcagacatgataccctacgaagaacaaaataaacataagaatttatattaacaaatatgaaaacggaatacaagttgaaactaaataaaaatattaacgctaaagttaacatcatgacaaaatacgagttcacgtagagtgctcctcgccaatagacagtaccacactgctccggccggcacagcctctgagcgctagccacggttccggctgcatccccttctctagagaatgatctctcctcccatcgccctgtcgccgatgagaagacatggaggacgagcggcgatggtggccattctgatttcttcaagacgggatccatcgtttttacgttgtaccatccgacgtcaacaaattggatgttaaaaacctcatagtgcggcgataaggtagtgtcgaagacgatgaattctttgtcaaagaacccagattccagcttggcgaaggtgcggggcaatggtggcaagcgcgcccaccttcgagtggccgggtttaccacaaggagagagaaaagcaaaaggaggccgttgcagtggtccccgatgtcggggctttgttcttcgggtggcaggaagtcgagcatgccccttacggttgtcggtgacgaagatggacgagagaagaactccgggaacgtgagggcgttgaagtggatgaaaatgccggcgagcgacagcgggagggcgtagcagccggcgggagtcgatggcggagcgccagtccgtgcagacgcagcgcgacgcagcgaggcttcgcgggggcaagcggcggaggatctcggcgagcacgtcctccggtagctccacctcgcgatcgtcgtcgcctcccgctgccggcggcggctcttccatgatctccatcgaggtacgtattggtggaaggaacgggcggcaactactgcgggttaatttcccgttttctttctctctgatctgtcttttcttggtcgcacagattgtgcattgcatggtcgactagataggctctgtgtacaggctgaactggacaccgatccggattggattggaatgatcgtgtacgtgtacagctccatcggaaatagcgacagtgttttgttcgtacgtatgacgagtactgctacctctcaccttaatttgactttacatataacggttgaccattcgttttagtcaaaacccaaatataaatatgtaggagtatagtacaagggctaatactacaaatggtttctcaaatactcaaatgttgtggttattgcaattttcttgtattgattgaagtgggttggagcggttgcttgttggaaaacgcctgccgagtgggcagcgcaagcgcaaggaggaggagagagagagccggcaagacctcatcctggctgcgttgtttgcgggagagtgattggcatgatgaatcacacgaagaaagctagtaagcagcagtacaagatatttaataatttgatccttcccaagtcgggctcccattatttaatatatcttagcccgcttatggtcccatatatctgtttacatctaaatttggcacctaaaaataaaataggaaaaattgtcaaagtttgaaagtccgccggttttcttctaagagggttggtctgaccgccgtatgtcggccggtcagaccgctgctagtagactagtcagaccgacagtgtgtagtcagtcttaccggtagaatccgagtccagttctgtttttgtcgggactcgagtttccttgctcggaaagacatattttgggtttccattggtttttagcccgagttggacgtggaggagagcctgtagagggcaagaccaacccctatataagagacaagtccggttcattgtaaaaagacaatcaaccatcaatcaatcgaatcgttcttttacttttgcttctaattctagtttagtttgtccatctttgttgatttgcgctgtaaatcatccgccgtcgctgcgagagtgcgacacatctttgtaggtttatcctgaaaaccttccgttttgcccacgagacgggtagttatctatcgttctatctagatcggctccggtagccagtttagtttatcaaaacccatcttgatttagcttttgctagattgaggtggttggcgactctaggatcaccgcaaagctttaggtgctgtgatcgtgcttatcaaattgtcaaaaaagttaccaacaatatcatcctcacacgtgttagttaaagtaaattggaaactaaaaagtgtccaattattgaatttctccgtgtttcacatagctcgaacaaacaaaaaatatctacaatgattacttttttaatatataacgccattgaatttttaagatacgtctaatcattcatcttattaaaaaaatataattattatttattttattgtgatttgatttatcatcaaatgttcttgaagcataacttaaatatttttatatttacacaaacattttgaataagataaatgtttaaatgtttgtaaaaaagtcaacgacgccatatattaaaaaacgggggtagtataaggggtgttccgtactactgtggttaccggacccgggtaatttttaatacttggatgttttagcttatattaactatattgtattagttaaaaattaaagtattatatgtgttatgacaggttaaggaccctggataatttccgttctaggtttgccactgtgtagtactccctccgtcctaaaatataagaagttttggttggatagaacacatcctagtatgataaatctagactgacaatctatctaaatctgccatgtgtcccatcgattcaaaactatttatattttaggatggagagagagagagcatgtagtgagaggataggagatcatgaaggatatcacaagatcatgccgctagacaccgtagacctgtgctgggccttgcccatggatgggcctactctacaatccggcccactcgagccagccctattagtctgcctgggttgcacgagcctaggctgggtggtaagggcttttacatgtttggaggtgtgctaggccggactgcctcgttctagagtggtggaaattgatgagttcacataactgaaaaggtaagttcctctaaaaaaagtaaaaaaatagactgaagagttggtcatgcattgtttgattaattaatattattttctctggttcttactctctctgctttatattagaagacgctttaaaaaaattttagtcaaacttttttttacgttctactaaatttatatttaaaacatagcaatattttcaatataaagcaagcgcactattaaaatatatttaatgttagatttaataaactaatttagaattttagatgttgctaaaattttctataaacttaaataaatttaaaggtttgacaatgagaaaaattaaagtgttttataagtgaaaaggagggagtacaacttagtggtgtaatatttttaatggcaaccatatttaacatcctcaaattttaaactaaaatttgactgcatcatgctggcttttgattaaatttgtttggtttaaaaatctatttgattcttaaattggttcaagtatttatttcttagagccctactaatttaccctaataattccctttattccaaaccctagtgaatttgagcaaattctctcaaatttcaaaccatagattattttcttagttcatcgaagatttgctatacttcaaaccctagtgaaactctttcaaattcatagattaaattcattctttttataggaaatattcaaaaattctgaaattcactgttcatcgcacacaaggtgctcgatgaaatgtctagcccaactagagcagcccaactcctacccaatcttgtgcaaagtctagatttggtcctaggggaccacaacccactcaaaaccgtggctttctttgcctcatcctccccttcacgcgcaccgcccgagcatccgacttagccacgcgccgtgtcgccgcgcgtcggcctcagggccgcttgcgcgtgcctgaccgccttggcgcaccgtcgcccgtccgacgccctcagcccaccgccgccgcaccaatcttgacgacgacaaagccgggacgacgaccgccgcaagaaatcgccgctcgacgccgtgcgcgcccgtccaaagctgccgccgagtacgatttcgcttctacccagggtgaatcgcgccaattcttgccgcacggttagattgaagatagacggtggtatctcctctcacaattcaaaccattcacccctgagccagccgttttcaccctcgccgccgccgcgcgtcgcgcccggattagcgccctcacgtcgccagctgattccaaccgcggtcaagtcaatacttcatcggtaagtattcgaacgtggcctcccgccactcaaatcgatctttcccgccctctctcagcctttgccacctttgcctcatccaaatcccaagctcatccatggcgatgacggtgtccgagctcatccgctcctcctagccctataaataggaccccaatcccttccttgtccatcatccatcatcaacaatcaaagccctacaaccccgaagctctgcttcgccaatccaccccatcaaccaccatccctcgtcggtcgaacaccttgtgcgcgatcgactccacccctctccatccatcctccgccctaaatatcccttagaacaccttatatcaaccatgttctagcatagtaagccctaaccgaagctctgcgtcgagttttacctcgccgcaccaacccgagcaccgccgcccccgcgctgctctgttcttcaccgccgcgaagtttttctggccgcaatccgtcgtttcaaccgatctcggtgagtttttccgtttcaaccatctacatactacctagattccattttagcaatccctttgcactaccatgctcccctctaagctgccgatgtgagcacggccgccgcctatggaggcgctcgtcggcaactattctccgcaccttgccaaaggtcggcaagctgccggaatccctctagacacctcgtagatgctctagaaccccctcccctagccatgtctaactcatatcaccttgatcaccattacagcctaaccgtaccaccgccgccctagtcgccaacccatccacataccaaattagctcctccgccgccgatcgccgtcgccggagatacctagctccctcccctcttcggccgcaaccactttccccctccatcgccgccgtaatcccaaaccctagcaccgccggctgcatttggggaaacggccgaaggtagaagaagagaagagagagagagagagagactgacaggtgggacccgcacacagtgccatttcacttttatttgatttttaaactttagaagctcatatcttttaaaatatagatccaattccaatgaaacttggaccaatattcttctaaaatcattctctatcttttgagcccctttttgctatttttgcattttattttattttctctatttttcatatttttggatttcatttgaattccttttaaatttgaattttacatatgtctaaccctaggtcttgaggattcttctgactcaatagataatatccatcaatctcaggacatcgagcaaggcaagttaccatataccttttgatcattcaagcctatattttataaattatttacttatagccttctattcaatattctattttctatgcataaatcaatcatagaaacccagataatttagtattgcttattttgcttacaatctggttaaaataccctatacttagattgggacagtacgtaagatttggctgatttccgggtggctagtactgtctcaatcaatataagttttaccagatacttatgttgaacgaacgagtacgaccgcagtttctagaatagggacagacctagttattatgttaattagcaatatggcacctctgtatagtggttcttatttttaagtcctcgtgcaggaggcaactatagccgcgaagggaaactttaaccattaccatgtacaggtaaatggtttgtgatactcgagtataaactatatggtatatttctaaaccctgatcgagatgacgtggtgtcatacgatcagttccccttaaataccttgggaacgccagaactcctcttgctgctgttaacattacattcagagcatatgaggatatgagttcatggaacaggtgccacaattgttaatgacttaatactggaccatgactaaagccgatgattatcagcaagtcatggactgcgggtaaagcgtacatctgctacagtagaatatctttgaaactattcgaatagccgtactcatggagttgagtactgggactcatatggtaccctggttagaaatctaaagtttatatgttttataaattcttgctataacttttccagattgtctagtactgctttttgcaaagaaccctattatatgtcaatgcataacatattcccatgataacttgctgagtattgtaaatactcacccttgctcttataacccctttttcagatctgggtcaagaggaggacccttatgactattactacgaacatcccgataacttagagaatccctaaaggttatacctcactagtcagaatgtatagaaacttctgttgtgtattaattagttaggtgagtacctattattgtaaaacccttagtattgtaagactttttaacatatgcaatgaagaaccggttatattgtatgtatcaatatttactgatccagggattgattcattaatctcagtcggattcaagttattagttttgggctccgacaccatatgtgcctttttcctctataattattccatcgcaacacagggcttctcaggtctcagctacactggtggagaaactgtttgtagtctcggttggtaaccccctttagtcccggttgtccaaccgggactacgaatccgggactaaagataactatctttagtcccaggtgaaataaccgggactaaagatcgatatttattcccggttcgtgttaccaaccgggactaaagattgatcagccacgtggccggccaaaccatctttagtcccggtttgtgttaccaaccaggactaaagatcggtgcaccatttttttttatttgcaaggccctgtttgctgcatggttgattatatatatatatacatatatatgcataatatataggcatatatatatatatacatatgttacaatacatatatatgcataatatataggcatatatatatatatatatatatatatatatatatatatatatatatatatatatatatatatatatatatatatatatatatatatatatatatgtgtgtgtgtgtgtgtgtgtgtgtgtgtgtgtatgtataaatcatatattacacagacatatgtataatttaaagcacttaacattttatgtgcatatatatatgttaccaaaatatatattaacacaaaagtaaatgtgtacatatataaatatatatatacatgcatatatagtacaattcatttgctcggtagctatagctacgactttgacgccggtgttatgtcagaagaggaaggaccgacgttatgaattgtcgatccgtcgtagtagaattcaccgtcgagattaaggacttcttcgttgatgaatcccatcagttgttcttgaacagccgtgataaaatccttgtgtgggagattatccctcatgtgaatacgctatcgttcgaaaaataatgacgtatgaatatatgaaattaataaacaacttaacaaatcgatacgcaatgaaattttgaatggtttatgtatacgtacatcgagctctcgtgttgtgcatatttggtttgataggcagtgggcatactcgcatacgtagtagccgcataagttagttccctggtcctgctttgcacactacatgagaaacgatgagagatttaatatactctttatattaactgtaattagagattcaatccaatataattttggatcatgcatgtactcactggaaaatcaaacctccgtccaagtttttctttccaagtcccgcggaccaattgacggaaccgatcccaagccctacatatgcagttgcaagctatgattaattaattattacttgagatcaacataatagcaatagattccccgcgactttggaatagatggcattatattacctgtctatcagtttgaagaccttatcaaaaatcttctcctctttattcattgagtcgtacacagtgactctgcatgcgtccaagtcgaagaataacaggacccagtggaatctggaatatgcgtgagaagagatatatatgatcaaaaatgtacatgctatatgtatgggaacaaaatttgttcgaacgacaataaaaactcactctgtgttgtacggcagtagtatgtacgtcttgaaatgttgctgcgttaggagatggacgagattgtcctctgtgtctttctcgtacttgtcgatcatttcggtgttgattttccgagggtcgatgaacccagtatcgtagaccctccgccgtcgggccctttgaatctccattctacaacgatgaaaggaaagtattattgcttacatatatgccaggagctaattattgaacgaaacaaatcgaactcaaagatactcacaaaatccatgcgctcagaagagagacgtcgagggcgtccaactggtacagatcgaagagatccttgaaatggatccagagaacatcttctccttgcaagaagtcggggtttctgatcctcgctccgaacatctctctacccttggcactcatttccatgtaccattcatggaatttgtacatctgtgtcggtagggactgcagctgtttaggtttgacaagcggtttaccgagttcaaacttgtatgccacttccgccttcgggattggtgctcctccaaccaactgatccacagttagaccggtgtctgaaatgaattccgttatgccaaaatcttcgccggtcaccaacggctcgacctcttggtttggttgttctccaagctgagggactggtttggacttcttgtgataggctctctgaagtgttcggtcatagtccgatatctgtaacgcctccttgtttgttgtggacattcccttgaagaagttcttcacgctcgggtcaataggtatcttcttttcaggactccaaggcttgagttgcctcttcacctctcctgccacataagcatcaagctcctcttgactgcaatcgtacggtggctccttgtctttggtggcgtcaactttcgccttctttgttgcccttgtgcgggcaagcagtggagcttggcgagaccttgtcttgggaggtgcaggcgaacacggtggaggcggaggagctagaggagccggaggagatggtgcagcaggaggtggcggaggagccggaggagatggtgcacgagacgccgcttgtcgcccaggaaggatgatgtactgcttgcgccatagtatgatggcgtggcttgtgtctcgtagatgcgtctcaccgtctcctcctgggtagtccaactcgaggtcctcgtacgcggcttccaccaactcaacttcgacactcgagtatcctgctagaatcggcctgtagtggtaagtcccggaagggtccgttgggatggccattcctgacgccaccttcacgtgatgagaggttatctattagtaatcaacctaagcagcaacttgcggaatgtacaagtcaaaaatcatcaaactatgagcataccttgattgataagttcttgaagggaatatgcagctcacatggtgtccgctgcgtgatctcatcaacggggcaggtggtttcgtcctgggtttgcatggcgtccatgctctgtgatccgacctgccccgttgagacgcagctgctacgattgcctgatgggctgaccattgcaggatgaatgtacggctggggatcctgggaccgatgtgcggccatacgttcatccaccttccttgccacctcctcttgcatgctgagctcgtagctcgataccctgtactcaagatctgcaatcttcgcctcggtatctctcttgctcctcatccgactcctgtacgtgtggatgtcctccttaaatccaatcttccagggaatcacacatttccctcgtgttcgtcctggatgctcgggagtctgtagggcgagtaacagctcatccttctctctgtctggtcggaatgtgccctgacaagaggctaccactgcgtccgttagtcgactggcggcctcgtgtatctgatcgctaaagacaagggagccatcaactagattaagcgttccaccgtgagcatagtaccagaacttcgatcgatccggccatttagtggtggccggttcgatacccctctcaatcaaacttgcctccatctcctcccacttcggcattgcgacgctatatccgcctgaccccaagtggtgatggtacttcttcttggcggcattttctttgtttctggccatcatcgcttgcccttgtcgccctgtcttgtaagcaacaaactcatcccaatgatcccttagctttgggaatacgtcgaagttcggtgttagtcccttcaggatgtatttcttgtagagatctcccttgaagctctggaactgttccgccattttcttcagagtccactgtttcactatgttctccgtacccgcgggtagcgtgaacgtctcaagcattgtggtccacagcatctctttctctgagtccgggacaaagctgtcattatccctgcgtgcccttgttctgtgccagtacaccgtgctgacaggcacgttgtccctcacaacccaaccgctgtggcgtacaaaattcttggctgcttctgccgaggcactaggtcggccgtcttcgtccacctcagttatgatgtgccgaccctctatcttcttcgcggcacctcgttgtccgagtgccctcttctgtccagcggagggatgacttccactagcctcctcctcatcgttcccctcctcgctcccctccgcatccctctccacgttcccctcctcgttcaagtactggtttggatcctcgttcccctcttcttcgttccagtactggctgcttctctctgcgattgtatcgtatagtatctgttcctcatcgcgatcagccatctgtgcatacaaaaaatacttgttaggtatataggatgtatttgctaaccgtaatattaaaactctactaatcttatattaaatctctaataatcttatattaaatcgctactaatttcatattaaaattgtaataatcatatatatatgctaagtataacaatcttatattaaatcactgctaatcttatattaaatctctactaatctcatattaaatcgctactaatattatattaaaattgtaataatcatatatatatgctaagtctaagaatcttatattaaatctctaacaatcttatattaaatctctaataatcttatattaaaattgtaataatcatatatgctaagtctaacaatcttatattaaatcgctactaatctcatattaaaattgtaataatcatatatatatgctaagtataacaatcttatattaaatcgctactaatcttatattaaatctctactaatctcatattaaatcgctactaatattatattaaaattgtaataatcatatatatatgctacttctaagaatcttatattaaatctctaacaatcttatattaaatctctaataatcttatattaaaattgtaataatcatatatgctaagtctaacaatcttatattaaatcgctactaatctcatattaaaattgtaataatcatatatatatgctaagtataacaatcttatattaaatcgctactaatcttatattaaatctctactaatctcatattaaatcgctactaatcttatattaaaattgtaatagtcacatatatataataagtctaacaataatatattaaatctctaacaatcatatatgctaagtgttacaaacttatattaaatcgataacaatcttatattaaaattgtaataatcatatatgctaagtctaacaatcttatattaaatatctaacaatcacttctttacatcatttgcctgcgcgaattccttcgatggctagctaccacttcggcttgagggacgacgacgatgtcttctctgcaacattatcaggaaaatgtattagtctaaacgggccaagttacatatataatcatatatgtattaccagtaaatcgtattagtataaacgcgttcgttctcacacttttagtacaagtgcatacacgttcgtaagcgtttcgtgcacgttcgttcgcgttccgtaatcgtttcgttcacgttcgttcgcgttcattaacgtttcgtgcatgttcgttcgcgttcattaacgtttcgttacgttcgttcgcgtttcgttacgctcgttcgcgttcgttaacgtttcgttcacgttcgttcgcattcgttaacgtttcgtgcacgttcgttcgcgttcgttaacgtttcgtaacgttcgttcgcgttcggtcacgtttcaatcacgttcgttaacggtcggcaatgttgggcgcgatcgtcagtagcgtggcggcgcggcggtggcgtcggggcgcagtgggccggcccggcggcgtgcgggcgtgacgacggagtcggggcccggcggcgtgggggcgcggcagcggcgcgcggcggccgcggcgtggcgagctcgaggcggtggtggcggagtggcagtggcgacggcgtggcatcgcggcggcgtggcgagctcgaggcgggggcggcggagtggcagtggcggtggcgccgtcgcggcggcggccgcgtcgaagtcggtcgttggccgtggagagagagatatatcgagatcgagatcgagagagagagaggcagcggtggctctcacccaagagatgcggcggcggagtctgcggcggaggcggcgaggaccgccaagcgacggcgagagacgacggcggtgtcagcgcggggttgccctaggcacggtggcagcgaaggagaagccgagatcgaaaaacgtctaagtgttggtggagaagacgagggcgcaccgggaatatatacccccggatctttagtcccagttggtgagaccaatcgttgatggttacgaacagcagcgctcgtaggttaaactccttctgtttgtcctcatcccacacggggacaccttccttcttccacaacagtttaagatcttcgaccagtggtcttaggtacacatcgatgtcgttaccaggttgcttggggccttgaattataatcggcatcattatgtacttcctcttcatgcatagccacggggggaggttgtagatacacatcataacggaccaagtgctatggccgctgctcatctctcca

SEQ ID NO: 9007 - DNA, 7003 bp, Oryza sativa
  unsure (1)..(7003): unsure at all n locations
cggcgcgatagagtgcacggggaagggaggcgaaaaggggaaatgtgagaggaggacgcgaggttgctttttgaaagcatggggagggtggacaagaccgggaggcggccggatttctcgccgacgtggaggatggagagagagagtggggggattcgaattgaatcccgctcttgcgggcgcgcgcgcgtgagcggggaaaggcggggcgtgggggtggcgacgtgggggcgtggagcgcggagtgggcgcgagagaagcgggggaagcggcggcgatgggtggcggtttcggcggcggcggttgagggaggccgcctctccggctggaggttaggggcgaacccgacaggtgggccccacctgtcggcgcccgggtggagagggggaggccggatggacttcggcgggtgggggagggaagaaatgggcccgcggcgcaaagggagaaaaaaaggaggaaaaagaaaaagaaaaaggatttttcctgggatttaaaattgcacatgctcatttttaaatgggttaaaattatttccaaggttctgaaaattccactaaaaatcctgttaatatattggagcatggggaactcaagaaaaattctacaagctatttccgattattaattgcatttattaattatggaattagctctaggttaatgaaacaatttcttcgcgcaatttatttaaccatttttttaaagcaaggaaaaaagggggaaacttcagggcgtgacatataggtgcacacctttttttctgtcttggtgattaagtcggcgaccacgtgcactttctcatcggcagcgttgtctatggagtcggcaaccacgaccacttcctcaccggcctcatcgtgcatggagtccgagactacgagctatttcttgctcgcctcgttcatggtgtctctggccatcgactcctcatcgtgagcctcgtacatgatgtcaggaactatggcttcttgtttttttttttgtgctcaaagcccacataagtaatcctgttcaagttctctcgtttgcttgcatgcacgtatgccgccattaagtacatgagatgggaacgaagcattcaaggagtaacgagtagtcatcatcaatgcacaagggcaatctcgtcccgtacgtgagaaaaatgctccaacgacagattttctcatccacagctaactgagctcaaacgactagtaaaaccagcccggagggagtacttaagaccgtagtatagatcttatttttccatgttgtcgcttacatggtatatgtccggacgcatttgttagcttgttgagttaccgtgccaccgttaaacggagttaaaagacatgcgtgtacaatttctcaccacgttcttgttccgtgggcgatggaccgactccatcgtcacccttcccgatgacgggggacgacaacgcctgattcgccgccaagcccaccattggcactcccaggatggagggtggcggatgtgcctcacccgagaacagggatgccagatctgccaccatcattgatgagattggtaggaagagtgaggagggggaagcgggagagaggaggaggatgaggggagaggagaggggaggagatgggggggggggggagagggagtggatgtgttgaggagaagagatgggagtggattagaggatgatggatttgactttcaaagagaatattatttttgtatgcgagcctcttaagggatcacatgtgaaaatgcattatcgcatgcggtcccttaagaggcccgcctgcggtatacaatacgtctattatcgcagacaggcctcataaggggccacaagccataatgcattttcatatgcgactccttaaactgtcctatcgggtgcaatttttgcaggtgagggtagttacctgcaacttagaaggggtcttatccggaaaaatcgattatatagtagtaccagctcgtcaatttcaccggcgcgcagctcccaacggctattaacattgtcgatttgcagcaacaacaattggtcccaacagccatcgaaacaacaactcgggtgaccgccctatccacatgcacttctccggtgccaactctcccataagcaacagtggtgtgggtggaaggagggcaacagcggcgtggcaaactacccgaagatgacgagccagtcttttctaagcaataacggggagagagagtttacacgtgcacgtcattaactccgtttaacaatggcattgatgactcagcatgctgataggtgggtttggacatctgccatccgtttagggggtgaagatttataatatttagtattagtatatatagggatgtcaatcaaactcaatgtaaagttgatggacaatacttatttctctaatctactatcatcgctagtggcctcaaggctggacaaggaattttataggccaaatttgttttttatttttttaagtatgtgttcaaatgaatttaaattttaaattcaaagtaaaccttcaaatgaaactttaaaaatatcaagtcaaaatttgaaagtttcaacacaaattttgaagcttttgacacaaaattttaaaagtttcacgtcaaatttagaagtcttaattcaagttttgaaactttcaactcacttctggaatttatataatttcaattcttatttcaaaactttcaactcacatttttatattctattataaaactttaaaactttcaactcaaattgtgaaaaatttcagctcaaatttataactttcaatttaactatcaagttgcattttaaaacttccaattcactatttaattattattttattcaagaaaatacatttgccactgaactcctaagatattagcgctaagtgctatgatgagcggcgtggaagcacgtgctttacttcgcttctcggtgcagctgcgcgcaatagaacccccaaacatgtaatgccattattcaatcgggcgaattcatcctgagctcatgaattagttataatcaaacagtcaactgcacaatagtagcacatgtcacattcaattttattagctctaactcacataaaaatgcaatttatttgaacacgaataatgtccaaaattagctcttgaaacgaagatcactaccatcactttgcaacttcgcattcatcttccatcatcgataatttctctgttaatctctagggaaggtgtgagaggggatgtctccctctgcccactgagctcatcggcagtagacccggagtagccggtggtgacatggctgctattccttcccctgagctgcaactcaatgatgtagttcggcttcgccaccacatcactcaccggaatgtctccggtgagcattgccaccacccttgacataggtggtctttggtgtggtgagccttgggtgcaaaggaacgacatacgaatgactctcaagacctcctcttcattgatttcctcgagccttgggtccacgattccgagcgcttgctctcgttcatagagcccccaagcctataaggtttaacatacgaagggaacatgtttcagtaacctataaaaggataaactgataaactgatgtattctctaggattcaaagatttcttatcagctaacccattcaaagagatatttcttgtcttccacaagggagtagtcggtgtttgatcgaccagcgacagtctctagagcgaccacaccaaatgagaaaacatcaaccttttcagttaaatggcctctcattgcatactcaggtgccaggtagccactagacaaagttcaagcaagtgcaatcagtacaggttatttaacatatacacgaacatgatagccatgatgaatgcgcttacaacgtgccggcaacttttgtgttaacatgagtcttcttctcatcatagagcttggcaagcccaaaatcagatatcttgggtgttaaatcagggtcgagtaggatgttactagccttgatgtcccgatgcacgatgcgcacattggcctcctcatgaagataacttagccctcttgcaatgcctaaaatgatttcaaaacgtgttgaccagccaaggttgaacctaccatcccctgcatttccaaaaacgaccaagataaatgacatgatgataaagagaagaaaaatataaagagttaagaaccaggtatctcgataacggagtgcagcataagcaatttgataggtgatggtgatacgatgtgaactcaccgaagagtgcttgatccagacttccattttcgaggtactcataaaccaacaatggtgtattactgtcaatgcagcagccatataatttcacaaggttccgatgttgcacagaagagattgttgcaacctctgtcacaaactggcttttcccctgctgggatgattgagaaagttgtttcacagctaccacccttccatcagttaatataccctatcaaaagatgaactttccttattgctagatcagataaatattcacttacaattaacattgagtaaattaggggaaataaccaaccttatagactggtccatatcctccttctccaagaatgttttgagaaccaaaattctccgtagctaacttaagctccgcattgctgaagacattacgccttccaaccatgttgtagagttctgccaaaaaaaaaccatcacatattggaaataattaggaattaaaatcatctatttaaaaagtgaattgctagaagaatatctaccttctttccgttgtgacgttctccttctcttctttagcaacataaataatccaactaggactgctaatccaaagaatgaagcgccgatcactactccagaaattgtccctgctttacttttcttttttggaacaccattttgcacagtaggaataaaatctgaaacatgagttttacattaattaaaaatcaatggaattcccttttcttggttgtacatatatattgactaattggtcagtacttggggtcacgcttaatgctgagatcgtaggtccataatgtccttgagtaggaatgcaacaagtacccttcccagcccagaacagatggatctcaaggaagtttttggacacagttgcagtatatctcttattgacagcaataagagactttccaccagccatcttccttatattgaagttcttttccttcagctcaccctatgcaaaacgtctagttagaaaacattccatgcagacatgcacaaaatattatgtgacacactcagtatgaacctgaacatatatgtcaaaaactctccgcccgatgctatttgaagttagtgagtttggataaacaaactctgcgaactcaagtgagacagtgtaattcccattctcaagtccaataccatagtatctaagtgatgatggtgacattcttgcagtttggaataattctgagttaagtgcactctgaaactgctgggggctatatattgcataacttccattggaagcctcattgaatttacctacactgcttacaccccatctcgcattgtcactaacataataagatgcggctccaatgttttgagcatcagtttcatacaaagtattatctgatccccttgtagatttattactgccacagtcgaccgcaaaggaataatctgcaattgagatggttataatagtactgaggtcatatcaactaccaatgtgagtgaagagttggaaacttggaattatacattctggagaaccacggaaacaaggagtatcttgctggagacagtttagccctgaaggtaaaatgctgcacaaataattgaatcaccaatctcagatcgcgcacaaatgttttcatctgtacaatttaatgtgacacatacctattgttggtgctatcaagaatgaagtcattagccaccaaattcctatagaacgcaaaatggttaacttgctaggaaacatgtaagcacaacctagagtatgtatattttcccctctgcctgcattcaaaagtttataagaaatttcagaacataaaacttacagttgcaaattgttcccagtaacccatggaggaaagcttccagagagatggttatatgaaaaatctctgcaaaggttccatcagaagttcaaaaaaaccaagtacaaaatattcaaaaatataggagtaacatgtggccatgtgctacacttaaatgttaatttgctacacatacaaattgttcagtgaagggcttttgtcatatggcaagcttccagaaaggctgttgttcccaagaaacctggtttatgtacaggtcagtatggcccccaaaagattaccttccgaagccattgtatgacaggaacaggaatattcagaaagaattttttaatttcttacaagaagctaagcttgtccagattcagtatggattgaggaacatgacctgtgatattgttaaagctcaagtccctgtgccaatagggaagcagcaacatcgtcgatacagatgccttatatcaaactgaccaaaagtaaagagcaggaaaagaaatacttacagtaaggttaaccctgcaagcttagaaaagttaactgttccaagattatcagatatcttgcagttcctcagtattctgtaataaaagtatctaacttagtaacttgccactttgtgaagactaagcaattatgaactctatagcaaaagcttttcaccgtacaagacattcaaagatgtcagattagagataaacgacagcggggagctcccatttagaatatcaccgatccgcctgaagcacggacacttagagaataaagtacttatattgatctccatggaggaaacaggcagtgtaatgtaaaaatacttacaaacttgttaatctggttagatttgatagacttgctggaattggaccttgaaaagaatttccttggaaccttctacaggttaatgttttgattagatcataaatatatgatgtcaaaagggaaaattatacaaatttatcactcangccatgtgttgcactctctgtaggactagggctgagaatatgatat

SEQ ID NO: 9008 - DNA, 13443 bp, Oryza sativa
caccggctcttctaatatcagaaataatccctttttcacattataaccagatgcttgttgtgccaagtcatttgccctagaattatcacgcctagcaatatgtctaatagcaaaattatcaaaattggcaataatatctaaacatgaatcgaggtacctatttagtgatccgtccaagcatttgtagactccggcgacttgttgcaccaccaattccgaatcaccaaaggcctccacatatttagctccaaccatctccataacttgtaagccgaacaataaagcattgtattcggcttgattatttgtgcaataatattctaaacgaaccgatgcttcataacacatgccattaggtgaaaacaaaactacccctatgccttgaccttctttgcaagaagaaccatcaaaataaatcttccaaggtataacttcaactaatcaaacctctccctcataagcaacatctatatgatggtctactataaaatcacatacaattggccttttatagttttcaatggtccataagccaaatcatattctatcaaagcatatgcccacttgccaatttctcccacttagaattggcctttgcaacatgtgtttaataacatcggcttgacaagtaactatgcatgtactagataacaaataatgcctcaatttgatacaagcgtagtataagcatagacaatagtctctctataaaaacatacctcgtttcggcatccaaaagacggcggctcaaatatgtaatgatatattccttgccatcttcctcttgcatcaaaaaggcaccaatgactttgtcctctgaggcaatatataagcgaaaaggctttccggctttaggcgctcgcacaacgttggagtagataaatacctcttcaactcttcaaacgcttcttgttgttttgccccccaagtaaaatcggcttctttcttcaagcgaagtataggaacaaaagcatcgattttaccctctaggttagaaataaacctcctcaaataattcaccttacctagcaacttttgaacttctttcttacatgtcggtgctttgaaatcacgaattttttctatcttcttatgatcaatctcaactcctctctcatgcaccatgaatcctaagaacttcgccgccgacacaccaaaagcacatttaagtggattcatcttcaaactataccggcgcatcctctcaaaagctaatctcaaatcggctatatgtccttccataccatctgatttgacaacaatatcatcaatatagatctctaagataatacctagcaaatcatggaagatcaaattcattgccctttgatacgttgcaccggtattcttcaacccaaaagtcataacaacccactcaaataagcctacaaatcccggacacctaaaagccgtcttgtacatatcctcctccgccataaagatttgattgtagccggcattaccatctaaaaagctaatcaccttatgacccgaggcatcattaatcatcatgtcggctataggcataggatactcatctttaggagtggctttatttaaatctctaaaatttatgcaaactctaatcttaccactccccttcttctccaccaggactatgctagaaacccactccgcataacgacatggcctaataaaccccgcctttaataaccgatcaatctcctctttgactcggtcatataataaaggattaaaacgacgaggtggttgcttataaggcataaaacccggtttaattggaatccgatgctcaacaagctcacggctaagacccggcatctcatggtactcccatgcaaagctattaacatactccttaagtagctcgattatcttaaccttataatcggctttcatttttttgtttacaaaagttggccttggtttagttccatcacctatgtctacttcctccaatggatcggccgatgcaaacccttgtccaagcttctccacttcatcaaaatcttcaacagtttcaccaatatcgttcttcgtagactgatattcttgcaccctcttttgtaaccactcaaaactagcctctttactcattatacaaatttatatggcttagccgtgctacactagccggctttacagagataggtacaaatctgccatcggagatactaataaaatcatagctagaaagatccctccccgataaacattggatattcccatgacgccactcaaaagtagcatcggccattgcaacctcagccgatgtatccgcttgcacaatttcaacatcatcgccgtcccattggattaaacattgatgcaaggtagaaggcacacaacaattggcatgaatccaacaacgacccaaaataacattgtagttaccttgcacatcgacgatgaagaaagcggttggtagcgtcttgtttcccactgtgagctccgccgaaaagataccccttgcttccgttggttcaccgttgaagccattgagaatcatgttagtcttcttcaactcatcatcctcgcgccccaacttcttgaacaacgagtacggcacctccatccactagcatcctagagaccggcttcccatcaacatggcctttgaggtagagaggcttcatgtgacggtttgattcatcgggcttctcaaaaaccgcgtctttaggacctaatgagaattgagcaacctcggcttcatccatagcacaaaactccataggcaacatacataccatgttgatatccatgtcttcttttggagatgattcacttttatcaaccgattgttctattttcttctctacaatcggttttgccttctctatggatttaggcctccataccggtggtggtcgcaactcattgaaccttttatctctttgctcttcggtccttttctcccttagttcttgggctcgaagacgttgcaaccttctcttttgagtagccgtcaaatccttaggcatctacctaggattcggctctgttctaggaggtaaataatgtcctctattaaccttgcttggagacgatgaagccctcacatcgccctttgcagccctctcatcaaaccggcgctggagctcggtcagaccggctgtagaccaccggtcagaccggccagacgcgtcggtcagaccgacgtgtggcacacggttagaccggcctgaggcgtcggtcagactgtcgtcaggtcggcggtcagaccggcctgatggcccggtcagaccggcaatatggtcgcggtcagaccggccagagggcctggtcagaccggccgactgcgaggagctggtaccggcttcggattttttgcttggggactttccaactccatctccagaaggtataggcacatcatgggaccctattttgatagtaatcacctccgaagtcctttcttccaccttggtgcgctttccttccctcttctcttcattaacccgatttttaccataaaatcggcttttgtttggcgaagacaaacgctcatgaattggcctccgtggtcctccccatccttggttgaattgcattggaggcatatgattgtacattggcggcgttgccccccacggcctgaagtaaggataaggataacccggcggcggcattggataagaaccccatgacatatcttgtggatgaaaatatggaggtgaacgcgatcgtcttggtgaatgaccaaatcgctccctaggaggtgatcttggtcttttccctttgttgtgatccctctcaccaccttgcttctcacacttctccaaaaccatatcaaaggttactttggtcttcctaagagccttagacgttgaagctccacccttattctccttccaaacgccaacctccggcttctttggcaccatcatcttaggccttggctcaccaatgaccacttcctttcccttagtagattcggcttgctccggccgaatcaacacctttttatcattgaaattaattgtattcaccggaaaaggatcatgatcaagcttcatcttggagccatcggtgaatttcaatcgtccttcatctatggccgattgaacctgtcgtcgaaacaaattgcaatcattagtagagtgagaatgagaatcatgccacttacaatatgctcgacgtttcaactcttcttgtgatggtatgacatggcctttaggtaatctaatttgtttctcttgcaaaagataatcaaaaatcttatacttggccacctcaaaactatatttaacttcactttgccgatctttgcgaggagtcggcatcaggttagaacaaacaaaaggcttatttttgttagtccatgaccattcggcaacataaatatcatgatcaccctccttctcactatcactagcctcagggtaatcaattacattaacattaggcttttatcgaatggtctagcaaattttttattatccttaacccggctttcttgagccagagccctttgcatgagttaactaacatcaagaaattgttggccatctagtttttctctaagaggagcaactaaaccattaaaagcaagaccggctaaatctctatcagttatattcaaagtataacatcggtttctaacatctctaaatctcttaatataatcaacaacagattcattatacttttgcttaaccgatgttaaatcacataacctaagctcagtttccccagtatagaaataatcatgaaattgttcttctaattgagcccaagtatgaatagaatttgccggtaaagaagtaaaccatgtaaaagcattaccagataaagataaagaaaacaagcgcaatttaaaagtatcactattagcctcaccacattgcgctaaaaattgacctacatgctcccatgtggtcttaccatcctcaccactaaatttggcaaattcgggaactctataatttctaggaaacggcacattatcataataatcgagatatggctttttgtaagctctagcacgatttctagtttcgatcccgaatccattcctcataatatcgctaatcatatcttccatgttattaggcccttgtggatttggtggtaggtttggtggtctaataggttgggtttgtggcgcaatatgattatattggccttgcctagtatcgggaagatatcccctagaaacatcattataaatgttaggaatatgtgggggaacttgaggattagtggtagcagtagatacaggaggatcaaatgttctaaagtggtacaaataactagcattagtcattggatgtataccctgtattgggacaattgcgccggtctgaccggcccaaggcccggtctgacgggcgtcatgttgcgcggtcggaccggcctgagagccggtctgaccggtgggataatacccggtctgaccggccatctggccagtcggaccgacggctgtatcacggtctgaccggccatcaggcccggtcggaccggtcgtgaacaccattccgctggttttagaccccattggatctataggagattgatcaacagtggtataggctttatcttttaatgtataatcatccataaaagcacctagcctactccttaaaaaccaatcaaccttttccttaaacattacatctaatgtatctttaaaattagccatagataaatctattgtagatgcaatttgttggttgatagattgcgatacctcgtcattacttaccacgtcgcgagcgagcttgggacgtggcccgggcttgatgatcacgccttgacgagtcctagtagttaatctcatcaacgcctcccgtgtgagctcgttgatgtactcctccacagctttacgatcctctccttcgaagtcatccaatatgaccggcatcacattagatggctctacctccgtcttggatgatggcttcgtcatggcgaagtcgaagtcgagttgacgataaacggatctcttccccagcggagtcgccaaaaatcgtgttggcaacttttttaacaagttgacaagcacgatcgtagcaccttaagctttgcggtgatcctagagtcgccaaccacctcgatctagcaaagagctaaacctagatgggttttgataactaaaccggctagcggagccgatttctagatagctacccgtctcgtgggcaaatggaaggttttcaggacaaacctacaaagagatgtcgcactctcgcagcggcggcggacggtttacagcgcaaaccgacaaagatggacaaactaagagaaaactaaaagcaatatgaaaagaacgattcgattgattgattgtaggatggtttttacaatgaaccggccttgtccccttatataggggttggtcttgccctctacaggccctcctccacgtccaactcggggtagaaaccaaaggaaacccgaaacatgccttccggaacaaggaaacctcgaaacccgacgaaacagggtcggactcggacctgctggtcagaccggccacataccgccggtctgaccggccctcaaccggcggtctgaccgcccaacacatggcggtcagaccggcccactcggaggaaaccggtagatttctaaattttggcaatcttttttattttaatcctagatactaaatttgggtgtaaacagtatggttcatttgttgagtcctgtatttacacggacatatacgtgcttgatcgaactaatcacgaatttgtgatgtggcagcacgataaatttcctcgatcaaaactcattaggggggtcaggactcaggaggcaggccccgaccacgcagacgtgcgcgcgtcggaaatcccatcgtcttcctttccgattcctctcttcctcccacgtggacgcacacgttttagagccaaaccgagcgaaacaatggtttcggctaaaaattagcgcgtgcaagcgaacgcgaagcggggcgctacgctaaagcggaataggataatactagaaaataaccgctgctttgccgcgcgttagtatatataggccagctcaattggatgaacccagtacactgttaattatgaagctaggtaaatacgaattgatcataactaaatctgtatatccaaaacaaagggctacataatcacaaaattttacattcaacttacccaataatgcatagtggcttaggaatggtttcgattataagtagtccaacatttttcattgaacaccctaaaaattagaatcagaaatagatataaatggtttgtacactttgaaaaattgaccatatcaaattttagtaatgtcgaattttgacatattttggtattatcgaattttggtaacattggctttgtttggtttgatgcctttactacattttgatgcctttaagagagaacttctggaactgccaaaattgagtaacattgtaatagttgaagtgtgtttactaccaaaatttggcaatgctaaaattcggtaagattgaaagtggcaacaaacttaaacattccccaaatcatccttccatagtcttttccaattccctactttcctattcaagaaaatcagcgtgcctgttggaaaaccaacttatagctagtacatatttacttatttaaaatagttattgttgttgctgttaagagtttcgaatgcaatatttttttttgaaaaaatatatacacttgttcatttagaagaaactatttaatgacttttgaaaaggttgaggaacaattaacctgtagtaaccatattcatgtaaagattttaagctttgttaaagcattactacggaaaacaaaattaaaaaaactttattttcttttatttgtaatacttgtctatttactttcaaaccttttcttgtgctaattaatctattagtgccacatacttacctctatggtcagtatatgatattccctccatctatatttatctcacaatatagagattgtcaggctgattagctaatcataggtaaaatagaatacaattagagcaatattggccctgtctggatcataggtatgttaatctatggttaacggatgattactgtagcatcactataacaaatcatcatagattaatatacctcgttagattcgtctcgcaaaatagtctacaggttatggaatgggttttgtcagtaatgtacgtttaatacttctaaatagcaagattccggaggactatttaatagcccttcggatccaaacagggccattgtcaacaattagagtaaatatggttagtttatgcatggctaattcttatgtgtcgtatttagttaactgtatttgtctggtgaataattatatttcaactttttaaaaaagatttgtaacggatagttaactactttaagtgtatctgtatgcctttaacaaatactactttggaagatatttcttttaaattagtaggatttacaaaatttatcaaattacgtgaaaattacaaaatttagattgcatattttttaaataaataactcctatcatccactcaatatagagtcataataatatgttactctttgtacatcagaccaaacaagtcttgaaaagtcaaaacttctaaggtcctaaacataaatactccctccgtccttaaaaaaaccttaggtttccgtatccaacgtttgactatccatcttatatgaaatttttttataattagtatttttattattgttagatgataaaacatgattaatactttatgcgtgacttatcttttcaattttttcattattttttaaataagacggacggtccaacattggacacagaaatccaaggtttatctttttttaagtacatgagtactaacctaggggtattttttttaaatattttgtactccctccatctacttttgatagacatatttccaaatcttaaaatctatttttgataggcatatttcaatccacaacctatcatcttaatgactttctcaaatttaatgtgtgactctccattcttctacataagattggctacataggcatcgagaaatgtaaatattaatgaatcgtttgtttacgaggaataactagtagtatgtttaaatggatgataagtataattatttatccttggtctgtgtgccaagatgaaatatgactatcaaaagtagatgatggagggagtatttagtaaagtataggataaaaaatactattaggggtgaaatggaaatttttttaggagttgatggcacgggtaagttagcaggtggccattgggaattgggagcagtgacgtgctccatcctccatgcatgcaaatgccccgtcgttccacctatgcttttttttttgagagcccacctctgctttcaatcccagttcactcttattctctcgtactgcacctactgcgctactattgttgtggcttgtgctttccagcatggatttgggctgagaaagaactgatggatgaggccgcttgcaaatgcaagaggtaactggcttctttggtcactgggttcaaggcttcttcaagctggccagctctgcatgcatcacggaggcagcggaggtggcgtacgtggtcgaacggcagcgggttaagaggagccatcgggctgaccgccggccgtcctgccaccaccagctccgttgtctccgcctccgatctccggcgacgagcggagaggtcgcggtggtggcggaaggggctagggggcggtgcgaccggccgtggtggcggaagcggcaaaggaggctatcgaggagacgacgcgagcggttgatcgcagaggcggtacgtaaaggaggccggcgacaagcagagcggcgttgagccgaccgagctgatccccgcggatgtagcgacggcgtggacctccgccgccgtccctactcgtctatatcaaggccccgcgcgggcgggccgtcgagctccaggaccagcgcggaggtatcccctatggcgctctctatctcagccggctccctccagtgtcgtctacaactccgtcgtcggatcaaggcagggcggggccaaggagctccaggtcaatcgagctcgagctcatcgtccccgtttttgccatcaacgcgacggcatggtgactaggaaaggggaatatattgttcttgccggatttttttttctgattacgttttttttttttcatatactccggactgttctagataagattgtgcattttgttaaaaacccttcttaaacttgcaatttatatttaggtccgctaggccttttctcaccgttcgtatgtaatcggacggctatgggacggttcgaatgcgtggcatgttctccagccgagaatctggtcggtgagctatgcgtgatgccacgtgggccaatcaatagcaagggttctaaccctgcaatcggtattaaagatgacgtacgatagtttgtttaaaaacatcattaatttttataatagtagagataaaaagggataattgctcatttgatcctgttctaaagcataactactaatttgactctactttttaaagtttgctcatttttcaaaattagagttgccatctgaccctggtttcatcacactgttagtgatggcggtggctcgacgaggcggaggagcggcagcagctcgacaaggcggaggagcggcggcggtggctcaacgaggaggaggagtagtggcggctcgatgatgcgggggagtgggaggaatggcggtggctcgacgaggaagaggagcggcggtggcggctcgacgacgaggaggaggggggcgacgacggcagggtggatctggcgaaggctcggcgacgaggcgatggatctggtgttgccgaggcacgcacgcggcgcatctggcggcgtcgaaaagtgtgtgcgatggatttggctccggcgggtcggcgaaggcggtgcggcggtggtgaggttctgcggggagggaggagcaccagcgacggcggtgcacggtgagacgacgattgctcgcgaagggtcggagcaacggagccggtgagtagagggaggagtggtggcggcggctgctttgcacagatgggtttgggagttcgccgtcggcggcacgggtgttctgctgcttgacatgtttttttcttttttctttttgtttttggtagccataaatttgtgccatatatttgtgtttgtggcaatttaatatatgctaataagtgcacacaactgcattgaataaaaaactttgagataccgggttaaattcaaaagggtatagatggaacttccgtcttgagttaataccgtcatattgccttcacggaatagggtcaagtctcatattcgtttataaaaaagagggtcaaatgagaaaactcgaaaaagtatggccaaattagtagttagtcttaaaaaaaagataaaaacgcaattgccccatataaaaattaggagtaaagtatacgggcggtccttaaacttgtaggggtgtgtcatctaggtccctaaactcttaaaatgtatatccaagtcccagaacttgtcatagtgtgtcatttaggtcccaaatcgccacaaccccatcaggatcctacgtggcattgatgtggcttgccacgcgaacatgacgtggtattattttgactgacaaataggacccatttaaattttttcttttttcttttcccccctttattctcctttctctatgacctgagcagaagaaaggaaagaagaatgagaagaaaacagaaaagaaaaataaaaataaaagaagaaaatgacacgtcatgtccacgtggcatgctatatcagcgccacataggatcctagaggggatgtgtcgattcgggacctagatgatacactttgataagttctaggacctgaatatgcattttgagagtttagggaactatatgacacaaccctataagattagagaaccaccagtgcactttactcaaaaagtagtaaatgtattttctatacatcacatcccgggattactttctacgtatttcgtttagtctgtcctttcctaatgtatctgatcgatagagtaattagctaagctaagctcacttgatggcgctagcaagcaaggcaacagcaaaagaagaggagctcgaagggctagcggcggttgactttgaggccgcctcgcaccgatccgcggatcgctcctcccccaaatcccaatcgcgctccctcgcccgtcgcccgtcgccgcgccttcctctaccccgtaccaccgccgaaaccctagaccctcgtcgcatccgtcctcggcggctagatcggcgcacgcattcatctccggcccggctgacgcttcttccctggctcgattcgcgacccagttgggccgatttggatcagcagcggcccggccctcttcttagcccaattccaacaaacccccactcgccgccagcctcgtcggccgccagcggcggagctctcccccctccggatactctttcgagctttcttggtaagccccccttcgtcggagcggtgattcctctgcatttcccccgtcttcttttttttccccgggatgcgattgggatccgaataatctctcccgcgggatctatctcggccgattggtgaggcgtttgtagctgctagggctccgtggttcggccgcccgcctctgtcggtggcgacatgtggggggttctttgtccaaaaccctcgttcgggcgctgtccagatgcttcgtttctttttcttttgtcattttcggtctcggtgctcgctcctcgctgatggttaatgtggctgttgattgtttcgcccgctgcttaatttgctgaagcaagtagcaacacataaggatagttcaatgtagaccgttcaatcctttttgcgcgaatcgtcagcttgtatccgttcttgcagtgcaggagcacgttttgtttcgtctgacggctgttcttgaaaatcagcgttagcgtttagcaatgtgctggatatcatgcatgatccctttcttttctttttgggttataatttttttccttttgatgtatatatatattgagtattgcatctttgtataagctaatgtccttctttttttttactaacgtggcaattccatctggtcaggtgaatacaatcttgtttctagtcatggcgaagcaggcctacgcgacgagcagcctcgtgataggatatgcactctgctcgagcttgctcgcgatcatcaacaagtatgccatcaccaagttcagctaccctggcctcctcactgccctgcagtacttgacatcagtggctggtgtctggaccctcggaaagctcggactcctctaccatgatcccttcaacctccagaccgcaaagaagtttgcgccggctgcacttgtgttcccccttgccatcttcaccaacacccatctcctgaagcatgccaatgtggataccttcatagtgttcagatcgttgaccccgcttttggtcgccatcgctgataccggcttcaggaagcagccatgtccttccaagctcacatttgtgtcccttg

SEQ ID NO: 9009 - DNA, 9044 bp, Oryza sativa
cagcaacatcgtcgatacagatgccttatatcaaactgaccaaaagtaaagagcaggaaaagaaatacttacagtaaggttaaccctgcaagcttagaaaagttaactgttccaagattatcagatatcttgcagttcctcagtattctgtaataaaagtatctaacttagtaacttgccactttgtgaagactaagcaattatgaactctatagcaaaagcttttcaccgtacaagacattcaaagatgtcagattagagataaacgacagcgaggagctcccatttagaatatcaccgatccgcctgaagcacggacacttagagaataaagtacttatattgatctccatggaggaaacaggcagtgtaatgtaaaaatacttacaaacttgttaatctggttagatttgatagacttgctggaattggaccttgaaaagaatttccttggaaccttctacaggttaatgttttgattagatcataaatatatgatgtcaaaaggtaaaattatacaaatttatcactcaggcaatgtgttgcactcctgttaggactagggctgagaatatgatatgttcttgtcctaatgtaagggcaagaaatgaaggagaagcattttgtgctacagttccattgattttctgttataataaatcaggataaatatttaaatggagcaagaggttgataattaatcttacaaatcttgtaaatttggaaagctcccaaaataatcaggtatttttcctgttaaatcattatctgatgcccacctgcaggcaaaatagaatctgttacttcgagcatatggaaccaaaatgaaaataacatttgtgacactccaatagcttacagaatcttcaaattcttaagctttgagaatgttgaagggaagggaccactgaagccagaactaataatatacctataaaaggaagactgcagtaattaaaaacaactttagatgggcctcatcaaaattttagttaacaggagtctaaatttggaagctcaaaatggacaatgggattacatttgctcgagtttttccaaattgcccagttctgcagggagttcaccagtaaaattgtttgaactaatgcccctgaaatcccaaagaaacatgttgactacgattttgtttatgtacagacagaaaatagcataaattcgcctctgtaagaattaagcatgttacaaaacactgcttaagaatctacaattttgttattttggatagcagataagaactatttattactgtttggatctgatgcaagcataagaaactcatgtagaaatgataaatttttataaaattcttaataagttacagttacacatttgtgtctcctgtgtaactaatttacttcagatagtccgtagtataaacttcaactccgagtagaaaaaatagtctgtaatgtaaacttcaactctgaagaaatttaactaagatatctcttacaatgatagaagatttctaagattcccgatctccttcggaagaggtccagataacggattgagggacaccgccctagtaatttttttttcaacattatgcgattactgattagagaaacagaaagtaacaactgatgaatgctaagagaaaataaaactaaagcagtgatcgaaatcagattcttacaagtactgcatggcagaaaagtttccaataaaggatggcaggggacccgtcaagtaatttcgccgaagatcccttcagtaatatcaaaaccatcaagctaaacataaacacttcataatcaggctcctgtaccctgattattcttgctagtttttctagatgaggaagatgatagttcttcgctagttattaggatttttttactgaacgcttgagtaacacaatggagaacagggtatggtgataggtattctgcaagctttattttcaaacttctcaaaatatttatgtgtattgtcctcgtaaaacatatatatggtatttgttccatacttatttaatactatcaagattgtggtataggattatagcttctgctatataatgtatttcccaatatctgctatattgaagccaaatcacagtcaacagacagaacaattatatataatctacccccacaaagatcacaccttaagaatttttccaagaatgtgtgaatgacatgtgcacccatcttgtcggcgcatacaactgattctttcttccagatttagcactttgaagtgatatatccttttagcataattttaccatgagaagttggactcaaaagattattcataaattggataaaaggaccctcaagagctgaagagcatctcaattgccattcctcagtcgatgttctctacatcctactagctagctctcagaaaaagtagtgctttactgctttatcttcaaaacagagaagagaaagtttagaggccatacaagttattcagataagagagattctgcagctcctcaggtatttgaccaacaacgttcaacgagaacactctcctgaatagacacacaaaaacctgttagctagagctccttggatcctaaagatcgtgatttcagggaaaaaaacaaaccaaacataggagtttgcagagacggattggaaggaactaatatcaaacaatttcattttcatgtgtgcaagcctaatcctcagcaacaccatggtcactcatggcctcttgtaggcattatatcgaacacctggtgtgcagctggatcagcgcaggttgagaggatacgtacagtctgatgatgtggcagacggtgccggcgttgaaggagcagtcgcacttgatggccgggttgatgttggggttgttgtcgacgccggtctcgtcgatggcgacgccgctgcagggctcgccgctgatgttccacgccggcgacgcccgcaggccccatctccccaggatcgtgttcagtgcagccactggagagacacatacgcaattcagtttaagcaaatgtagctcgaaaaccttttctttgttttccgctaaacaagataccaaggcagatgctcgtatacatatgcacgctcaagccatataaccacacgctctacttctgtaaacacctactccctccgttttccgttttagattataattcgttttgactttggtcaaaatcaaactattttaagtttaatcaagtttgattttggtcaaaaccaaactactttaagtttaatcaagtttacttacaacactaaaatagtttcattaaatctacaattaaatatattttcataatatacttatcttatgttgaaaatgttactacgtttttctacaaacttgatcaaacttgagcagtttaactttgatcaaagtcaaaacgacatataatctaaaacggagggagtacttaacattaccggctcgctatcttaccgttctagttaaatttctacttatttttatattgaaatatatgagtcgagtccatttccttaattaagtgggacaaacacaactcattgtggtacttcatgtgtcatttgaaggaggagagaattgtggattgaattaggtgtctaattagttagactcaaaaggcacatatatggtagaagatatgagaaaattatctaatacttattttatattaaaatagtcccactcaagtccatttcaattgtctaaataaaacatttatttaattaagtgggacaaatacatctcaccttttcctaccctatgggccctaggttgccaattgaaaaaaaaataagtcggaaatcaaggaaggaattggtgtccatggttttaagaagaaagaagcaaatatttcaggtgagcatgctcgagcaaaatcgaactcaggcggatggggtgcatgccagcaacccatctctaagctgccaattgggtttgacttcaagctgctcaccattaattcttccaatagccttcctttaatatcaaagtccgtcctttaatattcagcgtctagatagactttaaccttctgatgcgtcataattgatccctgtttactgaaaatgttgccagttaaatttctgacttgtatttcacttacgttgtctacaggcctaactttttattttgaaagcataggagctaagttattatctgaattttaggatttgcttctgtcattaacctgttgttcagtgaactaaacaacctgggtactaaccggatgctgttttatttcggatttgagtattatagattgaatttgaagctagctcttcaaaattagtgaatgaaaccggagaacaaattaagcgacaagacacagtttgcacgcaattaactaagctctgctaattactagtaatcctgccagtttctgaattaacaccctctagctaccacttgcagagttgcaggtagaacaagatcaatagagatatgtaatttgcaaaactgaattcacataccttctgctggatcagttctcgctgcttgctgagcttgaacagctgcacaggacgcataaacgagcatcagccacaagaagccatggacgctgctgctgctgcaactcatctctctcttaatttctctctcagctaattaaccaaagcaaaagcagcaggtttggtttggtttgttttgaaatatagtgatgaattgtccgaggtgttgtgtatatatgtaccagcagcaacgggagcttcaaggcgaaaagttaattaatcctaattatgacaatatgaaaaggccaagagaaacctcagttgctaattagtaagatattatttctgtttccaagatagcgagaggagtggagcattaaggtttcaataatgtttacgacattgactaattcatggcatcaacgtactattgatggtacacaactggaagagatcggacatgtcaactgcgacttgtacgtatgaaagccccctttttttggaataatcatccactattacctgctacctccacgctgatctcaatgtctcaaaaactaactatagtcaaaagatcatagtgaggacatgagaattaaagttggaggacttttttttatgcttactattcgtaagttgaaattagcgaaatgcaatcttttgtgggcttgtctggacatccaaaatcgcctacgaatagcagatttaaatacaacattacttaatacatacggttgaaaacggtcggaaacggcttggaaaaaagtcccaaccatttccgtaaccatatttttctaagaagagcaatttcaccgtccaacatttggtatctcaaggtactacaaatttttttgtacctctaagtactttctagtgcaaaatttagtactttgaggtaccaaatgttggatatagtaaaattgctcttctaagaaaaaaaatggaaaatggtaaagccgtaaatgaaaacgatgttagaaatatcagaaaaccggaaacataactatatagatggaaacatattggtatcgttcgaaaaaattgaactgtagaatcacacacacttaactttgcataactttctaaatataatgaaataaattttaagtttgtaataaattacaaatggtcgtccatttaagcttatacttgagttaaaaatttggttgagtagtcgatgagcttctaaactacgggtcaaataaagaaatgaatcagtcaatgagcttataaactatgggtcaaataaagaaatgaatcataaatattgatgtataaaaagtagctacttttaagaacattgatgcatttagaaatatagtaattaccataatataaaaaatagtaattcgtaagaattcggcaaaattcagaaatagttggtattttaataatttttaccattttcatttttgtttttgttggtaaccattaatccatattgctcagttggtaaaagtagagacgagggtcgattagtcaagaattttcgtggacgttttcacccctatatgtacataacctatgggaaaaaaaaggaccctatcaagttcactgaactattattgagtttcctttcggaggcttaaaagagtttaaggatcaaatctccatacagcctttaattatttcacctcatcccttcttgtggcaagcatatgtgcctatgaacccatgaagttgtcctccagccaacaaatttcatggacagtttttactattttgctgcagaatgtgctcataaacatgcgaatacgttgattaatttctaagatatatactaggatactactctatttgacctgttacaaattacaaggagtaaatacttttatcatcatacatacttcagaataattaagttccactattagctccgtcttacatttacatacaatcatttcaaaccaagatcacctgcaggttgcagcattcaccttccatcatgactagatccggtgattgttggcgacatggtgagagggtcgatctccttctgcctgctgaactctgaggtggtagattctgagttggtgctgtttccatctctatattgccactcagtgatgtagctcggtttcgtcaccatctcaactacctcagcatctccagtgagcactgccatgaccctcgacattggcggtcgctgatttggtgagccctgtgtgcagaggagcgcaacatgaatgactctgagaacttcatctttattgaaatcctcaagtcttggatcaacgattctttgtgcttgctccttttcgtacaggtcccaggcctgtaaattaacataggtatagcttcaataatcaaaacatcatatacatgaatagattagtgtgttgtttgaggatggagcattgatcaacttacccactctaaaagatagatcttgctttcctcgatggagttattagtgttcgatcgaccagcgacagtctctaatgcgaccaccccgaatgcataaacatcaaccttttcagtcaaatgacgtctcattgcatactcaggagccagataaccacttgacaaaaggttagacaagttttagttagctttcattttagaggacaaccacaagagaaatggtgaaatgtgcttacaatgtgcccgcaatccccgtgctgacatgagtcttcttctcatcatagagcctagcgagtccaaagtctgatatctttggggtgaggtcggtgtcaagtaggacattgctggccttgatgtccctatgcacaatgcgcacacttgactcctcatgaagataagttagtcctcttgcgattcctaaaatgatctcgaagcgagttgcccagtccagttttaagctattcttccctgtacaagcagaaatgactttaaggtcttgagaattcaaatgatgaaaaaatgaagagaagaaatttcccaaaatataaaatacaattttgcactgttggttatgagcagacttgaactcactgaagagtgcttgatctaggcttccattttcaaggtactcataaactaacaaaggtgtattactgtcaatgcaacaaccatgcaatttgacaagattccggtgttgcacagaagaaattgttgcaacctctgtcacaaactggtttttcccctgatgggatgattgagaaagttgttttacagctataactcttccatcaggtagcataccctgccaaaggaagaactttacttacgttacatttatattttgagggtagaccaacaagtttgcaagaaatctatatttaatacagatcagataattattcaattgcaatttcacagtattaaattagggaaaatagacaaccttatagactggtccatatccaccttccccaagaatgttttgggaactgtaattatttgtagctaacttgagttcagcattactgaagacatcaggccgtccaactaggttgtacagttctgtagacaccagcgcacaccagaaagaataaatcatttgaaaattttgttgtctgaattcctgtataataaaaatatttacctccttgctgttgtgcaagtcttcttctcttctttatgaacataaatattccaaatagggctgctaatcctacaactgaggcaccaatcgatattccagcaattgcacctactttacttttccttttgggtacaccgtttcgcacagtaggagtaaaatctgaaacagagatttcatttactagaaggcaatataatccttcttgaggttaccttaatgattaggcttacttggagtgatgcttaatgctgagatcaatggcccgtagtaaccttgaataggaatgcaacaagtgccctttccagcccagaacagatggatttcgaggaagtttttcgacacagttgccgtgtaactcttgtaaacagcagtgaaagattttccaccagccatcttccttatatcgaagtccttttcttttaggtcaccctataaaaatgtcaataatacaatcagataaagaagaaaaggatccagtaaatatttttttctgtttttgcttttagtaaacactagcatattgcccgtgcattgtaacggtatttttaattaaagaaaattatcattaacccgttattatcatctcttaattgctgtacaaatctgttactgacatgtggaccctttggccccacgttgtccttttttcattcccgcaaaaattagagagttgttaggagtattttattcttttttctcttcaagaaaagttaggaattggttgtggggtggtagcagaaccaccaccaccactagtcccttttataaggagaatagaaattaccatacaatgcactcaatttgtacctggatatatatgtcaaaaactctccttcctaagcttttccaagttggtgagtctggataacctaactctgcaaattgaagcagaacagtgtaatttccattctcaagtccaaggccaaagtatctcagagacgatggtgacatccttgcagtttggagtagttctgaaaccactgcattctgaatcttctcattgctatatatgatcttactgtcatttggagactggaaatattttcctacattgctaacaccccatcttgtttcactggtaacgtaatatgatgagctgccaaggtctgtgaaatccaattcatacatag

SEQ ID NO: 9010 - DNA, 36905 bp, Oryza sativa
ttcttttataagaaggcctgaacctgtataaatcctttgtctccaaacccatacacttttctagcttgatagccacccccttttattattgccgaaatctagtttcgacagttggcgcgccaggtaggggttgcgtcaagcttttcgccgatcagtgcaatgggttccgtctccggcatcgacgacctcgtcttcccacccgggcagacgtttcggttcggcagcctcgacttcatcaccaacaacttcggcaagatttctctcctcgactcggaatcaaaccagtcgggagagaaccggatttcggtcccgtttggattcccgaacgcggctgaaagctacttcaagaccatcttaaccgagtcggcttcaaaccactcggccgagattgcatctcctccgacggagccagatcaagatgatggggcttacccaccagtcctgatgaagctccccgacgatttagcggccgtcttcaccacgacaacgtcttcatcccgtaggcctaggcggaagtcggcttcaacaccgatttcgcctagcttcagggaagtcggcgtcatcctccaaccactcggcacggtttcgacggatcagctggatgactacaacagctctcccaccgtcgactcgcgccccaccgacatcgtggagtacgatgagtttagctctcgctaccacgacccggatctcgacgacttcgacggaagcctagatgacaactacacccctctctactttggcgttttcatggccaataacgagacggaggagcaacgccaagcccgggagaccgaagagcgtcgccgactggaggaggagcaccaagcacaagaacaagaacggctacggcgcgagcagcaggaccgtgaacggatcgcgaaggaggctgaagatcgacgtcagcgagctttggaagcagggcgccgagcgcgtgatctcatcggccagcaagatgtcgaagggacaccggttttccgcacccctcaacagaatgcggttgccgcgatcacccttctcgacaccctcctcaaccaaaacgagctcaatcgatccgaccacgtcgtcaacatcctgaaccagacaaagaccatgattgcggcgacggtcccagttaactccgaaagcgtccacacgccgactggcagccgggtcccccacttccgatctcatgactaccgtcatccaagcctcagcatcaccggagcaggatccaatcgcaggagcaggggccacgacgagcggtctgttcactcgcctcccgaacttcatagggagcgccgagtggaacggcctcgctcaccacctcgtcgccggcccatcgatcttcgcgacacaatcacacagcgccgagcagctcgaggctaccatcactcgccggatcgccgcgacgacgaccttgacgagttgcagccttcaccgacgacctgcgtcgagtggattggccagccggcttcaaaccgactggaatagagaagtacgacggtaccactaatccagaatcgtggcttaccgtctacggtctcgcaatccgcgcagcaggaggagataacaaggccatggcgaactatttaccggtggctttagcagattccgcccgatcttggctccatggattgccccgtggtacaattggatcttgggccgaactacgcgaccacttcatcgccaacttccaaggcaccttcgagcgtcccggcacacaatatgatctttacaacgtcattcagaagtccggagaatctcttcgagattacatccggcgattttctgaacaacgtaacaagatctccgacatcaccgacgacgtcatcatcgccgcattcaccaaagggattcgccacgaagaattggtcggcaaattcgggcgcaaacctcccagaacagtcaagctcatgtttgaaaaagccaacgagtacgccaaagccgaagacgccgtcaccgcatcgaagcagtcgggtcccagttggaagccgaaaaatacgccggctacgggaggaggtggaagtaacaatcataaggaccgcaagcgtaagcctgaggaacttgttgcaaccgccgctcactcttctcgacagcgttcgcgcgtcaacaccttcgacaagatcatgaactcccaatgcccgcatcatccaaactccaaccacgtggccaaagagtgcttcatctacaaacagttcgcggagcagtacaccaagtctactcggaagaactccgacgaagaacaaagcacgtcaaggaagaaggatgacggcgacaccccggctggatttcaagaccaccccaaggagcttaaccatatcttcggcggccccctggcttacgaatctaaacggaagcagaagttgactgaacgggagatcaatgctgttcaacctgacacgccccagtatcttcgatggtcagaaatcgcaatcaagtttgaccgctcggatcatcctgaccgagtggtccacccggggcggtaccccctggtactagacccagtggtccgtaatgtcaagcttcgcagaaccctcattgatggcggcagtgcactcaatatcctcttcgccaagactttggatgatatgcagatccctcgctccgagttaaaaccaagcaatgcgccttttcatggagtaattccaggattatccgcaactccactcggccagattactcttccggtcacttttggcactcgggaaaacttccgcacagagaatatcagctttgaagttgccgatttcgagacagcataccacgccatactcggacgcccggcgttagccaagttcatggctgtcccgcactacacttacatgatgatgaagatgcctggtccccgaggagtcctatccctacggagcgacatcaagcaagccgtcacatgcgacaaggagagttgcgacatggcccaaactcgcgagatggcgctagcccgagaggaaatccgactggctgcaaccacggtgagcgaaggaggagtgcccgctgccaagatttcaaaaagtggggaaaccgaagcccagactaaaaagattcccttagatccttctgatcctaccaaaactgctgtaataggcgccgagttagattgtaaataggaaagcgcgctcatcacctttcttcaaaataataaagatatctttgcgtggaaaccttcggatatgcccggtattcccagagaggtgattgagcactccttacatgtcaaagaagacgccaagcctattaaacaacgactccgccgatttgcacaagacaggaaggacgcgatcaaggaggaattgaccaagctgttagcagcaggcttcatcaaagaagttcttcatcccgactggctggcaaacccggttctggttcggaagaaaacagggcaatggcgcatgtgcgttgattacactgacctcaacaagtcttgccctaaagatcccttcgggttgcctcgcattgaccaggtagttgactcaaccgccggctgcgagcttctcagttttctggattgctactcggggtatcatcagatccgactgaaggaatccgactgcttgaagacttcattcatcacgccctttggggcatactgctacgtcaccatgccgttcggactaaaaaacgcaggggcaacttatcaacgcatgattcagagatgcttctcaacacagatcggccgcaacgttgaagcctacgtggatgatgtagtcgtcaagaccaagcaaaaggatgatctgatctcggatctacaagaaacctttgcgagcatccgtgctttcaggatgaaattaaaccctgaaaagtgcaccttcggagtaccgtcagggaagctgcttggcttcatggtgtctcataggggcatccaagccaacccggagaaagttactgctatcctcaacatgaaaccgccaagcacccagaaagatgttcagaagctgactggatgcatggcggcgctcagccgattcgtttcaagacttggcgagcgggggatgcccttcttcaagctactgaagaagacagataatttccaatggggacctgaagcacagaaggccttcgaagatttcaaacaactcctcaccaagccaccggtcttagcctcaccacatccgcaggagccgttgttgctgtatgtatcagccacctcccaggtcgtgagcacagtcttggttgtcgagcgtgaggaagaaggccatgtccagaaagttcagcgaccaatctacttcgtcagcgaggtcctggccgactccaaaacgaggtaccctcaggttcagaagctgttatatggtattttaattactaccaggaagctgtctcattactttcaaggtcactcggtaacggtggtcacatcattcccactcggcgatgtactacacaaccgcgaagcaaatgggcggattgctaagtgggctttggagttgatgtctttggacatatcattcaagccccgcacttcaatcaagtctcaagcgttagccgattttgtcgccgagtggaccgagtgccaagaggatacccccgtggagaaaatagagcactggaccatgcattttgacgggtcaaaaagactttcaggcactggagctggagtggttttaatttccccgactggagaaagattaagttatgtgctttggatacatttttcggcgtcccacaacgtcgccgagtatgaggcgctccttcatgggctacggattgcaatttccctagggataaagcgtctaatcgttcgaggtgattcacagctggttgtcaaccaagttatgaaagagtggtcttgcattgacgacaacatgatggcatatcgacaagaggtacgcaaactggaggataagttcgatggacttgagctcagccatgttcttcgacacaacaatgaagctgccgatagacttgcgaactttggatccaagcgcgaggcggcgccctctgatgtttttgtcgaacacctttatacgccgacggtacctcacaaagatgccactcaaattacgggcacccatgatgtcgctatggttgaagccgactggcgagagcccttcatacgatttttaacttctcaagagctccctcaagataaagatgaagccgagcggatttcaaggcggagcaaactttatgttatgcatgaatctgagttatacaagaaaagcccttcaggaattctgcaacgctgcgtatctttagaggaagggagacaattgctgaaagacatacattctgggatatgcggaaaccatgctgctgcgcgcaccattgtcggcaaagcttaccggcagggttttttctggcctactgcagtgtccgacgccgacaaaattgtgcgcacatgtgaaggttgccaatttttcgccagacaaattcacttaccagctcaagagttgcaaactatcccgctgtcttggccgtttgcggtttgggggctcgacatggttggcccgtttaaaaaggcagtcggcggttacacgcacctcttcgtggccatcgacaaattttccaagtggatcgaagctaagcctgttgtcacgattacagcagataatgctcgagacttcttcatcaacattgtgcatagatttggagtgcccaatcggataatcactgataatggcacacaattcaccggcggagttttcaaagacttttgtgaagatttcggaataaagatttgttatgcctcagtagcgcacccaatgagcaatggacaggtggagagggccaacggcatgatacttcaagggattaaagctcgagtttttgaccggcttaaaccctatgccggcaaatgggtgtcacagttaccatcagtactttggtctttgcgtactacgcccagtcgggccacaggccagtcaccttttttccttgtctacggggcagaagcaatgttgccgagtgaagtcgagttcgaatctttgcgcttccgtaatttccgtgaagaacgctatgaagaagaccgagtggacgacttgcaccgactggaagaagtccgcgaagcagctttgattcagtcagctcggtacttgcaagggttgcgacgttatcataatcgcaatgttcgatctcgtgcctgtctagtcggcgacctggttttacggaaaattcaaaccacacgagatcggcacaagttatctcctctatgggaagggccatttattatctctgaagttacccggccaggttcatatcgactcaagcgcgaagacggcactctcgtcgacaactcttggaacattgaacatcttcgtcgtttctacgcttaactttatcattgtatttccctattttgactgtcaacatcaagttttcttcttgccgttgtcagtcgggggctattatcataataatggagtgtgattttttttatcaattcagtttgcttacttggtttatcattgccttgtttggtttttctacttagtttgagaggactgaaagtttttaatagcttctttgggttttaggctcaacaaagcttagcaaaaacttttaagaaatcaaaaactttgcaagaatcatcaagcacagcataaatacaccagtattgtacaaattgagcctccatgtattacatccaaactcagtcagagtcagtcctttcatcatcagagtcatcattactcggctggaggtcgttgttgcgaaattgctccacaacatcactcgctattttgtcagccgcagtttgcgcactactgataagatcaagggcagcttcttcacttgtcccgtctgcaaatccatcaatggtgtcgacttcaattctcgggtacaaagattttgtcatcgccaaggccatgccagctcccatacttccagctttcttgatatttttgaaatatacttccggagcaacactcagcttgtcaaatatttcggttgcgtcgagtgcactcggaccaccgttattgaggaacatggcttggataattggtgcagcggcattggcgacatcatcccttgctccttcaagcctcttgatcttaccaaccaggacgtcaaactgagcttgagatttgatcttgcgatctacaaaacacatttatgatgagcatctgttgcattataaggagagaagctcagattgttggctggcgttaccttcgacttccttcaaggctgagtccctttgcgcagccagttctgtcttatctctctccagggcttcaatttgctttgccatctgttccatcctggcggcttgcgctgttttgaaattcagatggttgaggatatagttatgccagtttaaactgatgaaactgatctagagattaccttttgatgaaccactcagctcataatttgactcttggagctgagcaattcggtcccttaattctttctccgtcttcttggcaagctccttggtctcatgcagctggtccctaactgcttctagagttcccaaatgaggaaccagcttttccaaagttgtggtcttggcctcattgcgaagatggattctctgcatgatggatcatggttcagttctgctaaaaagaaaacaaagttactgaaggctgtcgctcggaagacttacatttacaatacgagtggcctctccaagcgctttcttcagctggcacacttcttcatcttctttctgacggtttatgactataccggcggcttgtgagttctcgtcccaccatttgatcaaaataggaggacgagagtcgtcggttgcctttatgcgagggatttcttctccgtcatcacctgacggtcctgatgtgtttccaagacattagacggatacactgaggttatttaaatcgccattatttgagaagacaactaacctgaagatgtacctagctgagcgtgaggtgatctttgttctttacctgaagacccagctatcgagtcgttaccagcctctggtccttgtgaagccgtcgtctgcgctcctacttcggggatctcctgatcagggcctgcgtccgactggtttccagtcgggggctcttgagttgttgccgtttcagttgttgccgactggtttccagtcggcggcaggtcactcggattggccctatctcccgaagcatgggcgccagtcggctggctttcagcagtcggctggttttcagtagtcagctcggggtccttggatatattctgctctgtcatggcaggatcggggtcttttccagatggatctatatcagatggtttcctgcaaagtattctttcagaatttagcatcattttcatgagagagcttaccaaagtgaaatcataccgagaggtcttatacctggaagatgttctaatttttggcattgcgcggccggccaattttttcctgggcatggtgcgctttgggggtttgttaggcgagcccttatccccagatttatcatcgtcgccttcatcatcatcaagcaccagtttcctcttgcgaggacccgtctgaccagttgatttggaggtctgaggttgcggatccggtctgatcgttggccctccacctccctgagcagtgtgttggcgaggagaccggcgctgagtgactggtggatctgacttcatcagtgcatattcctgaaccagatgcttccatagttagtcaactcagcatgaagacaaaattatgttctgatcatggtttgaggattttcgatacatacctgtggaggcggattgaacgcattatatggcacgactggcagctggtgtgagtagctgacgacgattgcatttgagaagattttatacatcctctccttcatgattctgaaatccagagagtctgattcttcacggttaggatcatacctgccgtcgaactcgaatgccgtgcgagatctctccttgattggcgctagtcggcatttgatgaagtgccgagtaatctgctctccttgcaagccttgctctttgagctttaacatgcgatccaacaattccaaggcttggactgcttcgtctccgattggaagggagttccaggtatcttggtatactggaggaagacaagagtacccgggaagagcaggctcaggattttggacatagaaccagtttgcgtgccagcctttgttcgaagtcttgaagggcatggagaaatatttttggctcagagttcccctcagttggaatcctgcccccccgactacacacggtttgttcttgtttggttggggcttgaggaaaaagatccggcggaatagggcaaagtgaggcttgatccccaaaaaggcttcacaagcatggacgaaattggcaatatgtacgatggaattcgggtttaggtgatgtaagctgattccatagaagttcaagatcccacggaaaaatcttgaggtcggaagagcaaaaccaccgtagaagaaatgcgagaagactacaatttcatgcgtatctggagatggaaatgcctcaccgtacgctggccgccacccgatgatctctttggctgggagaacaccatgcgccaccatctccttcagattctcctctgtcgcatcggacgccgcccattggccttcaaagctttctctctcttccgccatcgatttttctcaaatgtgctgatttgattcgagggatggcttgagagaggtgaggaattgaggtggtggatcacgggaaggattttgatgcacttttcggaggtggatttggccggagttgtgaaccctagttcgctggcgcagctttgcactgtagcagggagtggggaaaatggcgagagttccggcggggaagacgaagcgtcgcttggatatcggatttttcagttaagggtatcggaggtgctaatgggcctaggcctgaacagtacttcagcccaatacttttaacagcgtggcccattgtgttccttagggacttaggcatattttgctttggcaatattatgcgcacaacagtgttgcccaatgctgatgaaatcctttttatgcggtcatataattctttggaattattgcaatgcaaattaaaaaggtgcccgacagaaaggcgttatgctgtttttgcaagcttttttaggctacaaaagctgtttgggttaactagggatgacttgtttttattatagtcatttccttggcgtgttatatgcctgttttcatggtaaatagtcattgcctaggctattcgacttatttattaccataatctttataatgcttgatgggtaatctttagagtttttatattcggatgcctgtcaagtgtgttcattcgtgaaccttttagagtgtaaaccactcggatttcttttattgtggctaaaaagcagtcggctagcatgcctatttaggcgccgcgtatgcttttgtcatataatgcacaattgtgttattattttgtctttcaactatatgtttagtttgttaactaatcacatagttgggggctacacctaattaggtgcatctattcgatgcaccatgttttttatcttttcgccctttacagtccactcggcaggccttggcatgaaaagcttgaagcacttggattactatctttgagaaggctatgatggtcgactgcaaaggactcgggggctactgtggagattatgggtatcccatatctacacggcgacggtatttggattgggtaccggatacttaatgtagatagaatatcttatctgtatctcgggtttgtttcttaacttgtgtatcaaggaaacaccctgagacttagtcggttacgactgtattttacctctatcttcatattccgttaggaatatagattatcttttgtaatccggactccttcccatatataaggggggtccgggcgcctctaggggcatatgctgatttttcccaaatcatacaatcaataatacactcggcggattcatccccggacaggagtagggtattacttcttttataagaaggcctgaacctgtataaatcctttgtctccaaacccatacacttttctagcttgatagccacccccttttattattgccgaaatctagtttcgacactccgttttaaaatgtttgacaccgttgactttttagcacatgtcggacagtccgtcttattcaaaaacttttgggaaatatgttaaattatatgcctacataaaaatatatttaactatgaatcaaatgatagaaaaagaattaataattacttaaatttgttgaataagacgaacggtcaaacatgtgctaaaaagtcaacggcgtcaaatatttcgaaacggatggagtaatattttgtcggatcaaatacgttgtacgatatactccctccatcatataaaaatgtaaggtacagtcaccgcaaatgtaaagattaaaaaaaattatcacttttttaattgcctcaatagaaacacgcatatacccaatataattagagattttaaaagtggaggatttttaaaaatgaatttagaggagaggaatgtgctagttaattgtatgcatatatgtgcgctgaaaacattaaaaaggagggtgagattgtaccttatatttatgttgggatatcgatggagggaatatatactagtttgcccaattctttcgaaatgatgcaattccttccaagagtagttagtcactagtttggtactatttgataaacaattaaacaaactatggatgcctttgtacatttttttcggtaagtatacagtagatgctttatttttcacattgtcatcattcttttcttttcaattacactacttgcaagttggcgatcacgcatgcatgcatatgtagttactaggatataggttactttactaaaagctatatgtgatgggttcagtaatttagttttcatgctgattggtggaaggctatagtggtatttagattcatgacgttcttgactgatcggagtgttctattaccacaggcaaatgcacgtgcatgtgccacctggtcttgaagatgtcaaattgtgacttgattggcctctgacttgttcgtatgcacacgtgcatgcagacttctaattaggtaatcggcgcaaataagctactactcgggcacctccaatgtttatgaccataagtagcattaaggtgggtcccactattcttagggttattaccacaatgtttgaagcaagagtaaactttaagatgggtcccacaatgtactattctagtaatttttttatcagccgtaccaatttttcatcctcatatctattttaccccattattttattgcttgtggtcaagccataagcttaaagctttcttttgcatttaatgacttatgactttgtttcacaatgtatatggtcactataaaaccttatggcctcttcttatggccacattgtggctgcctagggacatttatatttatactagaaaaatgcccgtgcgttgcaacgggtgaagtctattttaatcttattattgttatatggttaagttaagatgaaatttaatgtggaatttcgcttggatatatatttttagaaaatcaagagctccaattagtagttcgatcttctcaagttagcatgcgagttttttaaaacatattttttatatgattccttatgtattaaaaaccgatcttaaaaaccgactcaaatacggatatgtattttcaaaagcaaacaaacttaaaaactgactcatacacgaatgacataccaaaatatcggcaaaaacatctttaatttttataatagtagagatagagatatcctttttagaaacatagtacaaacatcagcactcactatgtatgcacacttacccttacgaatacatacacatcctatcattacgagcacatccgaaaaattagaccgtccggtatattttgagaccgatgaagtcactatgggtaccctgccatggacgggtacatcgccgatcactactactataaacacacatatacaaactatattcttatgagcacctctaaaaaattaaattaggctggtacatctttgagtgcctcctgttgacaagtatgtcatccaccactaaaaaaataaggaaaaaaatctaaattatccctgaactatcatggcagaacaaattaccacctcaattcaaaaactagacattctttaccctcaattttttatactagacgaattatctcctgactgactccggaacggttttggtcttatgtggcgcacatgtggaagtctagtcagcataaaaaataaaaaatgatgtgacccacttgtcaattttgcctcttctctcggtcactagatgtgagccctaccttttttatattttttattactgactggactaccacataagtttcacgtaggaccaaaactgctctgaagtatatcagggggtaattcgtccggtataaaaatttgagggtgaagaatgtcttacactaaactatctggtttagtatctggtttttgaattgagggggccagataattcgtaccttcacaataatttagggattaattcggcctttttcaaaaaaaaaaatgtaaatgcgagcacctacgtcaagttattgaaccaggtgcaggtacattttattgtattttgaggtgcgcacatacattttattttacttcgcttgaatttattttgaggtgcacatacattttattttaacctttttaatacaaattttatttgacaatgaacgatcaacagatagcttattttgaacataacctttagtaagccacaccgcatgataagatgacgcatcaactcacactggtgaaagaagaatgccatttttggcttttcagagtgtttgcgttgtactatgtaattctcaaaaaagaaaaagtgaaataagttgtaattctgaacatgaaatcctttacaacaaacctaggtaagctagcaatattggtgtaacaacggtaacatttgttatgaaaaaaaactggatatatctatctgatattgtcaaaacttatactttaaatgaaaactatataccctgtccgttttctaagttgatgacaccgttgactttttatatgatgtttgactattctcatatttaaaaaatttatataaatatcagttattttgttgtgatatatatgttttaacattaaaggaaatttaggtgtgatactttaagcatatttacacaatttttctaataagatgaatggctaaatattattttaaaagtataatagcatcatctattaaaaacaaaggtattagattgccgtgttttaactgtatacattgtatatgttgtcatacatttcttttctgaccatagaaaagtattgcttcctccatcccaaaatataataacttatagcgtttaaaagttgtaataaaatataaaaacttatatatacctttctcaaccaatcacaactttctacctttcgaattaattttccaccaatttccttttcccaactattcacaacattctcttatttaattctacatactttcttataggcatatttaaacctaaaactcttcgcatttaggaaagaggtggtattaagcagctaatgatatatatatgtgtaaacaagtgtgagaagagccaccagtttcagaagacaccagccgactacagcagccacagtgaatcgaaccagaagaaattaactagcgcttctgatgcatgcacagtggtgtcgtcgatcgatcgatctgcccagcctcctctataaataacagtacgtagcaacaacacatctacacccctccagctgctacctcgatcatcatttgtgcactatagctagagaaacatattgtaaccagctaggccagcccaatcaatggcgtccgccgcggctaagattgccgtcgtctgtctggtggttttgtccgtggggcagtccatgatgatgacggcggcggcaactactgccgccaccggcgccacgacgtgcaactgcgacacaagcggttgctacaattgcatgctggatgtcgtcaccaactggtgcaaaggcagagatttcaactggatggtgttcaccgcctgcttgatcaaatactccaaggaaaaccagtgcttcagcaagtaatagacttatcggagctagccgacatacgccgatctatcgtttgacgcgtacgacatatatctatttctattatctattatctatttctattatctattatctattatctatctattctattatctatctatctatctatctatctatctatctattctattatttatatctattatctatttctattatctattatctattatctattatctatcgattttgctatatatttatcgacaaatttttccccaaaaatttgacggatgtaattacagtacaatcgtagtgtaattacactgtaacttgcatgtaattacactgtaactatagtgtaacttgtatgtaactttcaaaaatctttccgcaacatgttatttcggtaaaatggaggtcgtgggaacaaattctttcatatatgtgtgtgctatgatttgttttcttcctcaccaaaacaaatcttgtgatagatctaacgattcaaaattatgtgaaacttacaagtcacagtgtagttacatgcaagttacagtgtaattggatataagttacagtgtaattacgttacgattgtactataattacatctgtcaaatttttggggaaaaatttgtcgataaatgtataggcagtcccattatctattacttcctccgtattttaatgtatgacgccgttgactttttgacaaacgtttgacctttcgtcttattaaaaaaattatgtaattataatttattttattgtgacttgatttatcatcaaaggttctttaaggatgacataagtatttttatatttgcataaaatttttgaataagtcgagtggtcaatcattggttaaaaagtcaacggcgtcatacattaaaatatggagggagtatatatatactacttaaaaagtataagatgcttccttcgtccatataataaaaaaatccgcttctgattaaaaaaacaccgttcataagaaaacagcgtgaaaaaaaaggccttctagaaaacggcatcggtaaaaaaaccccgcaaaaaaagtaacccccacacgcggcaaaacgccgttaggaagaaagacggaaaaaagaaaagaaattttgattccgatttaaaaaaaaccgtccccaagaaaacggcgaaaaaaacatctagaaacggcgtcagtaaaatatccggcaaaaaaggaaaaaaaaaaaaggccagaacactatcagcaagaaaaacggcggaataaaagaagagagaaaagcaaaaaaaaaatagacaaagagaatcttaactaattaaaaatttggtagctttcgatcatcacatcgatttttagtccgtactaccattttccgtccgttcgcaacatcgcgcgcaccttttctccaaatcccacataatcaaaatccaagtccaaccaaaaacataatctcaatccaaatccaaatccaaatctaaatcggaatcatcacaaaatcatccaaaatattaagagatgttgagaggagatggaggggcgagcgggaggccaccgttcctcctccgccgtcccgtcattgcatcggggatcagccgagccgccactgtgtcgctagggagccggggagtagccgcggttgcgttgggaagtcgctggctcgcctctgcgccaggaagatgctgggagggagagggaggagccaatcctgagccaccatgccgccggggagccaccgacttgctggatctggcgaggagtgggatggcagcagcaccccgacgaggaggaattaaaggagccaatggttagggggggagggagggggagcggcaccgcgggagaaaggagggcatggagaggcaccaccggtgggggaggggcgtggagaggcgccaccggtggggaaggggcagctcgcggtgggaggagtagcgtcgttggtggggagagaggaggggcgccgctggtaggggacagaggcggcctgcggtgaggggagggaggggaaaatgaattagggttagggattttttaaccgcgacgattttgatggattcaaaatcgatctgagccgtccatcaaaacgaacggctcagatcgatcccgtgttgggccagcctccatctttaggccgcatcactgctacgcagcacgctggccggctggtccaacaaagcacttaggttggactttcggttgggggccacacggcaatgagaggaggagtagggggagccaaattacacttcctgttgggccgaatgctttcctacaggttgagacggaggggaggagaagggataaaagcgggctgaaaatggcctagagaccaaggttgatttttttatttaaataaatgctgaaataatgcttgtactatcaaaattagctattaaactctagaaatttcaataaaattccaaatattgtaattaatcatggagacttcaataaaattaaatccaactatataattttatttcgcacactaaactaatttaattatatatctacctacttaaaaaataccaaatattttcggaaatttatatttcaattaattacataatacatatctttctcaaatttttctcaattttctagtctttacaattcctgttgcaacgcacggacacttttactagtaaatatatatatatatacatgcgtgtgtgcttgtatagttctgcaaaagaataaactcgatcaccagcgtgcggtgtgcgcttatatacacacacatatatatatatatatatatatatatatatatatatatataactacaatagggcaccttaaggtgccaccgattaaatggcacctgatacaacctcacaaccactctgccccacataccgccaccgaccacgcagcccgcatcacaccagattaatagtacatagttaaaagttaactcagtgttgtacaacatccatcacatattttacagtgtcgctattctcaattaagcaaaattttaactttattttttttcttcaggcatcattcaaaccacacactagcgggcgtcgtagcacagatcattagatggggttatttttaaactcaacaatctgtttttgatttatttatttttaattttccgacatttattctaaatgtttaattaaatgttttccatttttttattatttggattcaaacacttttttttatcatgcacgacaagacagttattatttaagtggaagggatttaggcattgtgtgtttcttttttttcggttacaatggtgtgcacacattgagttattatttaactcatcgaagcaactagatcacataatgagttttcagttatattttaactgttagcgacttaggcatgggttgtttatttaataatcgatgcggatgcacggcgagttatttcttaactcgacacgcaatgtattgttatttacgattcctttttttcccttgcagctacagtgcgaatagcagcgaatcttcagggtctagtcttttcaaaccatcggagttatcgtcttccccacattttacggccagttctttcttctccgtcgaccaagaagaactctccctcctctctcgccgcctctgccccggagatcgccggcgccgccgggattgattcccactgattttcttccacaagtcggccacaggtaaatgtgatatcccccgatttttatccgttgtgttatggatgctggtttcgtttccccatcccaaatcgaccgcaatctagggattcttcctaatgtatcgtcgctccctttaggaagggtgaagaggattcggttcgccgattcgcaaaccgcgtgtgaagttgtgttccacaggccatggtcagcggcgcaacttcttcatcaatggctggagatgaagcaacacataggaagccaaaaaggaagcggcgggctaagtcggccgatgaagacgcatcaggcgatgaggttagtacaaaactcagtcaatcttttgctacctttttttccagtgactattttgggcatatgttaattgatacaaatttactcatgttggggatccataccgcaacaggggagagcagggtgtgcgtagtttgcgtgcacaaatccatcatacgcgattataagttatttctttttactcttctttgtgtcacaatttcggataccctaggtgtatctatctacagcgctctgcaattgacttacctttaatttgatcagtcaagcgcatgggtatgtgttgttatttttcagtcaaattagcgatatcctttatgcatcaatagcttctttttttttttactataatgtgttatgcagtatatttcggttttcgtttgattcccacgacccacccacgggctcgtgccgactagaatgaggattggtccatctttttggttgcaaatatacgattcttttgttttcagttctgtctcgcatgtatgcgagtaatatactatattcacaatttttccttttcagtatacataacaataggcaaattgatttatgtgtttgtcatatgccgtttaatttttattttcatacatgtcagtgttatgcacaccatcttgtgtgtattcttttttttcttttttttgcaaacacttcataacactgccatttatagcctcgtctttccagtgaacatatcagataaaaaatcacatccttttatttttatttctagtgtcggcattgatatactagcaccattttttttggatttttattattcatgcttaatttcaataggtctatatttttgtttgcagccacccgaatcaaaggggcccaacctgacatgttgcagcgccacgttagcgtcggaggcttgtcgtgtgctgtccaatacacaccacgagaaattgggggaaatcgggctagacgccgtggcttgcatgacacttgaaagtctcaagaagaccaaccccgacacaatgtgtccttccattgatggtgaacggaagattcagatcacccctcgcaccgtgaagcttgtgatggggaccccattaggcggacatgatattgtaatcccacctaacaaggttgtgcgaagcgtgcacgacaggatcacacaagaattgggaattgcacggaatggtcggatctcagctaaaatgctgattgaagtgatcaagaaccagaaagacaacccctcggcagttcgtttcttagtcatggttcttatgtccaagctcctactcccaacaaccgacttttacatacccaagagtgatgtatgggttgccgctgacctcgatcgggtcgctgccatcgattggtcgaaggcagtgttccaagcactgagcgataccatcagatgttggcgacaaaagcccacatcgtcaatcacatcttgtgttgtatttttggtggtaagctattccgttaatttcatctattttacttctgtttctaacaattttattcattttatgcatacaaacctaggtttatacttccgtcatgaattttttttattctccatcatgatacttctttttgtacaggttcggttctgtatcttgacaacatcctcgacgtccgaatcaggtgggttgaggtcatcaatgtccgatggtggagatgggcgtggagttgacatgtacccaaaatcttcagcgaacatcgtgtcatctgcttccatcgagggcgacagcaggaatgggtctggggaaggcggtggtggctccgacacacgaaactcttcgggggagttcacatacctcctcacggtgctccgacgtggtattaacggacggagctggaacatgttcttcggaattagtcgctttggcggtagatgtttgggcaatctcatccatgggatgagttgggtctgtgttgggcacttgtgcagaagccgtgatagtcaagtttataaaagggaatgcaaaccttgcaaacagaaatcacgggatctgatccgtgctaatccagggagtaatcgaagatattttctagcggattagttagcttgtacgtacgtacaatcccgagattcgtggctacgcattatcacacaaattagcgaacccctaattatattatagttaaaaaaacatccatcgaatcatgcagggtacaaatcaacaaagttattttttaactcaataacctatacaccaaatccacgtcacaaccgtgtataagtcaaatattaactccatcaccataccatccttttaaaagtaaaactcttatctaacattaactaaaaataagtaaaaatttaactcttcgcgaacggaatcataacccacctccaaatgtacataagttaattattaacttcacactgggttgtttgctcgatggtgggattttcccaccgtgagtcgcgtcacgtttcttcctggcgcgcagcggctgtgagtagcgctaggtagcgctaccgtgtgtgtgtctatatatatatatatatatatacacacacacacacatgtgtaatatatgtatatatgtaatatatgtatatatgtatatatatatatacatacatatatgtatatatgtatatatgtatatatgtatatatgtatatatatatacatatatgtatatatgtatatatgtatatatatatgtatatatgtatatatgtatatatatatgtatatatgtatatatatatatatatatatgtatatatatatgtatatatgtatatatatactctgttcgtgtgtccatgtaccactagtcttgtgtttagtttctttttttttaacaaatcgtacgggacagtgaaaggttttatattgatagtaatcatgcacgtaataaccactgtgaattaaaccatccatattgcacttgcaatgcaagtttcccatgtaataatgaacacgtattcacatttaaaattcaaaaaccattataaaaaacataaatcattaactgatactatattgaaatgtagtctcgatatacaaataaataaatcatacgccgtctcccccccccccccttccccggtggccttctcctcctccccctgccccaggccccagctgttgccgcctcgtggcgaacgcgcgggtaggcgtgctcgctgccccatcctccttccccgcatcgtcgcctcgtcctccctccgccctgtagtccccgccggccgccgccaccgcctcccagcgcggcctctggcgccgcctggccagccctcccctgcgctcccctctccctctctctccaggtgttaaatatgttattcgaattttaggcatacaatatatttggataagttttctagtacgagtctttccccgggttctctgttgttctgtcagtagcaaaatttccggtattttttgcagcgtgcacatatccaaatatcaggagtcaagctttgcattgtagctattctgttcaagtgaattcaatttcacgttcaaaagtgctacattcacccgaggttgtgtgccatgagattttcagatgttgctacgcacacacaattttgtgtatatgaggtttgtacggagttcaagatactttgttttatgcacccaggcgtttcaagtggttcccaactccccctttcgttttccacgtgcacgcttttcaaactgctaaacggtgcatttttacaaaaagtttctatacgaaagttgcttaaataaaccatattgattcatttttttaaaaaaaatagctaatacttaattaatcacacgctaatggaccgctccattttccttgcgggagggattagtttccatcctcctaaaacgaacacagccctggagttctgataaatttactctttactaccttagagcatccccaggagatccttcatccggtcctccatccgatatatggtgtacgcgagatgaaaatggacctccagcagatacggcatccagtccgccaaatatggacgatgcgccaaagcgagcagatttcggccaaatatagcgattctctctcctcacgccatatctcaatgcccacatctcctgcccacattcggacttccgtcgcgacctcgcctccgtcgtcgccgttgctggccgcaagttgctgatgccaagtcgtcgcaagccgcaagctgccgccgcctcttaccagcctgtcgaccgcctgcgctgctcgccgtggagtgtggagaggagggtgtaggcatggagagggagagtaccaaatctagaaggagccgtgcggccgccgcctgccgccgttgcctcgcgcgttgtcgtcgcctcctgccgtcgccgttggtgggggcgaggacggagcgaagaggaagggcggcgcgagatgcaagacggcgggggcgaggtcgcgaggagccaaggaagcgaggacgacaggccagcggtggttggtggcgcactctagatgcgccgctccgccgccggcgcctctggatggcgatgcgccgctcccggcctccctcccgatctgtctgacttctctctctgcactctcttctctagggttagcagcttgggttgggcctgctggggacttggggagggattatggactattgattggatgggcctttttaacttcagaaattccgagaaattttccggaatgtttccgaccgattccgagttctgacggaaactgcgattatcatattcgattccgtttccgagaaattccaaaaaatttccgaccggctgattccgtttccgaaaataggtccggaatccggaaaaattccgtaccgttttcacccctagtaaagaagaggaaataggaaataggaaataggaatagagtgaaaggaaaagagtagtagtagtagtagagaagaggaaataggaaataggaatagggtaaaaggaaataggaaataggaatattttttgctgtgtttttatgttcatttcattttatggatgatggtacgaatatataaaaaaatgtttccctcaattcaaatatatcaattaaaaaactatccattaaaaatatatccgttaaaatttactcgtttcaaaatattttcgcgataaataacaccgttaaaattaagttagttggaaatatacccttaaaatacaaatgtaaagttagttggaaagatattcctaaaatataggatgatgagatatggatgatgtaatatgaatgatctgttggagttggaagggatatcttttttggatgatactccatatggacatttggaggaccaaatatagatgagcggctgaggatgctcttatgttctgaaggcggtggtctctgaatccggcagaagtatgcgcatgacgtcattagcagtctacttgtacaacccaagaacattgtcttgtcacttgtgcaacatcagatccttgagaagcaaagaagctcaccctcaacaaaataacctcaaatttcaagcaaatgccgcaaatttcacttcataatcaactcagtaatttccaatctgaagagtaattgacattgacagtgcaatcaatgacgggcctgttagcaacccatattgaatacagctctttgtttggtggagaacataagaagaagaaaagagagataagttctataagggttctagaactacagggggtggaggtagaagttgagtttgagaaggaattgacaagcaacccattgtagtactacaatcacgattttcacgtgcgttggttccgcccgtctagaacccagcgtctgcgaaagtcacgattttttcgtgcgggagaggcacccgcacgtgtgggcgcttaagccacccacacgggaaaataaaaaatcaaaacaaaaaaaaccgtcgccgccgccgccactgccatcgtcatcgcccgcttcccacgccagatccgccgcccgctcccgtcgccgaccgaatacacccttcccctccgctggatctgcaaggggagggaggggaggggagggagtggccgcacgccgtcatcgtcacccgccgctgacgctgtcgcctccgcctgcgcccaccaccggatccgccgccctcatccctcccctccgccggatctgctaggggagggagggaaggggaggggagccaaagggagagggagggaggggccactcgccaccatcgtcgaccgccgccggatccaccgcccccatgcctcccctccgccggatctgcaaggggagggaggggccgcgcgccgccgtcgtcgcccgctatcgcccgattacgcccaccaccggatccgccgcccccatccctcccctccgccggatctgcaagtggaggggaacagaagggagagggacggaggggccgctcgccaccgtcgtccactgccgtccccatgcctcttctccgccagatgtgcgaggggaaggaggggccgcgcgccttcgtcgtcgcccgtcgccatgctgtcgcctccgcctgcgcccgccggatccgccgcccccatgcctcccatccgccggatctgcaaggggagggaggggagctgaagggagagggagggaggggccgccgcgcgctatcgcccggcaccgccgctgtcgctgctgtgaggagaggagaggccgggaggagagaaggagtgggagagttaaggagtggggatgaggattatttttgcgtgcggggcgagtaaagaggcccgcacggcattttcgtgagcagttgagtaaagtggcccgcacgggataatgtgttttcccgtgcgggcgacagcctgttgccagtcccccgattatcccatgtggtgacaattatggccagcctagaaacaaacaggtctagcgtccaggaaaatatttcatgtagtagtgttggcctctaggtcgccgccgccgccaccgccgccgccgtcgtcggttcttctgttgatcaatgcccctcgatggttgctgcagctttcgttttgtattctcttgatccaagcctccacggggcatgggggaatttatacaagactcggtgctgttgttgcacttctcccatcacatacacccaatgaagccatgctactctactcattcaatttcaatcttaaaaaaatagtaattaagaatgtattagtacatgaggatattgtaggctgcgataaacacatatagtacacggattggataagttaaaacactattcgaaggtatgagcggtgctcggggttaactacttagctatgggagggacggaccgggtattgcttggggtatgaagcgtgatgtagttccaattgaaaactaatacccttcttctagcatagtacatcattcaatagaatacttaacaatgagcctagatggtatcaagcattgtgaaagactagatgatgccccagcgctttgctgtgggatatatgttagatattggagaaatgatggaatgatttggattgaaatattataaaatgatttgagaatgatgatttaacatgtgtatgattagttttagaatgaaataaattgtaggcataattattatattcttgcatgttaagctttgtgtgcttaataggttgatgtggcacgcttgcatgtaggttttaggagtgataataaatactatgcttgcatgttgagcttttggtgtttagtgggcattagctttattgaaagaagtgatttgaataaacaatagcaaaataaatgaatcacaccttataatcttcatggactatgtacattgttgataccattacatatcgtgttttgttaatttgcttccagagtatatatactatatctaaaagatagtggtggaggtgaccaatgacatgtgggtcatgatgtctgattacatatcgtgttttgttaatttgcttctagagtatatatactatatctaaaagatagtggtggaggtgaccaatgacatgtgggtcatgatatcagagtacttagctatttttttccttacttgtgtagagtagttatgtagtctgtaactcgattgattaatcttgtttcaaccaagtacttcctccgtttcatattataagattttctagtattgtccacattcatatatgttaatgaatctagacatatatacatgtttagattcattaacatctatataaatattggcaatgttagaaagtcttataatatgaaacggatgaagtagaaactaatatttttttaacaaggacattactgctgtcacacacaggtatttagctagcgttgcatataaaacatagtttacaatgatagtcccaaaaattttgcaggtttgccttatggagggcagtcgggtgtcgttactcattctagttgcagcacagtgtgagatcgttttgtattcgaactagcatgtttttttcctattcgatctaatctatgtttggaacacatgaatttctcgtagaatttatggaaactttcattttaaataatcctactggacataactaataagaaattttcaacgatctgatgatgccatcgtagtactaggcagagtagttatcattgataggtcacaggagtgctcaatatttcgactctaatatgttagactaccgttgacaagatgtagagatcaaccgaatgaagcagccattaaaaaaagggaatatgtaaagcgatttaaaagcctaggcttacactacaatggaaaaaaaaacatctctaaattcaactttcaagattcaaatttggtcgcggttaataaaccaacaaccagataatgagatccacagcaaaaccaagacaagttcgtcaaaggagtataagtttggattcactcaacatagagccttgcccttgctatggtatattgttgatgtgcaagtgagctgcacattctctcaacatctggcatagaaaccacctttgcgcaactacaaattgccactgcctttgtatccttcacctagctgaaaaggatatgaaaataataggttaatccccttccataagatgtttctagtccactccaactcggtttgcactaagaattacctggttttgacaccatacttcccttaactctgttcttcgcaagggatgcagaccatcttggcggatggggatatagactagttccaatagcttcatcttggattgtgcgaaagaaaagaagccaatccacatcttgactatcgaacgaacaaactggagtaccatttacagaagcaattccaagtggaaccaggcttttgtaagatgtttcttgagcaagatatttcaaaacctacacagttcaaacgatttttcagtcagtgatgaagaagggtataaaacaccttatgttttagtttagtagtggataaactgtcagtatatcacacatattaccaagctgtctagtcaatatcattcaaacttttcagaaaaaaattaacctgtgctgcccacttaggtaaggtcatcaagacttcaaaagtggaagctccagaagccacggacattgaagtcaacggctcagctgaagatggcccatcctcgctaaccgagacaacacgaactaactggcggctctcaataagttcttttttaatatgcttctccaaaagctacataatgccatgaaacaacatatgacattgcaaatatcaaactgaagactaaaaaatgctccataattacaaaaacaataccttatcatcaaaacaggtctgtggactgccagaaagaagcagtgacacatgggaagaactagatgttgtgatatcacaacatattgtaaccatcccgtccaacagagttgaatcaacatgaagaggaggagcagcgctgcaaagagaaatgttgtgagcagaaacaagctaaaaattttatagtaatcgtgcaagcaaccatgcataactgcaaataagaataagaagcataactttataaaagttaaaatatgattacaaaaggatacaggttaaatactctacggcactttagtttacattttacaagacacaccaataaaagcatttataatttatgttaccattaagttttgtctttagtctataggaaatgttacctcagttaacctttaaattatactagcagcaaaatacaagttagctcactgagacaacatcagtttgagctttaaatatttctgtggcatagaaaattatgatatgattactgaagcaaggacacaggcacaaacataacacacacatgagcaatagtatttaagatacaacaggttgtgagatattgaatatgtattatatagcagcggaagatacctgactctatcctggagtttgcaccatcgaaactgaaaaaaggagagaagaaaatcaaacattaacaaggccctaccaacaattttactacttgcataatttttcttgtccaatttaatagaaaaaaatggacagagaatatgaaaagtatgtgccatattatcttgttcctaaattcatggtacataaaatttacatacaatggtactagcaaaataccattgtattgcaaaaatcaacaaatatacaagttccaattttaaaatttgtatatatttcatgaaaaaacaaatacatttgcaatcctacatcaatcaaaaaataaatccacaaatcagaagatcctaccaaacaaaataggaggtggtgggaaggcacacccaccagtcaccaccaccactactaagtttttcgatgtgggtatgctgcatagtctaaaatgaatatttacaactcagaaagtgagactccaactaaactacatcgagcttcattccatcaccatacaagtatggactttagaacctagccccggcccaccagcttgtataaggtgcttagcaatactggccggtggccactagcatgttacttatgatgcagcagtatttctgatttgtaagttagcatcatgtacttcattactccaataacctagcacttctacaaaataggtctttggggtaatactctatttagaactcagcactaattaattagacatagaaaataaaaggcagcaacacatggtaactagaagaggatttgacacatacttcaatattgagaagagcattcaaaccatcctctagtgagttcaatagagatgaatcctgtaaaagagatggaagtacaatcattgatttggaataagaaaaatgccatattttagaagaaaaatataggcatgatcgcttaaacttacaagggtgcaatgtgctccacaaataagaagcttcaagttcacatcttcatcatatatctttatgtctggaaaatattccgaggtatcttcttcctcggctatttcgtttccaggaggggtgatatatatccttggagcatccccaagtagatgaggcccaagcataagacgttgcacctcattatttcttacacaatacagttgaaaagtagcatatgcaacctgaaatgcatcccatgcatggctacaggagctacaaacaggaatacacaattattggataaagaaacaaaacttaatggcttacaatatattcaacaaatgcaagacggatatgatacctctgaacaactgacatcaaggaatggcgaaaatgagatgctgcatacgatgataatgaatatctccaatacattatatatgaaataccctagcaatgaaagagtgtgaaaattgcaaatctgaaattagaaataagattccgaagtataatagcacattaggaattgtattttgggtggggggggggaaagcttagtaaaactacccaaaaaaaatgtaaattagtaatcagaatgtggaaaaatggacagtgattgcagacattaaaagcatgtaattatataaaatttccatcaatagaaccacactatgccaatcaaaacaagttataacacatgcagtttagtagtaattgttttatggaaactaatctctataatactccacaagaaaatgattttttaaccaataaatagggacatttggatatcgcatcgcaacaagcagatacccacctgtggcaaaaggagatttgcagcaataagcaatctacaagctcaaacgtaaataagaaacagctaattgaaaatatcataaaacagactaccttcgattgaagagattgagcaatcttttctccacttggaacttccaaataaacctgtattatagcttaaaaggtaatatgagtagctacaaggaagaagactaaggaaaaattggaaaaaaaaaactttcactaaactaaacaggaaaataggcagagaggaaggttaaaaagaaatttaattgttagtagctacaagtcagacaaatatatctggaatatataaacaaggttacaagagttaaaaaaaacaaaaaccaaaatatgtaattttaaagggccaattagttaatctctaaattggcccttaaaacacaatcaacctcaataacaaagggagcctggatgcatgcatttatgaactattccctctgcataactatatcggccgtgtatttttctcgcattaaaccaagaaacccaatgagatagcctaaatgcccatatttatggctccataagagtattgatgcaattgttgcctggctctaatcccagctgcatgcatgcatgaattaatcgtattatcgatcactcaattaaaagatcaataccgtatgctaagagcagtgataactacattagcaagcactctagcacccaaattatacaaattggcaaacttcatcagcaaacactaataactaaaatggatcagtaaaccaaacatgtaaagaagcatattggctatatagactgcagcgctaaaagaagcatagtccaggtgctattgggagctgaagcaccaagcagccaaacatcagtgctctaaaaatcggtgctaggcgcctattagccgcctgggattaggcattacattgtgtactagacggctagccatccttaggtgctcttgtgcgatctaatttagtgttgtactgtctaatttttatgtaatatgcttgctaatttcctaggcgccagccctgcagacactctagggctattgtattgtctaacatttgctagtttaagttagacatgataaaatgtatagtacatagaaaatcagcagagtttagtgcatacaatggtaggaaaaggcggacgaatgagtgaactaagtatctgtggatcagatacatcagcatcgcgccagacaagtgtaccaatttcttcttcgttgtcaagctgctgaccccggaggtacatgaagcggggttgcaaagcacgttgtgcctccagaaattcatcaactgtagggttaatcagcgtgtgcacctgcatgcccagctttccaagttcagaactgacaaacaaaatatatgtacttaagagcaagtttaatagtagatctaactactagatataagctaatcaaaaagtagcattagggctcacatgtgtaacagattagttataaggttgtctctaattttcttctctctctttttctcatttatataattaatgcatttatcgtagacaggggtggagctatcaaaaatatcattgaggtcactcttcacataccatggtgcaaatgccaattctaagagtaatttattagttccaagcatatttaataatataattagcaaaaataattggtgtcatcagtaaccatacactggatccgcccctgatcttagagcatgtgtatagctaactttttatacacaagagcttaacactttttattctccaggttatctctcctccacataggtttatactagatggattatagcctacaattaaacttgctccttaacaaaaataaacagcaaaaggatacttacctccaacctcccggacgagatcaactccgggaatgggtacgatggccgctgctgctgggacccaggcaccggacaaggtggcgcccgctgcttgcctaccttcccacacagcactgcaagcaccgtgcacttcacccttgagccgctagggaaatgaggcatggttgaaaacctgcaagggtttgcacccatagcaacagcagatcgatcagacctccacaatagttctccacccgaaaccaacaaggaacacaaaaggaaccgagcaaatcaaacgaataccccagatcggatcgagcagcgaaaatgggatcgagcagagaaaatcggatcgagcggatctaagctaacaggagaccaaaaccgactgccacaactcggaatcgggactcctgagccgctaggacgccggtggaagcgctcgatccatttggtggtggcggcggcggaggaggaggaaagggtggagctgggatatgggggcgagaatgcaacggaaccctaggtttcctctcggtctcggatcatttaatagagccaaaaatgaaggggaaaacgccgattaatccccagaagcgaagcaaaaaaggcaaaatcgtaacggcaaaaaaaaaaaaaatcgattggccgggagggacgaaccgctcgaggcactggagatcgaacgatgcacggaaacgtgattttccccaattcctcacatttgctacggctgctgctggcctgctgatgctgatgctgatgacgacgacgatgattcatagcttgcggagagaaaaacaaaaaacatgtcggattaaattagctttctcgcagcaggatttggaaggagaattggagagaaaaattaaaaccgaatttgttctgtgcttttctgggcgcatacctcgatcagctttgattatctgctgctgcggctgctactgcttttgggttttttcggccgcatccatttcgatcggatcggatgcgtcgcaggcccgggtgttgttgtgtttggctcatggcattggctccggaggagggattttgggaggaatcgggatcgcacggcaggtctccgggcgggagacgtgcgagcggaggcgccatgttggattgcttcgaggggtgatggtgcgtccagtactccagttcctgcatgttcgtccggctcttgatatttcgatgacaagagtgcgaatgaacaaatgcgagcggaagggagatggggatggttgatgcgcgggcggtcgcgcaccagctcgatcagtttccccctctagtcttttccctctctctctataagtatattgatacgtatatacacgtacacatacaaactttatacttcctccgtttcacaatgtaagtcattctagcatttcccacttcatattaatatgtttagattcattaacatcaatatgaatatgtgaaatgctagaatgacttgtattatgaaacaaaggaagtattttactagaaaagatactagtgcgttgcaacaggtgaagattattttaatcttgttattgtcatacagtttaattgctgtgaaatttattgtagaaattcgcctggatatatatatatatatatatatatatatatatatatatatatatatatatatatatatatatatatattaaaaaaagcgaacttatttccaaaagcgaacttaaaaacggactcatacacggatgatgtactaaagtaccggtaaaaacatcttcaatttttataatagtagagatgtgtgtatagataaaataaaccgaaagatacttatatatttaaaaactgaaataactgaaacaaaaccgaaagaaaactgaaaaaagaaaaggaaaaatcgactcttcccacgcgctccatgagagagaatctgacttagaccctgtttctttccgcttaagattattataatctagattattgagttagattactataagctagattgttataatctgtagtagaataaccggttagttgtttctttcctagattatttgggtttgcaagtctaaagagggagtggggtgacatggtgggtaatttttcacccaataatctagaaaaagctcacctaaatgagtttatcatattataataagctgggctccagattataataagctacttcaataagttgtctgtttctttcagcttactcccaataatctggattataataatcccaagctgaaagaaacagggccttatatgcgagggccgactaaatagcttttttctttaacttattttgaaactagtatggtgactcatcgttataatttttctcacataatagcatttttttcatattttatttttaaaatatattaaaatggtaataggattttaaattactagcaacatgtatgtgcgttgcaacggatgaaactaatattaatataaacaacaaataaatactaaaattaaaatttaagtgtcacaacataacgttacggaagaatttaattttttggctaaatttcttattggccacatttggacaaaaaaaaatcaaagtgcaaaaatattcctaaatggtaactccgttgggccaagaaaataaaggaaataattcctgcgagcctgacctgaaggcctacgaacattttaattggtcgatcacggttgacagggggagcaggttggtttttctttggagttcatgtctagggttttccctgcgaaattttttatatttttttagatatttttatgttttaattttattaatagaccattctaaaaaatatttttaaatctggaccttttggcccgcacgtggccaaataactctgtcacgccgcgtgcagcgggcatgacaattttatcctaccacgccagcgagagcggcatggccagataacactgtcaagccaacgacgccggcgtggccaaataacgctatcactccagcgggagcggcatgtcacgcccagaaattcactagtaatttccaaacttatttgtgcattaaatcctcatccagaaatcagccgaggtacacaaactgacaatttaatatacagattcatcaagttaactaaaacgataaatacttacataagaggcacttagtcctcaccacgaagaaaactgcagcggaaaataaaatctagcgaagctccggctccactcccacaggcagctcaactagggtataagccaaacatcttctccttcgtaacttttcttcaactgaggtttgattgattattacaaggtgagtacatggaatactccgcaagccacacagcaaatatgcaagtgcacaaggataccaaaggatgacataatatagggctcatttgcaaaagcagcatttagcaaacatttaagaattgtaaaacagtagagtaattaatcatcaatattaatcaacactgaacagcacacccatgctgcacaggcccaaccatcctgaacaaccatacccggctgtacagatctatctccaaaccaggaataaaccattcaaaaccaggagctaatcaaattattaccagttatagcatcatttattatgatgaaaagtgtgagactaatcacgaaagacattgttagacctgcctataaccgcgggcacggctattcgaatagttttactctggccagaggtgtaccactgtacccacaagacacgattccacacatgttaccatgccctgaagtaccaccacgccactgcaaagggggaaatcgtgacagtacccttcgcacaacacaactcaaagcagtgcaccgttcctggatcataatcacccccttataaacacaaggcatggactccccagcgacccccgtgggcttatctccgccacttctcagtctggtgccccgcaatgaaccatgctatacaaaagataaagttgttgcccatactggcttgtggtttgcacggttaatgtttcacaaccgaaactcgtgaaccagtccttaattgtcatgagcacgaccagcaaaaccatgtgctcacaacccacatttatcaagttttagttggcaaattaattaattaaccaatcatgattagccatcgtgagctaccattatcatgtccatcattaagtagtagtgaaacattagttatcccaatagtgtgctaatgtttctaagcatggctaagcaattatatctaatatatctagctgaaccaatatataaagctcaactagtcaaattgtaacccaaggtatcaaaggacagagtaatcaatacaaagtggccataacaaaggtatagtttcacaccaaccggtgacattcgaaaatagacctttccaaaaaatattttcaaaactgaacctggc

SEQ ID NO: 9011 - DNA, 57797 bp, Oryza sativa
gtagaatactgtggacataattgacttgaaaaaagttgtgagaaaaaattgttaatattaaacacttatggaagtatagccaaatgtcataagtacccgttgttggtgctgccaagatcaaagttgtttgccaccaaattcctggtaataattgaagcgttgaacataacaaatttttttccccttgccaacacaaatttgagatctttctacttacaattgcaagttgttctgggtagcccaagagggaaagcttccagtgagctggttgtatgaaaaatctctgcaaatatgaaataaatgcatcattctaattttagctgtactgcaatgttgaattgtttacacacaagttttttagtgaagggcttatcccatctggcagtcctccggttaggctattgttcccaagaaacctgaattgggtagaatacaagatgatgaaacatggtcatcaatataacatatgtttctgtagatgtaataacctccagaaagaattccttacaggtctgtaagcatttgtagattcagaattgattgaggaactttgcccgagatattgttaaaactcaagtccctgtgccacaagacagcatacttgaacagacacttcacatgaaatttcagaaaaaacaccaagagtttcatggattgtgctatgacccataatgaaaaacgtacaggaaggctaattttgtgaactttgaaaagtctactgctccaaggtctccagatatcctgcagttcctcaatacactgtaaaaagtattcggtattagcaagttattactttgtcaatatataaaattgcaagatgtatagttagaatttaagtgtcacatacaggatattcaaagacgtcagactactgacaaaggcaaatgaagagctcccacttacaatatctccaatccgtctgctcatttgtatttagcacatcagtcatcatgacaagaggggatggcaatgttgccatagaacagagtacttacaaggttgtcaatttggttagattagacaaactttccggaatcggtccttcaaaagaatttccttggaaagccctgtgagttcataatttaagaaaaaagtatgaaaatgccaagtttatttgaatattagaaaaagtaacctctacatattaagacactgttgggaccagagtaatggcatacaggtatgcacatttctgttcatagtgatgacttaaaagaaaaaaaacacgctacagttcgaattcaattggaaacaacatatgcagaaaatttctgttgcagttccacttgtcttgtgaataggataaaatcattgatgtgataaaaagttaaaaattactcttacagatcttccaaattagtcaagctcccaatataatcaggtatttttcctgtaaaatcgttatctgatgcccgcctacaagcacaaaaacatgtttgatgttgagcatatgaaaacaaaatgaacatgacaactgtggctctgttcttgaacgtacaggagcttcaggttcttaagctttgagaacgttgaagggaatggaccactcaagccagcactatcagtgtacctgttattaatgaaatgcaacaatcatgcatgttcaacaataggtatcttgctggtccaaattaaactttgttcttctagaagtagcatctgtcaagttagaaagagggggcttacaaacttacaattgttcgagtttggtcaagttgcccagttcttcaggaagttcaccagtaaaattgtttgagccaatgcctctgaaacaaaaggaaatagtttagaattgatataacttgtttatctgcactaaaaatagcagaaaagtggattaacttttcctgatgatccataatattcacctttttaggatttcatttggattaaggttatgaacaccatttggaaaaggtaaattgcaccgacaagacttgcatatgagtaatgtttttttagaacttctccttgagaatatatgcaattaatttacttcagacactaatcaattgttgagaatgagaagacatgcaagaagatctcttacaatgatcgaagatccgtgagattcccaatttcctttggaaggggcccagatagcgaattgattgataaggtccttttttcataaacgaaaaaataacaaggagagaagatgtctaagagaaagctccaacagactgatgtagaagaatatataacttgaaatcaaactcttacaggtattgcatgaaagtaagcttcccaatgaatgatggcacagggccagtcaagtaattttgctgcaggttcctgaaacaacacaagaatcatcaaacaaattagccaaacacacgaggtatgattactattaatccagttttttcctgctaactgaaaattgattagtcaaaacatgggattggatcaatatttactgcaaaaatactgttcaactatttgacagtgcaacagaaagtgctccatcaatcatcataaaaaaaaattctaaggcataagaatttgaaaccatacaagttagccagatatctgagactctccagctccgcaggtatcgtaccgacaacattcaacgcgtacaccctcctgcataaacatcacgtcagaaaactcccttgcatgacgacagtaactaaaaacacaatgcactaaaaagattgtgtgttcgcaagtatccaaatcctattcatcgtgatttgtgaattgatcccaagagcaattatatgcttcttgcaactaccagaccaaaaataaaaataaaaatcggaggaccccatggcctctctctagaatttcctctgtcctctgaggcattccgtcgaacacctggcctgcggtcgaagcaagaggttcagtcaaaggcgtgcacgtacagcttggtgatgtggcagacggtgcggttgttgaaggagcagtcgcacttgatgccggggttgacgacggggctgtcgtcgatgttggtgtcgtcgacggcggtgccggtgcaggggtcgccgccggtgatgttccaagtcttgggcggattcgttccccatctccccaggatcgcgttcagcgccgccactgcattggcgttccacacaaacaccaatccatttctttatatgcaaggtctaaaccaatatagaaaaagaaaagaaaagaaaaaacagagaggaagaagcagcggcgaatagtgcaaaaaaaaaagtttttaaaatgtacgacgcagttcacttctcgaccaacattcgaccattcgttttattcaatttttttacaaatataaaaaatatttatatcatacttaaagaatatttgatgatgaattaagtcacattaaaataaataataattatataattttttttaataaaacaaatggtcaaactttgaaaaaaaattaacggtgtcatacattaaaatatagaggtagtattacacaagttgttcatcatcttaatgattgatttctcttcctctatttttttttcgagaactgcgtgtaatgtattattccctccattatttttatttgattgtgattattttcatcacgatcaaagacaacttaaccttttattttcatttaatgtgattatgtggtagaaattaatcaagaaacgtgcgctttaactaccccaaatactgtgctatacaataatgctatatgttaaatgaaggtacagtgtaatgtgatcttaatttgaaatttctaatttttaattatgtgatgatcgatagagtattactccctccgtttcaaaatatttgacacactttttagtacgtgtttgaccattcatcttattcaaaaaatttaagtaattatttattcttttcatatcatttgatttattgttaaatatattttcatgtacacatatagttgtacatatttcacaaaattttttttaataagatgaacggtcaaacatgtacttaaaaagtcaacagtgtcaaatattttaaaacggagggagtacattatagagttgaagaaaatcgtggaacaaacgatccggctaactctgctttgaacagaagcagggataactgacctttcgtcgaagataaaacaggtctctttatttttatttttagatgaaaaaagaggtcgcttctgactattggtctaaaaaataattgaaggaaagggacaagaaacagccaagaagaaaataattcttcttccaaaaaaagagagaagaaatgaattaataagccaccaggatcaactctgcagtgctattttctcttcaagatcggcaacatttttgctgatgcacatgtaataaaccctttctaaatcttaatgaaccgatcgaagacgttccatctctcatccggcgaaaagagaaaaagaaatcaaaacaacatcaaacatatctctaatctgtcttcctatctctgaagactcaatgaaaaaaaatggagagaaagctagcatatttgcaaatcggagaccaatgaacatgtatatatccaatccaaaagcacgtttcaactgatacacataccttcaactggatcagttcttggagcttgctgagcctgagcagctgcaacccaagaacacgcgatcaccagccaatacaggagcagcagctgcctgccatggctgccgctgcagcgcctcctcatcatcctgaaaaatctctctgctgcgtcgtcgtcttctctcctctccttaaaaatctatgtagctatgtctgtcaacgcatgtacatatataagctgataaaatcatcgatctgtcgtcggcacaaatggatgcgcaacttggagcagcaagttgcttgtcgacagatatgtaggagcagcagcggcggctccaggtgaagaggacctcgagaaaatcaatcgaacggcaccatgtgtttgtaatgccattagttggaagattaatcaacgccagaaagtcgtgtagacgtgtacagtgatgacgatcgaactggtgtcgagttgaccttgttttgttaattactagtataagagtaatttcgacgatttccatagtactgtacttaattagtactacacagttgtcagctttcaagacgttttaactttgatcaaaactgtttcatatttaactaaatttatagaaaaaataataatatttttaactcaagacaaatttattataaaaatatattcaattattaatttaataaaactaatttggtattataaatattactatatttgcttatacacttagttaaatttaaaatagtttgactttgactaaagtcaacacatcttacaatacacgaattagttccaagagtgtacaggtcatcaacagatatgcatagtttttctcactgcacagtaattggagttgctagcaggttaattagttttgagtttcacataacatctagcctgagtttagttggatccaaagtttggattttgattaaaattgaagatgatgtgactgaaaagttatatgtgtatgacaggttgatgggataaaaaaggactgaagtttagatgcacacagccctactactcctatatcccatcgactgacgactcgtcgacagtgacaattgttttggaagtatcaggaatatcctaggatcgatacatcggtcagggatcgatgccaaatatgacttgtgcccaaatctgaataatccatcgccgaattatagaggaagaaagcgcgaagcagtaaacgccatccatgagttgaatgcatgcgtctacattacagaatgcgacataaagttttggatcgaccagttccactactacctagctgctagtactaattgtgcatgcatgcgtctctggtcaattaagtaagagaagttcttcgagaaaacaaaataagattagtcccacacgcatgcatggctagctgggcaacaacctgcttgacttgtttactacgctctccgtttcctactataaatcattagaaaaatatccgtacgttgtaacggatgaagagactattttaatcttattattattatatggtttagttaaggtgaaattcattatattaaattcatttgaatatatatatttttgttagaaaatcatgtgctacaattagaagtctgatcatcttaagttagaatgcgagttttttaaagagatttttttatatgattccttctatatttccaaaaacgaactaacttaaaaaccgactaaaatatgaatttgtgtttctaaaagtgaatgaacttaataaccgacttatatacggatgacataccaaaaataccggcaaaaatatcttcaatttttataatattagagatttagttattttctaagtttaaccaaatttatagaaaaatataatactctctccatctacttttgataggcatatttccaaatctaaaaattttatttttgatagacatatttcaatctaacaatctatactcttaatgactttcttggatttaaggcgtgactctacattctttcatacaagattggctacatggatatcgagaaatataaatattaaagaatcgcttgttacaaggaataactagtagcatgtttaaatggatgataagtagaattacttatccttattctatctgccaagatgaaatatgactataaaaaatagatggagggagtaacatttttaacacaacataaacacagtatcaaaacatatttcaagttatatttaatgaaactaaatgttataaatgttgcttttttttaataaaacttaatcaaacgtaaaaaaagtttaacgcgaaaaaaaaatcaaaataactcataataatataaatgagagggagttaattctgtagttgacaagactcagattgacaagatgacaactgtagatgtagtactctgtatgcatgcgtatctcgtactctcgtatactcaaatacattaacgtacgaagagagcgatgtctaagctacctagttgttggatcgatgtataaattacgcacgttgggatatagcgcgcataactaatgctaacgacgcgcggtttgaaagcccacagtatcgaattgggatcacatgcagtttgtacatggactacaagttaagatactgcaggcaataggagccatctattttgttgatgaacggaccagatcatcagctagctacagtatctctccggccggttgcttgtttcgttgtagctagcgtacgactgtacgagcaaattaaaaaaggcaccgtatccggtgcaaatcagggttgttgtgcaaccttacaaactttcaatcaagaccacaggatgcccatccgatggctagggacagatagagctgggacttgggccgtgctttatcaggccggcccaaggcacgaaggtccggcacgatagaaagcacggtccgacacggaccgtaaatgggctgggccggcacggcccgtacgtgggccgtgcctgggcctggacaacgggcacaacgggcggcacggcacgaccactgggccgtgcttgggccggcacggcacgcgaatggctgctgcagcacgaggtcatcagccatcacccatccacggtcaaatttcctatgcagccagcaggtagcagcaagtagcagctcgttttcttcatcggctcatcggtagcacgtagcagcaaccagcaaggccatcagcccagcaggccagcactagcatttggcaagattgttggctgactcacgccgccacgccggtgggctgcgtccccgcgacgagctgacgaggaggagcaggatgggcgtggctgtcactgccgcgtcaccgcgacgggacgacgaagccgcaagccaccgctgccgcgtcgccgccagagtttcttcttagcgcagccggcctgctcccgtcttttgggtcgtgcttgtgccggcctggcacgaataggcccgtcgggccattgggccgtgcttgggccgcgtcctgaagaggccgtgctgacacggcacggcacgacaagtgggccgtgctgggccggaacggcccaatttggcacgaagcacgctgggccgtgccgtgctagcccggcacggcccaagtcccagctctagggacagaggtgggttacttttgcacttaaccgccctcactcatctctactaatttgttttttatgcaaatcccccctaatcacagctccgtccgtccgccctccccgcgtcgtttcatttctatagcacacacgattcgccgccgccgcctgcctgagtccccgccgccttccagcgactcgccggcgccccttcgccgcgccaccgccgccatgtcgcaaaccctcccgttgtgaggtcacggtgtagaacgtgccgctgccgccttggagtccggcacgcgcgacgtttcgaattccaacgcgacagaccctgtgcaggaccagcgggcgagcgccgttgatcctgtcgtcgccattgatcccatctccgttgaggccgccgccatggatcatgccgtcatcatcgtggacgagggccaaacaagctgtgaactatgaaccgtggaagtgtacttgctggaagtccctatacttgatgtattcctgaatgagacatgcttattttcgtattgtgaacattttaatcttaacctgtatgctcttgttatgggtagatgctgccaaaatttagtaaaaaagggtacatgctgccaaaatctgaactgcaacaagagcttcttatctgagacatatttgccatcaatatattgcaatacatgaaactgaacctgtatcaaacctatcaagctgttgtgctctagcacatgtgcagaaaatgcacaacaagtagtttgacagtttgacagattacaaaattcgtgttggtttcagttcatcttttatccgaatgcgtgaagctgggcatatattcagtttgacagattgacacagaaaacaactggtagttcattcaggctattattcataagagcatctccaacagactacccaaatccgactctccaaacacctatatagccaactctccaattgatttggagagtcaaacttatagattactccaacaacatctctatccacgctctctactctgagtctatgacaacgacccacaagtcagtctctactctttctccccctctctctcgcttttctccccatatgcgatggcggagacggcggaggctacgaggcagaggggcggtggacggtgtcggcgtggtcggagcagaggcgcggtggacggcgacggcgcggttgagaggcgcggtggacagcgacggcggatgtagaatgcgattgcggagacggcagaggccacgaggcggaggggcggtggacggtgtcggcgtggtcagagcggaggcacggtggatggcgacggcgcggtggacggaggaggcgcagtggatagcgacggcgccgttcttcttcccctctcctccccgagttcgcgccgttggatggccgggggcaaaggcggcgacaaatgtggctgtggacgaaggcggcgatgctggcgatggtaggggatccggtggtgggcgggacgacgatggcggagatcgagacgacgatggtggagatcgggacggcgacgaagagggaggggatgacggagatggggacgacgatggaggtgcggccgaaaggagcaccgtggcggtgaggaggagctagggcgcccatctgggagcgggagatccggggcggcgcgcggccatggccggagatcgaaggcagagaggggaggtcgcggctagctccggcgcgaacgacgacggtggtcgcggcgggcttcggcgcggacgacggcgtcggtcgcggctggctccggcgcctctctcctatgtgccgtcggccgtcgctgtcgtgcagtgcggttcatgccgtcgccgttcacgagcgtgctcaagccgggggagatagatgggtgggagagggagtggtgggtcccacaaatagccaggcagggagactctccaagtttgaccagtgaagtatgcgatttagccatccggctgttggagggtatttttctcccatacttgctaaaatttaacttggccagtcatttagccactctattggagttgctcttacacacccataggttccactgtcaccacaagcaagaaaaaaaattttatggttccacttgactcaatctcattatcaaatgacattacacaattccattgcatatttgcagtcacaatctttcagagttttagattacaaaatcagtacatcagtgtcaatctcagaacacgattccattgcatatcagctcggcgggccagcgaccgcgttgagccggctgacgcggccacggcggcgagcggcgacggaaggaggcacatctcggcaggccagcgacagcatcgagtcggctgggcggggacgcggccgcggcggcgagcggcgacggcgggagggcagagggagaggcgaggcagagggcagaggacggcggccacacgaagcaggggggatttgcataaaaaaaacagattagcagatatgagtgcgggcggttaagtgcaaaagtaacccacctctgtccctagccatcggatgagcatcatgtggtcttgattgaaagtttgcaaggctgcacagcaactctggtttgcaccagatacggtgccaattaaaaatgccaccttctcacacggttaatctaaatatttaacaacatgcagcttttgatttgatcaaattaaccttaccaatctctctctcttttttttttgaagaatctccactactcataagttcagaacatgcagccttcgtttcatattatttttgtcctaaaattaattaccttcttagaaaaatatatcaacatgatctattagattaatttcataaaagtcctcttaagagacccacatgcaaaaaaaatatatattttcacataggagcctcttaacacacccgcatgcaaaacacaagcattttttagcatgtggatttcttaagcgggcgcatgcaaaaatgtctcttcccgctcagcatctttaaaattttaagtccccatcgttatctcctcaacttctctctcacctctcatttttccacaccctctcaatctccttactcaatcccccactcatttttctctcctcctctcccacttcctcctccatcgctgggtaggagcgcgggcgggcgacaatggcaggagcggcgggatgctccccggctcctcctccacagcccggtgggagcacggcgggcgggagttgcagcggcggtgacaagcttggcctcagatggagccggggtggcagtgctagggttttttttttccttttggggaattttatttttttcgcgattttttgttttcgcatgtagttgcgttggtcgcatgcaaaaatccgattttcgctgacctttgggtgcaagcgggccgccccatccgcatgcaaaaatcgattttggcttcatggaaaaactgaatccgtagtagtgcacgaaacatatcttgatgatgtatttatttattattgtatatatttctgcatttttctataatcctgatcagagttgaagaagtttaacttaatcagtacaaaagctaaaacaacttataatacagaaccagtggaatatctcataagttcaccgcacattgaagaggtagtatgttatatatttttatactacctaacaagctacctcataatttatatatttttatgctatctaacatactacctcttaaccgcacattaaagagtatgtactttaagtctttaaccataacttacccaaaaattttgaataagataaatggtcaaatgtatgtctaaaaattaatgttatcatatattaaaaactgaagggagtctcttttcctatttcatggagtcatactacctataataaaaatatattattattattattattattattattattattattattattattattattattattattattatctttattagcacagttaaaactcgaccaattgtgacgatgtaaagtggactttttcccacctccgttacatgtgtgcaccctcggcccaaatcggtgtaccccaaattagtgtacctttcggcccaatccggcctgacatagagagccaacgtcaggtgtgtctacaggcagcggacgcgctaaccgacgggagtatatcaaaccgatttttaatcttttgattaaaatccaatagacacagtaaaaagcaaaaagcaactcaaaacaccataatgaacactaaattaccatatcttcaagaaaaagacaaaatccaatataaatttcaaaacttacatgcaaagattaaaaaattacattgtagcttacaaaagttacaatgtaagtttcataaattacactgtgacttaaaaaaaatatactgtaattttgagtgaaaaaattgagtgagagataagaaaaaatctttcgagtgagatatagcaaaatcgataacggattcctctcccgaaattcctaccgcgcgatcgcttgcgaggcacgatcaacctctcctctccacgtggtttttttttttcaccgtattactttcatattttagtaaatttatgcacctaaagtttgtacacctcaagtttacacatctaaagtttatacacctaaagtttagagacccaaagtttataagtcaaaagtttatatatccgatttaaatttgaatttgaatttaaatattttttatatatagtatttctatacatctaaagtttatacacatatagtttatagacacaaagtttataagtcaaaagtttatataccctattcaaatttgaatttgaattcaaatatttatatatatatagtatttccgtacataaatttttctaactttgttttcttatttttttttcaaatttatggtgtagtaggaagagaagaggggatgagaagggggatggagggggggtgatcacccacccattagcgttgcccattcctgattcaattgtgttaagattggggcaattgtgttcctgcccttgctttctgattcaattgtgattttacctcttctttttagggtttgtgattttgcccttgttttttcaaattgaagcttctgtttgcccttactctgttaggatgaattaacggtgttaatttagtagcagaaagactggtgtgccctttgcatttctttgtgtggatgtactgtttttgccccgatatatgatgtggacattaactttgagattgtatggcaactccacacaaatcaatttattgccagttattttcaggaacatgtcagttgcatatattcatcatcacgaagggaaaaagaaaggagaacgcaaccaattgtccaaacaaatctattacctagctttttcatgaacaaagagattgcacacatcaaaaaggagaaagaacagagagcccaagcaaaaaataatccccagatccatctaacagagcctcaatgattcatcgcagttgcttgccggttgattcaatcaacaaagcaaaccattaaaccctcccagttcctcggtggcaacggtaactttgagcaaagctgggatccaacaaggaggaggcgcaggattcacatgagacgatgcacccagcggcaaaatgtcatggctgacgcagtcgctgtcgaagtgtcgataccgcgcgggaaatcagaagcctgccgcctttgcgcctgcttgcctccagcaggctccggtccgcagtcccgacgacggtcggccgcgcgtgcgcctcccctgcgttggcctgttatccccgccgcgcctccccttcatgtcgacccgtagtcccggcgacattccgcggcgcacgcacctccccttcgcgccgccgcctgctactcccctgcgtcgcgtcgccgtgcctccccgtcgcctgttcgtgtcgccgccgcttgctcgtgccaccggcacggccaaatcctctagccctaggttttgggatgggggaggggaatccgtagctttccaacccaattcgcacagctacttgagtgatttatttactcaccaggggtataacagtcattgacaaattacgaaattatttttttattttcttccccctttgtttaactcggaaattctagccccactaacagccgtcaaaatcgagggcaaacagctacttcattttgaaaaagcaagggtaaaaacacaaacctaaaaaacaggggtaaaatcacaattgaattagaaagtaaggacaggaacacaattgccccttaagaagggcttaaacgctaccaataactcaataagagcatcatcaatagtgcctctaatccacttccaatttatatttttaatgattttagtctaaaaatccggcccaacggcctccctaccttgtccctaaatctttgggaattttcttccctttgattttcgctctaggcatatgagggcgaggcctcgctcccaatcttgcggtcacgtcgttgtgaaacatactaggtctcttgtgatgcctacgcatatatcgaagcgggttgttcgatcggtttaggttcgccttgcctacacatggacttatgttttaggcaccatagaatttactaatggtgcatattaatagcagaagtcccaaaagcagcaaactagtagcgaaggtagtttgatgaaggctcccatttttcaggaattcctagacgagaagcggtgctttattactcccaatgcaacaagcatgcaacttgacaaccatgcgggtgccaccactgaaaacaagaaaaggaggagggggacgcaaaatagacttattccttaacccccaaatcatctcattctcctctattcggaactccggcgtcgggcatggccatcggccgtcgccaagaacggcgcgccactcctcggccccggcggcggaccttcctccagctcgtctccgcgggctcatctaccgctgccacgcgcgcgcgcgcgcgcggggtgtcacaccgcgacgtcaagccacagcggagcaggaggccggccgcctccacgccagcttcgaggagaacgtacggcggccgcccccaagtccatcccattcgccgcgcgcggccttctccgacctcgacctcattgtcgtgtaccccgcgccggcggccgggtagaacgcggtggtgcgcgctgccttgccctcgtttctcgcccccctccttcgccttgccgtgtcgtgctgcatctgtttggcaggcaacgcgtcggccgcggccgttgaacttggtagtgtggccatcagcaagcaggcaacagcatccaattttgattttggtttgacgacggtttcagaatgggtttaaatccatttcttagcttgtttggataattggattagctttaattttgcacttggggctgttgagattataggcatataataatttaatatattccataaataaatcatggcattgcagatgtatactagcattaacgcatcattagatctacacatgtaaactaagcagtaaaacatgaacagatcaaatatgcgcaacatattgaacacgtaccgaggtggtagaaagaccggctgctcggcaagaacatttcgcaattgcaggcgtctacgaaggcgcgcagcacgcgagcgaagaggaagacgagccgtcgcggacgaacagggagcagtcgcgctaagcgcttcccaaaaaccttattgtcgccttctctcggtgcaggacatcgaaggcagaggttcaagagacctgctctcccgatcgccagtgcacgccgacgagcgcgatggagtaatctacgagcgacggtgcagcatagagtaggaggcaaaccctagattgattttgcgtgcgttgcgtgaagacggcaggtcggtttatatagagaagggtcgcttgatcagggcgcccgcacgatctccactgcgcataaccgaaccggataagtcacgcgtaacttatccggactccacgccgttttcacgcaccggatttttcggaatgtttccaaaacaaaaatgaatccgaatttgcagcaaaacaaaactgcaaaaggaggctgcatctacgccttgcccaggccaggcgaggcgagcgagcgcgtgtgttccccctcttctctccaccacacatgcttcaagtggctaggagggcatcctcccttttaaggaggtccccctctcctagaataagcaaggtggtactaaactccacatgcatgccatcccatgaggtgggcttttgtgattttccaaagaattaatcttcgagtgggctaaggcccatccattaattccaacgggggcaggccggttcgggtgttgcctttgattaatggatttggattggtttggtttgtgaagtatagtgtatatacagatgaatggagcgggtcctactaatgcgcgggtgatcgctgggcgcactcccctcctcctatgccgattcctctctccccctttctccttcccatcttctcttcctactacagtacaccacaaatattttttaaaaaaacaaaaagttagaaaaaattatggatagaaatactatatataaaaaatttgaattcaaattcaaatttgaatttgaatacaaatttaaatttgaattcaaatttgaatcaaattcgaaatcgaattcaaattcgaattcaaattcaaattcgaatttgaatcgggtatgtaaatttttgacttataaactttgtatctataaactttagatgtatagaactactatatatagaaaatatttgaattcaaattcaaatttgaatcagatataattcaaattcaaatttaaaacgggtatataaactttaggtctataaactttaggtctataaactttagatctataaactttaggtgtataaactttagatgtatataaatattatatatataaaaaatatttgaattcaaattcaaatttgaatcggatatataaacttttgacttataaacttttggtctctaaactttagatgtgtaaacttgaggtgtataaactttagatacataaatttactaaaataggaaagtaatacggtgctaaaaaaggaaaccaggtggagggagggaggggggaatagggtgatcgctagccaacagccagggcgattgatcgctgattagagtttctggaatggagcggaccaatccctagccagctggccagagaatcctcttaagatcagctttcatggaagaatcacccacatgatctgtcctcagagatttgatattttgacaccacaaattgggctttgattattcgacatcgtgacccactgtaaccaactcagatggacccgcatgttattgtcaagagtgttaacatgatcgaagcggcaacaaatatggagtgtcaaatcatcaaatttaaccgtttcagtgtagatcaaggaaaaaaagacaggcaggactggtcaaagatcataaagcttacagaaattcagaaaacttgtggttgtgatgctcaccaacccccagcttgggtctacatcatgtgtactctccactgaagacttattcagccaagtcagggactgtttcaagggaagtgaagagcacagaggatggtgattttgttcatccttcacggcgaattctcccaatttcttccatttaagttcttcttggttgtctgattattaggtttctgcttcgaaaatgctggtttgctctgctgctggctgcttgggttcaacctgatctggtgcttcctagtcgaattcaaggagagccggtgagctaagctccaaaccagttgcaatttgttaaagaaccagtcgattgtcatatgcttgctaacctgcttccgtatttgcagaggaaaatatttgggaggggcaatggcagaaaccgcggtgagtgcatctaagggtgtgataggtgccctttttgagaagctcactaagctggtggaggacaagtgcaccaatctcgtaggcatgtcaaaaaatattgtgttccttaaagatgagctcccaaccatgagcgcgctactcgagaagctagaggatgcagatgaacttgatccagtggtgaaggcttggaggaaccaggtcagggagatggcatatgatattgaagattgcatcgatgactttgtgcaccacgtgggaggtggtgatgtggaagctggcttcatcgataaggtttctcactttctcagaactttgagggcccgtcttgagactgccgagcatatcaaggatctcaagattcagctaatagagataaatgaacggcacaagaggtacaaatttgatctagatgacactcctagttctagctttgtggccattgatcctcggttgccagcactgtacagtgaagccgctaatcttgtgggtattgaaggcccaagggaacaggttataaagtggttgacagatgcggatcaacaaataatggtcctaccaattgttggctttggaggtctgggtaaaactacgctcgccaaggaggtttatcaaaaaattggacagcaattcaacaccacggaatttgtttcagtttcccaaaggcctgatgtaacaagatttctcaaaggaatacaatcaaaacttccgataaggctgtcttctgaatattgtgaagttaaagacatcattgacaacatcagagcatatctacaacatagaaggtcagtatccatttacttataatagtggtaggcattaattctttttccgttctatgttttcaagggttcatatggtttcaagaagttttctatctaaagtgcctgttttgctctacataattacttgtttggagctgacaggcatcctttgccagctttttggcttctagaaaagtaaagctcttctcttaaatgggtcatgtgccagagttgaggggcaaaaatatctaggtctatattagcatagcgcacagatgttggtgcgatttaggtttgagttctaaatgaatatcctaatttagcaatataattcatggttagtacaaggaaaaaaaaactcatgaatttccttgaaccaaatgtgcttattaattgttgaatttgttgatatatttcaattattcatcgcacataccaaagaattgtatggcacttgataatttaatttaacaggtacctttttgttgttgatgacttgtgggatgcacctacatggaatattattcggtctgtttttccagaaaatggcatgggctgtagaataattgtgaccacacgatcggaagatgttgctagatgggtatgctgcaatcatcgacgattcatttacagaatggagcccctcagtgatgaaaactcaagatggctattctttaacaggatatttggctcggaagatggttgcccttcccaatttagagaaatttccgctcagattctgaaaaaatgtagcggtttaccacttgcaatcattaccattgctagcctattggctaatcagcctgcaccacacaagaaagaatattgggagagtattcgtaattctattggcacctgggggtctggcacaaatcccacgttggaagggatgaggcaaattttacaccttagctacaaggatcttcctcgtcatcttaggacatgcttcctataccttggtatttatcctgaggacttcaccatcaagaaggatgatttgattagacaatggctggctgaaggctttgtccatcatttccatggggggagttcagaggaagttgctaagagttatttcaatgaactgatcaatagaagcttaattcaaccagaagaaaccaaatatggggaggtagtttcttgtagagtacatgatatgatgcttgatttgatcttaagtaggtgtgcagaggataattttatctgcgtggcatacaatctagaagaattgtctggaaaacatgaattcaaagtccgtcgattattggtcgactctagagttggtgattcaggagataccaaaatatcaggaacacctgctcctagattgttgcaactcagatcacttcagctgtttggagtatctgtatccctgtctttgttgccactgtctaagtatatccgagtgttgatattacacttgggaaaaaccgggacaggaggcaatgaaagagttgatgtgaccgcaattgggcaattattccagttgaggtatttgaagattgtaagcctccatcatgcgctcgtactagagcttcctactgaaattcgaggacttcaatatttgtcaacattggaaatagattgcacaaatgagaacagtttgccatcagatattgttcatttgtcccgcttgtcccacctgattgttccaagtggtatagggttacctgatgggaagataggcagcatgaagtccctatgcactctccaaaaaattgagatattagatatcaagagcgccattggccttggtgagctgaccaatctaaaggaccttgagctgtacagtaaacaggctctgtcagagagagagattgatgcgctggtaacttcccttggaaaacttcataagctcatatctctgcgcatgtctaagtttgcagaatgtatctggtatgatgaggataaccggctcggttcattgtccaatcctcctctcaatattgagagactccacctgggaggatggaggttgcgtcgagttcctagatggatcaatggtcacctccaaaacctctgcttcctcgttcttgatgttacagagatgtcaactgatgaggttcggctccttggagagctaccttcactcagtgaactctgcctgagcgtgaagcgtttggctccatgcagcgcatccctcgtattcggtgcagggttcccagcattggagtgtcttgaattcttttgcggtggagatatatcacacctgtgctttgaggcaggggttatgcccaatctcagaaagatcattctgttttacatagatattgaatggagcggcaccgcaccagttggcattgagcacctactgaacaaacaactccgatacatccaattacatccggttactgacacagcagtggatgccgagcgtatcagcctcgcattcacagaagctataagagcacatacaagccgtggtggtgctgaaccttacctgcgcttcgcccggatccgaagtggtagcctcataggtgcaaactctttaatccggcacagttttacttgtcatagagtttctgctttgtttctcctgaatcacattcttgccattcttttttctaaatttatattgtgcatttctgttctaagtttacttttttggttgtacgcgtaccttgctgagtattggaaactcttccactttcagaatgactgatcggctaccttctatcttgaaatggcgcggggacgcattcatgtttttagttcaagctgcagcaatgtttccttgaagaacattctgttaaatggtaggtgcccttcacatctctttgggcttgttcactttgatgccaaaaaaaaaccttaccaaattttatcattgtccaaaattttggcaatggcaggattttttatataattactaaaatttgacagcaaactaaatatagccactttttgataactttactaaaatttgataaggttgaaaatggcatcaaagtgaacagggcccttcatcagctccaggagacagcttcgggcttcggccagagtcactagaacagatcaatgtgcagagcacttatgtcatgccagttatgacccggcactaataaggttttctctgttagtagtgagctactccttccaatttcacaactcttgacattttggataatattgtttaaaatgtcaagaattatagaactggagggagtcactgctcgtaattgttcgtgcatctctggtaacaaattaagtaaagtcctggatgcacaattagttatagaaattcactgcaataagaagctggccattgcatacatgggcaacatgctggacatagattgtttactagtattaacaacaaaagaacatactggacaacgatccgtggtgacctcgagttgatttttttttcttcaaaaaacggacagattggattgaggctggcgccgcacctgcttatgcatagtcatatatatatgaatcaggggcaaaaaagaaccgaagccgaatcaaatgcaaatcaatcgcgggacgggacacaattgagagttgagaggctattcgagtaagcatggaaacaaattaaatgatgggctggaaatcttgccggggatcggcctgtcttggtgaaatgggcagcccatgtagaaagaaaaggcccaaattcgggggaagaagtttagaggcccaaaatagcattgcagcctggactgaccattggatcggaccgaccgctttcatctgtaagggccgatctgcggcgatcacgaccgatcactttacacctccatcatctcgctttccacgggaatgaaagggagatatttaacaatggggcaattatattcttacctctactttcgtatgtaattgtgattttatctctcttttttagtttgtaattttactttttttaaacaccggtttacccctactctgtgaagatgacttagctgtgttcttttcccctctttcccaactcgctttcctcgttatttacgcacacgcttttcaaactgttaaacagtgtatttttgaaaagatttctatatgaaagttggtttaaaaaattatattaatctattttcaagtttttaggctaatagttaattaatctcactataatttttaggctaataattaattaatctcactataaccacgtactttgttggaatattgcccttccgaacacagccttgacggtgtcaactcggttataaaaacacatatacaagctttaacacttgcccatacttttctaacaagatttgtatattttattaaatttaacgaaacactgatagatttttgacaggattttcacaaacttgcaacgggtgcaaaaaaaaaaatcttccaaaagtattaatcacattcaccataaaaaagatcaccaaataaattccttgtagtcaggggcggagccaggtgtggagcaacttgggcccgggccccacacctggcagaaaaaataccaaggaatttactaatttttctattaaaatttgttcaacaagttcatactctaatgattaagccctactcttaacataatcctggcttcgcccctgcttgtagtgattgggaaaacaaaaaaaaagaagagaaagaacaaacgttgcaagctgcccgtggacgagccgctcgacatgcctcgtcgacgagatgctcgctcgccgcccaaatcgtcgcgtgctggcgtgcagctgccaaggccgccgccgccgcgagctcgcgcactgccgctggagctgctcatacacgcgtgctgctgccgaggtcaccgcatggtccgcatccgcgcccctcacctgctcgcgcgctgccgccgccggagcgcctccttcaccgcctggcacctgctcactcctggccgcgttgggatgcttcgcgcagccgcggccgtcgcctgatgctcggtgcgtcggcccgcctagagcaacccaggctctaggcatctgctgctcctcgcctcgccccacccagccgccgcgccgctgccgcagccgccatgtcgttggtttcagaatgggggagcgggtgaatggtgccacggaatgggtataatggtccatttctactttctttacagtttcatatattcttttcacactcttattccaggtccaccaaacgatctgagcgtaaataatagcttcatttaaaaaaagtaagagcaaaatcacaaactctagaaacaaggggtaaaattacaattgcttctgaaagtaggggcaaaaatacaattatcccatcaattatttactactgttagatgtagcaattaatcatttattacctagatccacacatgtcatgcacatataagatctacatgtgacacatagatagtaaatgattaaacgctaaatctaagagtgggattaagttaaatgtcctgagaaaaacaagggaagaaagataaaataggacatcgtgactttacggttttagctatatgctaccacacgaagtaacttttataagaagacgtacactttgtaaatatggaaattagctcatggacaccatgtatattaaaatattcatttctaattgaatagaagagagaaaccacgtgaatgctatgaaatatctcttggcggctagatccacatgtcaagtccccctatctttgcccctctctctctggaagtcatggcaaagaggagcaagaggtgagagaatgcgctggagcatggcagtgccaggcaggccacagtggatgacgtcgagtaggagcggagtgcatggagatcgacaaggtggtgcggacgaagtgcaagtggatgcacgcaggttagagttgcgtggaagcagtagcgctaggtgcgagtgcacaagacatcatcggtggcgacgggaggaggaggttgagctagagcccactcggcgccatgcaaccgagctagaggagtagtaccagcaagcgacaacccaagaaccaagcgtgtggtgggtttgcatggagcaacgaggttgttgcgacggggctctacgccatcctcaaccacattatcctccatgccacacccgtccaagccgttgagtgcgtcagtgactccgactcccacaccaccaccggtgccatggccgttacggcaaatgacacctattcctgttgcttcgtgacaaaggtgtgtgctatggcgcccatcgacatggaaacccacctcagcggcctcctccaagtgggtgtgcaagtcttgcagcgagcgtggcttcaccgtgttactcctcccccatttaactattcatgtgcgagcgagatagagagatgatagacctgacaatatgggctcgagggtattcgatcaaaataaatattataatgggtgcagtgtccatgagctaatttccacgtttagagattatcttccatcaaaaatcactttgtgcggtatccaacattaaaaccatgaagccataatatcatgtagaaaaatttgaggaaaaaaaaacaccgcctcactcattgtcctattttttcatacctgaggtgcaattgttgcaaacaatgtagaactgttgtgacctgaatttgttcactgactatacagaacctccgctatacaaatcaaggatgctgttgtgggagaaaatatttatgttgtagttgcaaatgtcgtgcgatggataaagctgtttgaacgtgctagaggaattttgaaggaattaagatgtttcttaactagagagaataagagaataaggtttgctatagacttctcaagtgaatgttaataaaaggtttaaattttttctaaaaaaataaaaggtttaaattaagctcatgcttgaaatccttcaaaaagtggaggaagggaatatttccctcttttcagccactccattccaagatcatcataagagaaaaaaaaactcatagggccaataaaaattccacctatgttttgttaattccaaactcaaaaaagcacgcacacaaaattggtgacaaatacatttgcaaactcctacaaaatttgctgtacccatagattgtttatgtttcaaatgtaattggtcaggaattacagaccagatattacaacaccatgtgcatccagtgtttgatctactatacatggaagaaaagaaatacacaaattgttctgaagtaagaaaaattaggcaaacatgattatatgaattataaccctaagatatgaaacccaacatgtctagttctcatggaaagttaatgaagggcacaatgtttgaaggagaaaaagggaccaagattcactcaaacttaaaaacagcacccttgggtacttatctatcaccttccctcagcaaactcactgatagaattagccgacaaaacaagtgggaaggtttccccttgggattttgtgttgtttcctgagcttgatggcacactagattcggtgcctgaagattgctgcatcgatgacgtgaagaaactatcacttccactcttcctctgccactgaggcacatagctaggccacatactcatatccacctcactcatctcggtatcttcagtaagcatggagacgacttttgacatcggtgggcgttgctcaggcaggcccacggtgcaaaggagaatgatgttgatgacacgcacaacctcttcctcgtcaaatcttgcaagtttagggtccaacatttcaagagtctgacttcgctcatgtagccgccaagcctattaaaatcagtttagtttgatgatttgatgtttaaccatggaaaagtacttctcttaatcaactcacccatccaagcagatacttcttatcatcctcgaggctctcatcaaagtttggccttcctgcaataatctccattgccacaacaccataagcgaagacatcagccttctctgtcaagtggcccatcatggcatactcgggtgctagataaccactaaaggtaagaaaccaaatatatgatcaatgatcattttttttgttataggtcaattaaaataatatcatcaggagagtttcttacagcgtgccagctactcctgtgctaaggtgagtcatgttgtcctcataatgcctagctagcccaaagtcagagatttttggattgagatcaccatcaagcaagacattgctggttttgatgtccctgtgaactatccttgtgctggactcctcatggagatatgctaggcctcttgcgatgcctacgcatatgtcgaagcgggttctccaatctaggttcatatttgtcttgcctacaagtgaacttaaattttagggaccttggaatttgctggtggtgcatattttattattacagaagtttaggaagtcgagagaagcaaaccagtagcaaagatagtttgatcaaggctcccattttctaggaattcatagaccagaagtggtgctttgctctcaatgcaacaaccatacaacttcacgaggtttcggtgttgaacggtggatatagttgaaatttctgtcatgaactcccgtttcccttgatgagatgttggagataattgcttcacagctaccattcttccatcatatagcttaccctattcatggaagatatagataacaattcaaaatgatgaatgaaattatgcaaattttgctacatgacactaaaaaatgctggtagacaacgtaaagacgcgtcggctgaaagacaccctaaaaaaccagtaatttgctggaggacgctttcggctcaatatgatgagagaaattctttaaattataaagacaagactaccttagggccaaaagcattcgagttgaggctagagtgaatatggaatatgatatatgctagcgatgtatttgggtgatggcaaatttagagttgtatagtttcaatttttcactccaatgccacatttgaagcatgtggccctaggggcattctcgtcattttgaagaatgtctctcttccagtgttcacctagtcgctaaacgctagtcggacggccacctactgactagcgactaggctgattaggcggcgactagacggattaggcaaattagacgttttttctatttctttcacacaaaaatacttattctagacattcggtacttggtaaatataggcatttaggcaaatagcataaatcatagttaagttcagaaatcatcaagtccatacaacgcactgacactgcacacgaagcattgggtttagtacaaatctatagggatagcgaacacatcagtatagccactgtacatgcacatcataattcataaatcataactttatagatctgaggggctagagctaggagagaggaagaaaaatttatctggaactggaagaacagaggaggtgaggtggtggaggggagcctgatcccctgatggcctgatttagggttggcgtaggctgcttgagtggtttcgtgcttgactgcttcaatcggtgtgtttgccaccttccattgatggcaaggatgaaggatgggagggagagcaggagcagcagaggagggggaagaacgtggagcagcagaggaggagagggaagaacgtagcggcacggtggaagatcgatgggcgcggcaacggagtcgtcgctcgtggcggtgtgaaaaaggggtaggcagggattgcgctctctctccaggctctcaaataaggcaacctaaatccccttctataccgagtcagtcccacgtggtgcttctaaattttatcatgcccaaattttgatttctatcacctagtcgccacctagacgcactgtcccgttgtctaattgcgcccaggcaccgtcctgtccaggccgtccaggctgcctaggaccgactaggaccatctaggcggtaaatcgactaattcactgcctaaggtgtaaactggacaaattgtcgctgaccagcgattaatcaccgtctagacgggctaggtggctgtttaggcgaacattgctctcttcaatcgagccgaatgttccatctagcaaattacctatttcttaaggtgtctttaagccgtgacacattttcgcaatgtctacctgcaaattacataaattttaagtttctagtagcaaaatttgccaaattatggtgtaactgatcatgtagagtaacatacgagctactttacaccaataattagattgaggaatattataagatagaatcaaattgtactactccctccgtttttaaatatttgacgccgttgacttttttaaatatgtttgaccattcgtcttattaaaaaaatttaagtaatcattaattattttcctatcatttgattcattgttaaatatacttatatgtgtatatatagttttacatatttcacaaaagtttttgaataagacgaacggtcaaatatgtgctaaaaagtcaacggtgtcaaatatttagaaacagagggagtatgttgtaacgattggaaagctctaccatgcatgggttacttacactgtgtaagttcccaatatataaaacatggaaggaaggactattggactaataataactgcatgtaaaaagggaatcatgttcttgtgaaactatatttgtttggtcttttgtaactcattttctagtttagtcagtaagtaaactaaaaagggatttttttaatataaaatagagctgaccttgtaaacaaggccatagcccccccttcctaggatgttatcctggctaaagttgttggtagctgattttatttcaccataactgaagacatctggccttccaactacactgagaagctctgcaaaatccttcacattgtcagacaaaacaagggaatcatataaggctatgtttagttcacgctaaaattggaagtttggttgaaattagaacgatgtaatggaaaagttagaagtttgtgtgtttagaaaaagttttgatgtgatggaaaatttaaaagttcgaagaaaactttggaactaaacacggccataaataagtcccactttttccaaagagtaaacagttatgtaattttaactacctcccatctccgcctccatttttttccttttctgtctccaaagaaatgtccctgtggataaaaggcctaaaactatagtacagacaacaactccagctaccaaagctattttacttttaccagcactgtttttaataggaccaggatcaaccttattgttgccacctgcagtaggataaaatgaaacaaaatagatgttaattataagatgatcacatagaaccaatggctcttgatcaagttaggtaatgaacagtaccataaggagatacacttaatgctgagattaatggcccgtaggatccctgtctaggaatgcaacaagttccttttccagcccagaaaaggtgaatctccatgaaattttctgtaactctaacaacatactgcctcaaaacaacagtataagattttccatttgtttgtttctttatatcgaaatccttttctctgagttctccctgcagtaaattgaaaaatagaaggtgtgaatgcacaagaaaacgtgcaacataactgttgcacactattaaaaggtatacttattttccaaaaataacattcattggacctttataaaaaatccacctgaataaatatgtcgaaaatccttgttcccaagcttgtccatgtcgtgttgtctggaaagaagatctctgcaaattgaagctcgacgttgtaaaatccattctttagtccaatgccatagtatctcaatgaagaggatgacgttctggctgtctggaatagtacactatcaagcgtgtttgtaaactggcgtgaagtgtatactatgaagctaaaattagcggcttccatgaatttccccgtgttgctaataccccatcttgttgagttcgaaacatagtatgatgcctctcctaaattcgtgtcgtcgggttcgtaataagatttatctgagcctataatgggtctagtaccaccggagtcaactgcaaatgaggaatctgcaatttaacagaaaacataagagtgcagatattattattgcggagattaagctggtacagctaatggtgaagagataagtgctcaccatctggagaagcaggtaaacatggagtatttcgctgtaggcaatttagacctgatgacaaaatactacaagcacaaaatagttagaagagttccattgagaataatgaagaaaaacctaaatttaatcaagtaagggaagaaaccttctgtttgaactatctatcatgaagttgttccacaccaaattcctataagagaaatacaatgcagacacagtaatagttacttttgtaattttatagtcgcgtacagaggtggacatgatcacatgaattgatttgtttactttcaaatggacactataacttacaaaaacctacacttgtaaatgtctttccgtgctataccaagaagggaactttccagagagctcgttgtaggagaaatctctgaagaaaaaagaccaacatatttttattaggaaaagaaacaccaacatttatttaaaatatacaagtaaaatcatcatttagatgttgcactagatgatgcgtatacatattgtcagtgcaaagctacgaacaacagttcacaaatagataaaacgtaaaaaggtaggaaaagacttacagaactttaaggctagcaccctttgtgtctggcaagctcccagagaggctgttgtttccaagaaatctgagtgcacaatttttttagagaattacaaaaaaaaatcaagacgttacatgaaagaaaactgatgaaggcattgaattattcaaatatttccttacaggtaaatgagtgaattcagattcaaaaggactgaaggcactttgccagtgatgttgttaaaactcaagtccctgcgccattaattccagatatacaagggggggaagagcaaaaagtaaacactcatttcacttttaaaaagaagcaagtagtaccagaatgcaaacaattggcgaaaatagatcaacaatagtttaattaagttcttacaagtaataaagtcctacaaattttgagaagtccactgaagcaaggttgtcagatatcctgcaattcctcagtgttttgaaagaaaataatgcatagttaaggtcttccacatttgtcaaggcatagctaacccattaaagccaagtgcacaatcaggccaccatacagaacaatcaaggatgtcatgtttgacataaaagccaatgaagaactcccactcactaaatcgcctattcgcctgcatgcaccacataaatagttaatgtactgttgaccattgcacacaagcaaaatgtatcaccaaaactaaagcacgatggacttacaaagatgtcaaattgacgagattagaaaaacttgtagggatgggaccatcaaaattgtttccttgaatcctcctaagattgatatataatccggtcagcaatggaagtaaacaatacaccattctctcgaagggtaagtagataggccaggggttaattatcacgaacataaaacacatcattttattgcaaaggttcatttgaattcacctacaagaaaaaaatatacttacaactctgtcaaatctgataagctcccaatataatcaggtattctcccagtgaaatcattgtcggatgcccatctgaaaccgtaaaacaaagttggcacactaaacataccaagatgaatggaaaaagtccatatactgtcctccattttgatttaaagaccacctaacatcacaaactttaaagccaggcatccctgaacttggcaattccattcatgtatctgcctaaagtggttttacattgtggtttcgccattgttgaagtttaaaacaagcagtttagaggttggcatgcactagtcatcgttgaaagagaaatggggataagcaggagagaaagggaagaattcgacgtatatgtccaatatgtatgccatttaaataaaaccattatgcaaaaaaaccactttaggggttatatgaacggtttgtaaatttcgtagggttggatattcagtttcaaagtttggaccgttagaaatcttccatttaaagtttagtggagtatatgaacttttcccaaataatttttcgcaactgaagttatgttcacaagataatttacaagatcttcagttttctaagtttagacaaggctgatggtagctccccgcttagaccacaactatcgatatatctgcagttggatgatagaaatgattaaggtcaatttatttcaaatacatgtgcaatacaataaaattaggtcaagaagaagaaagattttacagttcctcaagcttggtcatgttttctagtacttcaggaagtggaccgacaaacttatttgtgctaatgcccctaaaacacaaagagagaacagtgagcaagtaaaatatatgtgtgtgggtgtgcccctttttggagcaatcttttctattgcttggcagagtactcttaaaagcaatgagcctctgatcgacaaacagattgaggttttcagaagttcaatatgattataaaatttcaatgctgtttatttattttcttttttccacaatacagaagaaataatcacttacaacgcaaggagattgttgagattgccaagctcccttggtaaaattccagttaacgcattgattcccaccaaacttgtagttttgtaaaaaaaaaaaaaaaaaaagaacatggcaagtgaatatgtcggaagataccatgtaatagcaagttttaagttgaaatgcttcgttattagaaactttagaactgtaattcttacagatactgcaatgccgtcatttctccaataaatgccggtaaagatcctgtcaaataattttgctgtaaattcctgaaagcacaacaattaaaaagcaaaaaataagatatttgaacttgtatctgcagaatctcttattggcaggaaggaagcatcatccattacataagcctttcattgcaatagcaattggaagtagcatgttaaatgttaccaaaatgatatgaggcacaaatgcactgaagtgaacggtaccaatagtggggccttgttgaagttggactacatattattataactactgaaggcaacatatatatgtacttaaaaaaaggcataaaaaagggaagtaaattctgatgaggaattgaacctcctgaaaaccaacatctcaaccaaaatactccctccatctacttttgatagtcatattttatcttggcacacagaccaaggataagtaattatacttatcatccatttaaacatgctactagtaattattttatcgtttgcctggtaactaacaattattattcaaaattagatgggattaattaaattaatatttactgcagaatatttttcaaaagtttgacagtgattgatagtgatacatattaatgtgctttatcatcaacacatacaagttagctagataggtgagattctccagttctgcaggtatcggaccgacaacatccaacgcgtacaccctcctgcataaacaaacacgtcagaaagtttccttgcatgacagtaacaagaaggaaaagaaaagatactgcaacagcgtgttctttgctaaacgatttgggtggtgttcttgtaagttttcagatccaattcattgtgatatgtgaattagtctgagagcattctatgcttgcaattaccagactacagatcttggaggaccctatggcctctctccagatcttcctctcaggcattccgtcgaacacccggcgtgcggtcgaagcaaaggttcagtcaaaggtgtacgtacagcttggtgatgtggcagacggtcgtgttgtcgtaggagcagtcgcacttgatgcccgggttgatggtttcgctgttatcgatgtcggtcgtttcgtcgatggcgatgccgctgcaagggtcgccggtgatgttccatgtcgtcggcggcttcgtgccccacctccccagaatcgcgttcagcgccgccactgtgttgagttcacatgtccacacaaacaccaattttgaatctcaattatgattacctcgctcccggtaatcaattgatgttcaattttaattttaaatctcaattttagattaattttgatgttttttcgtactttattttttaacaggtcgcaaattaatagcacgtctaatgatctaatctatgttttcctacctgttaccgtcgtctgcttcccgtacctacctgttagccactcccgcgcccgtccacccggtggatggcaacggcagcgcccgcttctcccccgcctgcccggcatccctggtggtactggtggacggggacggagtgtcacgatcctagtttctctgcagcagaaaacacttgaaagaaggaagaaattggatcggaagcagaaagaaggggaagaacagagctagagatgaagaacagatgaagaacaggggagagttggaattagatttgagtttgtttgtaatacaatcttcgaattccccaacttgttaccctgtcggcttatatagcaatttactattcagcctctctctctctctgacagtggcccagcctatgactactgggtccactcactctccgggaatcgcgtgttcggtcatcttgtgcacctggaccgacttcccaactgagcctctgttgcttgtcctgcattgtcgtcaggtgaggtcgccaccgtgacattccccccaccttgagacgaagcttgtccccaagcttcagaatgcggaaaacgtcgacgcaattcctggccattttcccaagtgatgacctgtggatcattaccagaccatcgaacttgcaactgctccaccatcttggatcctttccgcacaaaacggcgatccaacacttgagaaggaacagctgtcagaccctcatctttagactgcaaaattggcaactgtgattgaacaaattcagtaggtgctaaggccttcttaagttgagatacataaataactgggtggatcaaactggtagcaggtaaggccaatttgtaagccacagctccaatacgatccagaatctgatagggtccataaaagcgaaatgccaatttgcaattagcccgagtaaccaccgactgctgtgtgaatggctgcaacttgagataaacccaatcaccaactacaaaagatcgttcagaacggtgtttatcagctgggaccttcatgcgagcttgagcccttaacaaatgatcacgaatcaaattctgcatcttatctcgttcctgtagccaatccgacaactctggtgactgacagagagcattaacagataaaccaaaatatttgggtttgcgaccatatagcacttcaaaaggagtagttcccaaggctgagtgaaaggatgtgttgtaccaatactcagccaaagccaaccatctactccatgagaagggcaagcatgcacaaagcaacgaaggaatgtttccaaacattgatttaccctttccgtttgcccatcggatgatacgatgaactcatacgcaattgagtgccagccagtcgaaacaaggtagtccaaagagtgcttgtaaagattctgtcacggttggaaataagggattgaggcaatccatgtagcttatggatgttctgcatataagcttcagccacatcgaaggcagtaaagggatgagcaagaggcacaaaatgactatatttagagaacttatcgataaccaccaaaatacaattgaaagtagcagatttgggcaacccttcaatgaaattcaatgatacaaattgccaggcatgctcaggaactggcaaagtctgtaataatcctggatatttgacatgttcagacttagctcgctgacagattgaacaggcattggcaaactgaaccactattgtgcgcaaatggggcgaagcaaataaggattttacgcgctgataggttatagtaatgccagaatgccccccaactggtgaagagtgaagatttgctaaaattttctgttgaacaaaagaattagtaccaatccacattctgcccttaaaataaagaacacattccttcagagtaaaatcaggcacaacatttgcactaatgcacaaggtttgaagtttactcaaagcatcagaatcattggcatatcctgcaatgatttcctgaatccaatctggaaccatagaagatatcgctgttaactctgaaacagaaggaaatcgtgatagagcatcggttgcaccattctcactgcccttcttataaataatcttgtaacgaagtccaagcagttttgttaaagccttgtgttgccaaggagtagtcaaacgttggtcatccagaaaacataagctccgatgatcagtatgaatgaaaaactcagagtgttgaaggtaaggatgccaatgatcaattgccagaataatagccaaactttccttttcatatgtcgataatccttgatgacgaggacctagggctcgactcaaaaatgcaatgggatgttgtttctgcattaaaatggcaccaattcccttatctgaagcatcggtttccaccacaaatggttcggtaaaatctggcatcgccagcactggggttgtcattaaagcttgtttaagagactgaaaagcttgttcagtagttgcagtccaaatgtaagattgtcccttcctcaacagatttgtcaaaggtttactcaacacaccatagtatcgaacaaatttgcggtaataaccagttaatcccaaaaatccacgcaattccttcacattggtgggagttggccaattcttgaccaccaatatcttatcttcatctgttgacaccccatttggactaataacatgacctagataggccaacctttgttgtgcaaatgaacatttacttctcttaacctccaggtgatgttctgttaagatctgaaacacagattgcagatgctgaacgtggtcagataaggttctgttgtagatcaatatatcattgacaaaaacaagcacaaacttccttaataagggcgacagtatactattcatgcagccttgaaaagttgctggtgcacttgtaaggccaaaaggcattactctaaactcaaaatgcccatggtgagtcttaaatgctgttttatgttcatccatagcctgcatccgaatttgatgacagccaacccttaaatccaatttagtgaaccaccttgctcctgataattcatcaagcaattcatcaataattggcaatgggtacttgtttttcaccgttatagcattgagatgtcgataatccacacaaaatctccaagttccatccttcttcttaaccaaaagaacaggagaagagaaaggactggaactaggctgaataatgcctttgttcaacatctcctgaacctgtgactcgatttcatccttctgagctggagtatatcgataaggtctgacatttactggcattgccccaggaatcagaggaattgagtgatcaaatactctgaagggggtaatccatcaggctcctcaaaaacttgtgcaaattgagacaacagttgctgaacttcagaaggtacagtctctttggaagaagaatctgtaatggaacataactgaatcagatgtgagatagcctgtctatctttgaattcctgaaactgttgaggagaaatccttgcacactgactcattttagattgaattccctgtaaagtcacagattgttgttgccaggtaatggtcaatgttttcttgatccaatccactctcattagactatgctgcattaaccaatccattcctaaaatcatatcataacttccaagattcaagatcttaaagtctgtacagaaaacccttccttgagtcatccattcacaatttggtactgatgcaacacatgacagaactgttccattggctaccttcacctgagatttgttcaataatggcacaactccagaaagcttctaagcaatctgacaactaatgaagctagctgtactgctagaatccaccaaaatcaaaactctttgccttgaatgaatcctaacattctcatataacccacagcttcagatccatgcactgcctgaactgagattgccatcagaccctgattatcagactcctccatactagcctgataagaaaattcatcaaaacccaaagtggtaaacaattcttggacagcatttaactaaacagtactggcacatttgtgtgatggagaccacttctcggcacaaatataacagagtccttgagccctgcgctgagccttcagagctgaaattttgtcagtactgtttccaatcttggaattgtcaactaccttgcggtcatctgctcgagttaaactaccactattcaacacccggtttggtggcaaaggtagaggtaaagcacccttgaaagctggatgtggccgaacctgcaacccattgtcactcttcttcagatttgaagctgattctagaatcacttcttcctgtaaagaagcaattgccaatgctgcctccaaatcctttggccgttgaagaagtactgcatttctgatttctcgacgtagtcccttagtaaaacgatgtgttaggtatctcatattcaaatctggatcataagctagcaattgattcattaactcatcaaacttttcataatattatcacaccgggcctacttgtttaatgttatccatttgtctaatgagcatctcatgaagatctctatcaaacttatttgacacagcaatacaaaagtgctcccaattcgggtacctaacatgagccttagaggaacgtaaccaagatgaggccctcccagaaaagtaaatggtggctatcctaacccaaagtccaggaaaagtattattcacatcaaagtaatgctcatacctcatcttccaatccactggatctgtaccatcgaatttagggaaatctagctttggaactctatggttgtactgacgcccaaattgatccccatcacattccccatttccaaactcagattgatcaaattttttcatcgatgtggagggaaattcgtacgtacccttgaccggagttgggcctagggttgttgccatccctagtacccttccccggtgttcatgagattgcagacggctattcgcccatttgcttccgccttccgccgcagcaacttgagaagaagatggcggcgtaggcagcaacggtgctttcctttcctagtccgtcaacggaactcgaggggaaagcgtcgttggagaagcttgcttcgacttgccgaccagatccagttgcacacggagttcgccgacttcctcccgcgattcctgcacggctgcctccacttgtggcctccaattgttcgtgtcttgatccagcttgacgacggccgcttgagtctcaccttgtgctcgattcagcaacaccagggactcttgaatctccatcagaagcttgccgaagtccacgttctgcttctccatatcttcaacttgaagttgcagacgggaggtgtaccgtggtttctccaggatcgaagcggctctgataccaaaatgtcacgatcctagtttctctgcagcagaaaacacttgaaagaaggaagaaattggatcggaagcaggaagaaggggaagaacagagctagagatgaagaacagatgaagaacaggggagagttggaattagatttgagtttgtttgtaatacaatcttcgaattccccaactcgctaccctgtcggcttatatagcaattcactattcagcctctctctctctgacagtggcccagcctatgactactgggtccactcactctccgggaatcgcgtgttcggtcgtcttgtgcgcttggaccgacttcccaactgagcctttgttgcttgtcatgcattgtcgtcaggtgaggtcgccaccgtgacacggagacagcgacgcccgctactcccggcggggcttgtctggtgtgctcggaggtggcgatggatggccacgtcagccggtactcccacgccagcctggcgcgatggcagcggtggacgcgacggcaccctcagtggtgaaggtggatggtgacggcggcgccaactcccgctactcccatacctgacacagctcggccgtgcgctcacgtcggttgtgcgcgacgaccaccgccacccacgcgctcccgctaccggccaccgaggttgctccctcggctctcctcgccattgccatgggccatggtctccggtgatatgaagatgaggagttggagggaggaagaagaaggacaagggtaaaatagtccaaaatggtattctagcatagtggtattttatcgaagctagtttaagtgatggtattatagaaccactcttttgcgatagtataatctcaaatttctcccgcccaacgccggcagtcctgttcgtcatccgtcgtcgctgctagccatgccgctagatgcaactactgatcgcctccgcttcgtactcccatgccgccgaactagcaggggcaagcaggaaccacagaccttttcatagtgtcaccactcacaaccaggcttgcaagctagcagaccaacccaccatcctgctagcccggaagataagacgttgcaggccagtttagccaccgggcgtcgctcctcccactgcttgcgggcactgctggccagtctactagcggtctagctaaggggcagttattgcaagaaaaaagaagaactggatctggatcttgaggaaaaatgaaggaagaaagaggaaggtgaaggtggctcaaggatcaggggaaaggactagtgttgatgggatgtgggagggaagaggcgccgccacccgccgcgtccgccagcaccgtcgcggcggcggcggcaaggcgcggagtgtgaggagggagcgcaggttaccatgacgagtttgctaattgcaaaccggcaatgataaaagaagaggaagagctcgttgagaaggaattgaagaacacatgttggagacttggagcgactcaatttgataaactgatacgatcttttttgtcataagttgattatccctttttttttttttggattcaaccgtgttgtgcctgaccgattggggggttattcttagtgatttcgaagggttcaagctgttgagaatgccattacgccaatcgaatcaattagaatacataatttgttttatgcttatacgagataatgcatttggtgttgggtatgttttctaattttctgttcatttgttctgcaggtaaggcacgcaacaagagtcggtgtttccggcttgtgttatggttccaacacggttcaaggaggcaggtcacaacaagctttttctttaaatacgtaacgcataatcttcataatattatttttattcctttacgacacatgaacattttttctagtatacaaaagtaatattcacaaaatattctttttaatgttacggcttataatcaactataagtgaaataataggacatgttttagtcacttacagtggaaaaggtgtactagtactaaaatacacaagttgttcatcgccttcataatagagtttaatctatagttttgggcaccaatatggccaaaattttgaccgaaataatagtgtgtgtgggggaggggggtggtattttaaacccttatataataatggaactttgtcgtccaaaattttcttccggaactgtgtgtaatgcattagtacgttatagagtagaagaaaatcatgaaactatcgatctggctagctctgctttcaatagaagcagggttaagtgacctttccttgaagagggaaaaaagatgattctttattttttcaatgagaaaaaggaggtatcttctggaatttggtccaaaaaaataattgaaagaagggacaagaaacagccaagaagaaaagaattctactatcaccgaaaagaagattataattaacaagctaacaggatcaactctgcggtgctaatttgtctttaaacttgtctaggagaatctgtcttcaaactgctagacgcaagaaacaaacatcaaacgcggcggcctctgcttttctgcctggtagcaggcgctttattctcagctaatttgttttttaatcttaatgaatcgataagcgttcagtctccgttccggcgaaaagacaaaacaagaaaacaaacatcaaaacacgtctctgatctgttcccatctctctgaagactcaaagaaacaaaaaaaaaaaagaagagagaagctgacatgtttgcagcacttgtatgtacatatctctccatttctttttttatgatgttggttagatcaaaacattatgggatggggtagtacatagcatataccttcgacaggatcagttctcggtgcctggtgagcctgagcctgagttgctacaacacatgaacacgcgaccaccaggcagtagtacaggccgagctgccaaccatggccgcctccgccgccgccgcaacgccttcccatcgatctcttggcaggctctccgtcgtcgtctctcctcttcctctgcataaaattataaaaatcgaatcttggtatggctatatgtatattagataaacattgcatttagatcgaaccccaaaatttttcacaccgttacatcaaacgtttgaacacctgcatgggtattaaatatagactaaaaaaataactagttgcacagattgcgactaatttacgaaacgaatcttgtaagcctaattgctccatgatttcacaatgtggtgctacaataaatatttgctaataacatattaattagacttgataaattcgtttcgcgttttactgatggattctgtaattagttttttttattagtgtccaaacatctcatgcgacgtcctatataatatctgatgcgacctagcaaaacctttatagatctaaaacacccccttacatttactccagataagcagcaacctgtcggcaccatggatgcgcaacttgagcagcagccagcaagttgcagacaagtcgttcaaaaaaaaagcaagttgcagacagccagacaggtaccagctccagcggaagtggacctcgacaatcaatcgatcaccatgtgattgtactgccattgattatttggaagactaatcaacgccacgtataagatgtgtactgagatgacgattgaactggtgtcaagttgaccttatctgggtcgtaatttcgacttcataggactgttgcttgctttattaatctctgctaaagtcctgagtatattcctggcttctgcgcgctacaaaagtgcacacgatacacacccacgcacttaaagaaaagaaaccaaaagaagctcaaagactatatatccgaagactagatctttacccatgtatcaggataaagaaattctctacttttaaacattatacttgtgtttttacccctgttaatactcgtggtaatccaatatcttctaaatcatccttcattttcatttatttcaccctataatatactaactgcatcttttctcttctatctaccgtataattcactaaactacagtcatagagaccttattcataaaatccgacatcctaaattcttcaaaaccaacgccttggatcatcccacgtttccctctcacgccgcccacctgaaaatcacgttgcctctgcccctcctctctctctctcagcagaaaataccccccccaccctcatgccaatcgccctagaaccgtcgctgtcaccgatccatcaatgcgccatccttggctgtcgtctccacgcctactcctgaatcctcgtcttctcctcgatccaccgtcactactagaaaaatcatttttaatagtgttacacttttattttcactggcgggtttaataaaaatgtgcttgtgaaaataattgagtgggattgcgaaaatccattttcgttgacagttacttaaaagaagtctgcttgcaaaaatagaggtctttttacaagcggacctcttaaataaccgctagcggcagccaagaccgattgcaaaaaaattatttcactatattaacagacgcacaccgcatttcctctctgcttctcacactccgcctcctcccttctccctctcctcttactcctcctcggtgagcagcggcgctctaggcaccggggtcttctcctctccttggtggcattctctgcgcggcaagcttgggaagaggccagatccgccaccatgaggcgtcggcagccgcgcggggaagagggcggtggcggcagcggctctcggcggcagcggcgtgggggagggggcgatggggagcggatccggcgcctcctccctccccaccggcggcggtgaggtggtgatgacgagaggctggcggcggcacggatttgtcgagctcgactagttttttttttctgcctgttgttccatatgatccagatgatgcagatgttttgtgcatgttgtgatgtttgatctgtgctaatgatgattttgtattttgtgtttgaatttggaaatgagcagccatatgcatatgaattgaatttgaatctagatctctagatgtggatttgaattttgaaaatgaatcaatgggcttttctccaaatcttcgctggcggcttggcagcaacatggttttttttgccccaaattagattttcgctgacggccgatttaacacagccaccagcgaaaatgaatttttgctagcggctgatgtaagatgaccgctagcaaagatccatttttgctggtggctggcttaagatgaccatcagcgaaaatgaattatcgctggcggaatcgtgatcttcactagcctttgttttgtggcggctctaaattccgccagtgaaaatctaaaatggccgcaaaaaaaatggttttcgtagtagtgcgtcgtcgccgtcgaatcctcccttatcggcttcgctcattaatctcatctcccttcgatcctctctcatcgcttccgctcattcgagcaggtacaatagcaggctatgtcagctataaacacatatcgatgagatgaaagaagagagagatgaacagcgggctacagatttgtagtcagctgcagcatgggctacaagatgaaatgtatgtatgacaggtgggaccatgtactaatagtgtagtatacatttatatgtgtttatatgttagtactattatataaattggctattaaattgactacaataatttggagccagtagttggctatatattaaacttgctcttaatccaagcaaaccacctgtctccatcaaggaatatttgagcctccatcgtcgtccacggccactgctcaaccaccagtcgccaccgccgccatccacttccaatgtgcttccaccgcctgccgttgtccacatctatcactatgccctcaacgacatccattcaatccaaggagatcaccctctgcccagacccgaagacgaccagctgctgcggagctcttgaatcatggattggatagtggagtgagtgaacctgccggctacggggagctcgccggaccaggtcttgttgccgtctatggtcattacctaagctcgaacacctgcaaacacataaatgtccatctttttttctgtgacaggtagaagatgatgaaattgaagtgttgtcaagtttctccgaggtgtttgtttttccgatggttaaagtgtagtacaaagtgtgcaaataaaatcaatgttttcaactcattcattaagtatccatgactacaaattattaggacttgatctagcctgagatagccaaggatcgattcattttttttcttttcaagctgtgctaatgtatgtatgttcagaattacataccatttgggttcacatgttcagaattatctaatctatgtgtcactagagtaacaggactgacattcatttatcacttctcctgtagtatatttgctgtaaatatatgaaacttgacacaaatctcacatcttaatagctcaaaatatatgtaacagtactcaaataaacttttcctggagttttctattgtgctttatgtattatagttttcagatattcagaacctattttatactgttcattactgataatatgggaagcattggtaagatgtacaggaatgatgattgtagatatacagacggtacaacaaatttgtctattaccaataacatgcaatttgatgattttgtgcagtccttgattaatgacatcttgaagtacatgaacagttagtactccactagaccttgaattatgtctcctcttttatggatatactttctttcattttaggtaagtatcattttatttagagtttgatttggaaaaattggagtaataactcttcctgattagagctaaattttgtacaaaatctttgagtagcagaattgttctgacctaaaatggagtcctaacatgatatcagtgagagttacaaattgtttgtaatgtctgagtacgaggaccgttctaatttggcaactttaatcaggcagtgtgaattatgcatttcttgtgttcatgaacaatatttgtttgagaagtgaaagatcggaggtatgttttgtcgtggtggatgaacagaaagcccggtgaggatggcaaacatggagtgaagagggtatggtgtatgctgtggcccgaagaagggcctcctatgatggaaattgtgagcaaggctggccctcgaatccttttttttcccctgatgaatatgtaatttcgatatgctgttggaatcggttgaaatctatttgtaactccactgtctcatttccgcatcatatatgtatccattgctgaaagaggtgtaaagaggtaaatagatagcgtgtacccgagcggactatgcatcattggattgtatctatgtttctgatggtcttgtgggtttgaggccttgagcttgagaatgtattttttttctttaccggttggtctttccgtcaccttgatggatgattgttactgcagtttttttagtttccttttacctaactcatttatttatgaataaaaatgtagttttaataatttacttattcaattgttttgggataaaattcttatttgcctctaaaggttgacatttaccaaatgctaccatagcattagcacagataagttactagtcaaactaatccaacctctggcagagactgccaaggcccttggtgctaactacatggataaaattcatcaaactaataacatgagctatgaattactcctagaaatcttggcacatatgaaatagcatgattatgaagtgaatcaacaattttgtgttactaacaatatgtttaggatagaaaaatacggatatatccctctatgtttagaaagaaattaagtgcgggcgtgccagtgtatctaaatatacaatgtaaaacaaacacaaaagagacacagaaacacatgatctttattaattgaattaacaagatacagtttccatatataatataaaatatgcgcgccattgcctgtcgttgaacagatccgacatcagtgatgtggtcttctgattcctggggtctcgagagactccccgttaattacctccgcagatttaggcctacaggagcacctcctattaagctgcttgtggtcgtctcatcgtcttcgcttcgcattctccatgcatggttatgatggtgatgtagatgtgggcgccggcaatgcatccacggccttgtcggtccgtgcgccgatgttggtgatgtagccttagggtcggcttcgcccgccctcgtcgtctaacctcatcggtcttgaacgacgtgtcggtgtagattgcttgaagaagacatgcatggaactgcgtagcttggacggctcgacgtcatagcaacagcatcggaatggtgttaaaggtaagatgagttggtgaagtcagttggtgtacacaacagccgaataaacatggctgggcatctcctgactagatgggatcaaacgaacgaagagttgacgaagacagttggtgtagacggcagccggattaaacatggttgggcacctcctaacccgtcatgcctcttatacaacagggacttgtaatgaagatgttgatgaagaagtcggtgtagacagcagccggatgaacgtggctttggcacctctttcggatgatggatcagcccataaaagggctctatgagggtgccgataacaacagcgaccttggaagaagtaaatgcctcatcggcggaacggctgagggcatttgttggagtagattcagcacgaacggttccctggcatcacagataacaccattctttcttcatgttgacgtagacgagcgacgctccaatacgcagatgagcgacagcattaatctccacgaagagggagagcatcacggacgggcggcatctcaccttggcgtaataaagtgaaagcatcacggatggacaacacgacgactccgacctgacgaggtgaagggcatcgcggccggatggcatctcgtagccttggcgcggcggagagaaagacatcgtggatgcacgaaacgacgacctcggcttgacgacgatgcacgggcaccaagcagtagtggcgctccgacgttgcataggttgagtagatgttgatgatgtcgcaatgcataggttgcgaccagcaaagtaaggacgctcgacgtcttgtcgacgtcgtagcactaggtagatgcgatcttcggcacgctccggctgggtggcgtcacaacggccttctccggcaggtggcaggtgatggttagttgacggagatgagctctgcttggcagcgcctcagcgactcagcgaagaatagtcatcgcggacggataatggcatcacaagtccggcgcaatgaagcagaggtgtagtagccgaacggcatgacgacagtgtgcgggctccgggtagcggcgctcactggtggagaaaccctttgtagtcccggttcgtaacccccctttagtcccggtttccaaaccgggagtaccaatccgggactaaagatcgctatctttagtcccgggtgaaataaccgggactaaagatcgagctgacctttttttttttgcatgaccctgttgctgcatggtttatatatatatatatatatatatatatatatatatatatatatatatatatataaaccatgcatatatatgtttcaatacatatatatgcatacatatatatatgtatatatatatatatatatattatattatattatatgtatatacatgcataatatatatgtatttatacatatatatgttatgcaaatgcatatgtatatagatatatatatgaccaaaatatatttacattatagaaaatgtgtacacatgcatatagaaacatatgtagtcatgtattaattacaatccattatatgtcctagctagctacgatttcgacgtagtagtagtcgctgctagctcagaagctaaggaccggtgaattgtgtttccgtcgtagtagaattcacccatgggatcaaggatttcttcgttgatgaatcccatgagttgttcttgaaccgctgcgataaattccttatgtgtggtcaggttatccctcatgcgaataaactatatgaatgtatgaaattgattagtaattaaacaagaaatcgttacgtaatgaaattttgaatttatttgtacgtacatcgagctctcttgtggtgatgatttggtctgcaaggcagtggcaatactcacacacgtagtagccgcacaagttagttccctgcttttgctttgcgcactacaaataaatgacaaattaacggcgtgagatctaattaatatacagttgtatgtattaatttgaatcggagaaatataaatgtagagcatgtgtactcacaggaaatttgaacctccgcctaaatctttctctccagttgccgcggaccaaatgacggaaccgataccaagccctacatggagtttaaagatatgattcgtagtagaaataattaacataacaagaatttcttaattaacagagaaacttatgccagtacctgtctataagttcgaaaaccttgtcaaacatagactcttttttatccattgagtcatatacattgacggtgcaggccgacaggtcgaagagtaaaagcacccagtggaatctgcaatgtgcgtgggatgcattacatatgaaacacttagcaagttcgtacgggaatgaaatttggtatgtaggaagacagtaaaattaaactaactctgtgttgtacggtaacagtatgaacgtcttgtaatgctgcgccgtcaggagatggatgagattgtcctctgtttcctgcggatattggtcgagcattgcaacgtttactctccgagggtcgataaatccagtatcgaaaaccctccgccgtcgggccctttgaatctccattctataacgataaaagggagtattttattttatatagtctacttatatacaaggacctaattaattaaaggagacgtagtaattaagaattataattgaacgatatacttacaaagtccagcaactcataatagagacgtcgaaggcgtccagctggtatactttgtagatttccttgaaattgatccagagaatatcatctccttgcaagaagtccgggtccctgatcctcgctccgatcatctctctaccggtggcgctcatctccacgtacagctgatggaacttgtacatttgtgtgggtagggactgcaccagctcgggcttgacaagcggtttaccgagttcgtacatgtatttcaattccgccttttctattggttcaactcctagcaattgatccgtagttagaccggtgtcaataataaattcttctatcgtcatgtctttcccggtcaccaacggctcgatctcctggtttggttgctctccaagctgagagactggtttggactttccagaagatgctttcttcagcgttcgctcatagtccgatagcttgatggcctccttgacaggtgcagacatacccctgaagaagttcatgacactggggtctataggaatcttcttttctggacttcgaggcttgaattgtctcttgacttctgatgcaacgtaagcgtcaagctcctcttgcgtgcaatcgtaccccgggtccttgttcttggcggcgtcaactttcgccttcttcgttgcccctgtgtgggcaggcggtggagctggggggcccttgactttgaaggtgccggaagaggagcttgcggaggagtaggtgtaggagcacgaggaggagtcgatgcaggatcctgaggaggagtcgatgctggagcctgaggtggagacggtgctggcggagtatgaggaggagacggtgtaggatcctgaggaggagatggcggagccggaggagatggtgcacgagacgccgcttgtcgcccagggaggatgatgtaccgcctgcgccatagaataatggcatggcttgtgtctcgtagatgcgtctcaccgtctcctccagggtaatccagctcgaggtcctcgtacgcgccttcgaccaactcaacttcgaccttcgagtatcctgctggaatcggcctgcagtggtaagtacctgaagggtccgttgggatggccatgcccgacgccaccttcatgttgtgagagattatttattagtaatcaacatatataagcagcaactagcggaatggctaaatcttacctttattgataagttcttgaaaggaatatgcagctcacatggtgtccgctgagtgatgtcatcaacgggacaggtcgattcgtcctgtgtttgcatggcgtccatgctctgtgatcctacctgccgggagtaaatatcttttcccgctatttcgaaattctttttaaacccggttagggttaagaaccgggactaaagattatagcactgcatatgattttcgcttacatatgtgtttataaaatagaagttaatgcattaacattatttaaagtacaaagattaatgacaattacttcaaaaaattatttttgtctgtaataaattaagtggataaatcgtaataagcaaatatatgacttataattaataaaaattccaatatatatatatatatacttagcatatatatgaatgatattattatattggtaaaaactctaattaagatatgtatgtacatactgcatgatttaaaattaataaaaattgtaatcatcatatatacttagcgtaggaattatattaaattaaatgctaaaaactctaattaacatatgtaaatgccacatgcatgatttaaaccttttaaaaattcgaatagtcatatataagtagcatatgaaagatagtaaattaaattgtgaaaaactctaatatatgaatgatagttttaaaaatatattaaatttaatacttttaaaaattctccagtcaattataattagcatatgaatgatagtaaattaaatgttaaaaactctaattaacatatgaaattgccacttgcgtgatttaaaacttttaaaaatcctctagtcaattataattagcatatgaatgctagtaaattaaatgttaaaaactctaattaacatacatatgaaattgccacctgtgtgatttaaaacttttaaaaattgtaagtatcacatataactagcatatacatgatttaaacttgttgaaacctctaataatcgtgcgtaattaacatatgccatacatcaatttatttatatggataatcaatacatccaaaatagtttacatcgtgtacacaataattacggcattacatcggcggtgacggttgaccgcacgtactttctcctcactattgttccctccttgtgatcgctgcgtgagtaagggatgtcttcatttgataggaggatgctagggtcaatcgtcaccgtgaaagggggttgcccatccaactgatcgtaatcctcgtcagtcttgtcctcaactccgacgatttttcttttgcctgggagaaccacttgacgcttaggctcatcaggccctctgcccttctttcctttgctagacatgtccttcacgaaaaagacttgcgttacatcattggcaaggacaaaaggttcgtccgagtatccaaccttgttaaggtcaacagttgtcatcccactgtcatcaatcattacgcctccaccagtcaacctaacccattggcaccggaaacagaggaaccttgagaggaccatagtcaagttcccatatgtcctcgatggcaccgtaatacgtggcagttgttccatcatgtcccatggcatcgacacgaacagcactgttttggttcgtgctcttcatgtcttgggctctcgtgtagaatgtgtacccattgatctcatatccctagaatgtcgcgattgacccagacggtcccctcgccaggaaggcaagttgttggttgattgactcgttacccatgagatgttgtcgtagccacgcggggaaagtatcaatgtgatgccgtgtaatccatgcatcggacttaccgacgttcctggcgcgaactagagccaagtgctcctcgatgtaaggagctaccaatgaagagtgttgcagaacagtgaaatgggctttacggaataaattgttgtctaccgtcattattgctttccttccgagagttccctttccccgtagtctcccttcatggcgtgattcaggtaccccgattgggcgaaggtcttcgataaattctacgcaaaattcgatgacctcctctgttccataacccttggcgatgcttgcctctggacgagcacggttacgaacatacttctaggttctcatactcctcaccgtgatataggatacaatcgttcggacatgcgtgaatcttatgaacttccagtcctaacgggcagactatcttcttagcctcgtacgttgtctcgggcaatttgtttccccccggaagaatgttcttgacgagtttcaataaatcaccaaatgccttgtcactaaccccattttttgccttccattgcaacaactccagagtggtatccaactttttgtgcccctgctcgcaacctgggtacaacgaagttctgtggtcctccaacatcttgtccaatttatgggcctccttttcactttcacagtcctccctggcgtcctgcaacatctgaccaagatcatccgcaacgtcgttaccatcagcagctatttcctcctcgcccgtttgatttccttcaaatccaacatactgagcaaagtccggaatattgtcgtcttccacttcatcttcttccatttcaacaccttgctctccgtgggatgtccaacaattatagcttggcatgaaccccgactcaaacaagtggaaatgaatagtcctggatgcagaatactccttctgattcttacatttattgcatggacaacaaataaaacccctttgcctgttagcttcggccactctcaaaaaatagtgcacgccgtcaataaactctttggaccgccggtcagcgtacatccattgccgatccatctacatgagtcaaaaaaaccgtacacaaataattattcttacaataatgacagtcatacaataattataagatatctttattcatacaaaaatcataaaatattacaccaaataattcttaaaaactatttgtaaagttttaaactaattttaatgtgttttacttcttttaattttcattttagtttgttttctattatttaagattaactttcactagagttttccttctcaactattttataaaaccttgtttagcaaatgaactaaatttccccacacacattttctctctcatcaacttacaactaaattttggagacaaaaaaaagtgtgcaaaacataggtgcaaatgtagtatgacaaaaaaacattggaggatgaagttgcaaaccttttaggcacctctgatttgtatgtaatcaccaaaataaattcaatagaaattttggcatgacctcccctcttttttgaagaaattttgaagcttgctcgggcagctggaggaggaagaagacatatatataggggtgggactttagtcccggttggtagcaccaaccggggctaaagatcaccgggatctttagtcccggttggtagttacgactttagtcccggttggtaatcggggggggcctgacatgacctgacagcattcgaaccgggactaaagcgggactaaagatcaaatatgcccgttacccttttgaaccggaactaaagatcatctttagccccggtttttattgcatccgggactattgtggaaatcggccgaccgacgaaagatggtttctccaccagtggctccgaccagcgatctcctcgagcggctcggcgacgagcgtgagggaaatggccaagtccgcgaaagcaagcgagcatcgatgatgtcgcgaagagactgcgaccggcaaagcgacgacgtcccgcgtctcgacagcatcacgtcgccgggtagagacatcgtgaggaagactgctgcgctggtgaggatgagtagatcttggcggcgtctaaagaagaggttgcggccggcaaggcgatggcgtgcagcgtctcgccgacgtcatagcaacaggtagatgcatcatgagatagaagccgcagccgggccggcgaggacgtcctgcgtcttggcagcgttcctggatgcgggcggctcggcgacattccggcaattcgaacgagacttctgtcgggcacggctcagtagtaaccacagcttgctccggtggggcgcgcggcatgatgatgacctccaaaaactagcatgcccgacgcggtacgaggtggtttgatgtagacggcagccggccatttaatcacagctcagcatctaattgaaaaggcttgaaatcaacaggatttgtttagccatcgcattgacaacttcttgtgcatggcactgaggcatggtgatgatgtgtcacccttcggttggtcggccacgttgccataacatgtatttgctgaatggagttggctcggcatgctgctgctttgcttcggcttgtgctcctgccatgcgatgtgtgtacatgaggccgccgatcgccggtctgatctgtagcctaacgatggcacgtttcttttagcttgggattattataatctaaattattgagtcagattataataagctagattattataatctgtagtagaataaacagttagttattttttttctagattattagagtctagattattgggtttgcaagtctaaagagggagttgagtggcatgatgggtaatttttcacctaataatatggaaaaagctcacctaaatgagcttatcagattataataagctaggctccagattataataagctactttaataagttgtgtttctttcatcttactcctaatattctggattataataatccggcgatatttgttgatgtagatcgataaccaccatcatctgcacgcagcgccgccgccatcgtgaggaagacagtatcgccgtcgtgagaacagtagcagcgccgaacatcggccgcgtcggggggaaggggctgcagccatgatttgatacgctgtgcgtggtggaagcaggagtcttggcaatcgacggtggctccggcgatcctggcgcgctccagcggagcagcgtcacgacgactccgacatggtcagtccgctccgccgcggtgaaacttgcagcaaagcgaggacgtctggcaccttggcgacgtcgcggcttctagtagatgcaccaccagcggcttaaattggcggcgtcgggtccggacgtctcgtcaactcggacgggcgccggcatcgatgaggcttctgtggcgtgtagatgaatcggccagcgcgactttcaccggcggcgaccatatgtgtagatggatgtgtgcatgttgtagatgaaagaaaaacgaaacaatcttgctagcttctagcttggtagccatcaagttccttcttcctcatcgaagtactccctcctgtgcttgccgatgatcgggtcaccgcgcgcgccctctcctaccagacgccggagctccggccgaagtcgctcgctgccgccggtgcgtgtcgtcgctggatggatcactgatgagaattgatggatggatgtgttgacactggtggagaaataatctttgctaggtcgacccaaaaccacaataatcccggttccaaaaagaaccgggactaaaaatgatctttagtcctggttgaaaaccccataggcattctatgatctttagtcccggttggtgttaccaaccgggacttaaaatcatctttagtctcggtttatcccctgtcagattgatgtcatggggccgaagaggtcctggttggtgacaccaaccggaactaaagtgggttggtgttctagtcctggttggtgttcccaaccggactggaactaaaattcaaagcg

SEQ ID NO: 9012 - DNA, 31737 bp, Oryza sativa
agatgagtgcgacatggatgactctatacacttcatccctgctgaattcctcaagtcttgggtcaacaatcccgagtgcttgctccttttcatacaagctccaagcctgtaaattaacataggcaaatctttagtaactagaagataatatgaatgaatgaactaatatgatcttggattatattgaaagatcgttaaatcagcttacccactcaaagagatagatcttactttcctcaagagaattgtcggtgttcgaccgaccagcaacaatctctagtgctaccaccccgaatgcgaaaacatcaaccttttcagtcaaatgtcgtctcatcgcatactcaggagccagataaccacttgacaaaaggttagataagtttaagttagctttgtttgtaaggtacaaatataagagaaatggtgaaatgttcttacaatgtgcccgcaattcctgtactaacatgagtcttcttctcatcataaagcttggcgagtccaaagtcagagatctttggggtgaggtctgtgtcaagtaggacattgctagctttgatgtccctatgaacaatgcgcacgctcgactcctcatgaagataagttaggcctcttgcaattcctaaaatgatctcgaagcgtgttgcccagtccagttttatgctaccgtttcctgtaaaaaaataactttaaggctctgtgaactaaatgatggcaaaatgaagagatgagttctcccaaagagcatgtgaagaaaaatacaattttgtaggtgttggttttgagcaaaagtgaactcaccaaataatgctttatccaagcttccattcttaagatactcataaactaataaaggtgtgttactatcaatgcagcaaccatgcaattttacaagattccgatgttgcacagcagaaatagttgcaacctctgtcacaaactgacttttgccctgatgggatgattgggaaagttgttttacagctataactcttccatcaggtagcacaccctaccagaagaacattgctaaagttatatgtatatttcgaagcatagaccaacaagtttgcaataaagttaaatttaaaaacaaatcaattgaaattgcatagtactaaattagtggaaatagacaaccttatagactggaccatatccaccttccccaagaatgttttgagaactgaaattgtctgtagctaacttgagttcagcattactgaagacatcaggctgtccaactaggttgtataattctacatttatttttcagggcacaccagaaacaataaatcgtattaaaattttgatgtctgaattattgtattattaaaaactattaccttcttgctgttttgccattcttcttctcttctttatgaccataaatattccgaataagatagctgatcctaaaaccgaggcagcaatcacaatcccaacaattgcacctgctttacttttctttttgggtacaccgtttcgcacagtaggactaaaatctgaaagaggatttcatttattggaatccaatgcaatcatttttatgttaacttaattattacgcttacttggagtgatgcttaatgctgagatcaatggtccgtagtaaccttgaataggaatacaacaagtgccctttccagcccagaatagatggatttcaagaaagttttttgacacagttgttgtgtaactcttgtaaacagcagtgaaagattttccaccagccatctttcttatattgaagtccttttcttttagttcaccctgtagaaatgtcaataatacattgatataaataagaaaaagattcagtaaacaaattactatataatggactcaatttatacctggatatatatgtcaaaaaatctccttcctaagctttgccaagttggcgtgtctggaaaacctaactctgcaaatttaagcagaacggtgtaatttccattctcaagtccaaggccatagtatctcagagacgacggcgacatccttgcagtttggaatagttctgaatccactgcattctggatcttctcaccactatgtattatcttactgtcatttggggcctggaataattttcctacattactaacgccccatcttgtttgacttgtaacataatatgatgagtccccaaggtttgtggaatccaattcgtacatagtattatccgaaactctgatagatctattactaccacagtctaccgcaaaggaataatctgcagtcatgacgtgcaaaattataatagtattagaatttcaagacccaatatatcagctgctatggttgaggaaaagtgagacatatacattttggagaaccacgaaaacatggagtatcttcctggaggcagtttagccctggaggtagcatgctgtggagatagttgactcgaaattaaaagtggtgagagagaaattagtaaaaacttatgaatgtacaaataaatgccataagtacccaatgttggtgctgccaagaataaagttgtttgccaccaaattccttgtaaaaaataaaaggttgagtataacatattttttcccttggaaacacaaatttgagaactttcttcttacaattgcagattgttctgggtaacccaggagggaaagctaccagtgagctggttgtatgagaaatctctgcaaacatgaaataaatgcatcattctaattttagctgtattacagggatgaattgtttactcacaagttcgttagcgaagggcttatcccatctggcaattctcctgttaggctgttgttgccaagaaacctgagttggaaagaagacaagatgatgaaacgtggtcatcaattataacatgtgtttcagtagatagtaataacccccagaaagaattccttacaggaatataagcttttgtagattcagaattgatttaggaacattccctgagatattgttaaaactcaagtccctgcgccagaagacagcatacttgaacagacacttacatgaaatttaagaaaaattaccaaaagtttcatggactgtgctatgacccataatgaaaaacgtacaggaaagttaagtttgcgaacttcgaaaaatctactgctccaaggtctccagatatcttgcagttcctcagtacgctgtaaaaaaatatttggtattaacaacttatatctttgtcaatatataaaattgtaagatgtatagttagaatttaaaagtgtcacatacagggtatccagagatgtcagactgctgataaaggccaatgaagagctcccatttacaatatcaccaatccgcctgctcatttgtgtttagtacaccagttatcgtgacaagaggggatgacaatgttgccactgaacgaagtacttacaaggttgtcaatttggttagattagacaaacttgctgggatcggtccttcaaaagaattaccttggaaagccctgtgagttcataatttaagaaagacaaaagttgggagatttaaggtccattagaatataggaaaaagtaacatctacatatcaagacactgttgaggtatgcgcatttcttaaaagtgatgaccaaacagaaaaaaaaatgctacagtttgaattaaaatagatagaacatttgcagaaaatttctgttgcaattccacttgtcttgtggtaaggataaaatcaatgatgtgttaaaaagctaataataaatcttacagatcttccaaattagacaagctcccaataaaatcaggtattgttccagtaaaattgttatctgatgcccgcctacaagcataaaaacatgtttagtgttgagcatataaaaacaaaatgaacatgaccactgtggttctgtttcttgaacttacaggagttttaggttcttaagccttgagagcgtagaagggaatgggccactcaacccagcactatcagtatacctgttattaaaacaatgcagaaatcattgatgtttaactgtaagtatcttgctggtccaaattaaactttgttcttctagaagtagcatctttcaagttagaaagagggggattacaaacttacaattgtcgaagtttggtcaagttgcccaattcttcaggaagttgaccagaaaaattggtcaaactaatgcctctgaaacaaaatgaaatatttcaggagtgatataatttagaaacttacaaatatttaagtttgctcaagttgcccaattcttcagggagttcacccgtaaaattggtcagactaatgcctctgaaaaaaaaaaaagctcaagagtgatataatttccgtgcatgcaatgctactagttgagaaaagtagcattgtatgtgctgacgagccttttgatccacaatattcacattttggatttcacacaaatttataagacaccatttgaaaagtaaaattacactggtgcttaaattttatttgtgattttctagaaatttgtagaaagaacttatgcatctagatttttccatataatgaaatactttagaccattattaatctgtgcaagaagggaacacttacagcaaattgaggttcgtgagatttccaagttcctttggaagtgatcctgagagtggattgaatcccacgtgccttttttttattacaaaaggaagaaggatgattcaaacaaaacactaactaataaggacaatgcaggaaaacttaaagtacaactcttacaattctgtcaaggcagtcaattgcccaatgaatgatggtatggggcctgacaagtaattttgatccaggttcctgaaaagaacaagaaacatcaagtcaattagcagcgatgaatttcaaacatgaggttcactttgaattgatgtcttgctgcaagatattaagaatatgtagtatatatccaacagtagttcatcatcaaggcagagccgagaaaagctagataccatacaagtaagttaggtaggtgaggttctgcaattctgcaggtatctgaccgacaacgttcaatgcgtataccctcctgaataaataaacaaaaaaagaaaattattcacatgagaaaaatactccattcatcccaaaatatagcatctagatttcaaattttattctaatatagtagcaatttagtacttattttaccattgaactacccataataacccttggtttaattatcatcatgcccatgcctcatctccccaaggcaaatcaacaagtccttttacctgtctccttaatggctgtgataagagctaatttctagagaacttttacggtacaatatactaccagtatatactggcagtatataaaagggcatattaggaatttgatagaaaataaaacaacactttagtaatttttggtttaaattgaatctaattgagagtacccggtcctggatcttatcgtgcactaggggaggagcatcctgagcgccatttgatgacaaagcacgtgacgatagcacgatttgattatagaataaccaagaaaagacaaaattaccctttcaaactttatattgcaatctaattaaataaaaaattaaatcaatctacaccattagatcatatatactttttactatttagtccaatatatgagctaactcttgaccaggcacacatagacagccctggtcccccacagaaaaatgggaaaaatacacacacacatcccaacaatattgtttggtcacagaaaatctgcttgggagttgggtctaatttctactatggttgcgcaccatgcgtagaattacaaaattgacgattgattagtttgatctctccagggctgcctggacttactcaaccggatcccagccagatccaactataatggaaggcagatggcagctgtggaaggttaagaactaaagatcttgcaggaagctgaacctcagattccagtacttggaccagtgaccaaagagcagtattaacaaaaaccgatcggtttttttaaactgcccgtggtcagtcatttgtggaagccaaacggttttagctggttttcgtatggcgttgaccaaaagtcatccgtttttgccgggtttcagcttgtgatgatcggttttcaatttaaaataaaatggtaaaccctgccaaagagatcagatttttctggccatgaggcggggtggggtgttgaaataacctggtttcccgattggaggagtaaaaataaaatacaagtcatcatgctttactcctaaatgaaattcggacccacaacagaatttcgggggacataaatgaggctcctctattcctaagtagtgaaactgaaacctgtggtcctatgcatatgctcaatggtgtggtcttgcaaaagttgcaatttcttttctttttctttttttttgcgaggatcaaaagttgcaatttcaagttaagtttccattagaacttatatatccagacgccaatggcctcctgttcccgtaggcactgcgtcgagcacctggtgtgcgtgcagatgaacagagccaaggaagcaggatgggagcgtatacgtacagctgggtaatatggcagacggtgccgctgttgtaggaacagtcgcacttgatgccggggttgttcttggggttgccgtcgaggtcggtgctgccgtcgacggggacgccgcggcatggctcgccgctcatcctccacagcggcgacgtcgtcttgccccatctccccaggatcgcctccagcgccgccactgcaccgaatgtatagtaccagagtaataataagtacaataattaagcttcgcattgcattgatatcaagactaattacgtgtatatatatatatatagcagcatgatttgattacgtgctttgattataccttcgattggatcagttgttgccgcttgctgggcatgaacagcggcgatcagccatgaggagcacatcacgagcaacacccacaccagcttaccactaacaccacccatctctctctctctttctgctgccgaaacaacacggaagcttgttaaatatatagatggtgtgtttgtacgatgcaactatatgcaaagggaggctctgtattttagggcgctcatacgtactctctacgtctcataaaacaccaatctaaaataggacgagacataatttagtacaacgaatttggatactctctctgtctgaaaataattacagccctatagttcaacacttattttggaacgtagtgagtaaaaatatgtccaaattcgttgaattagattatgtatcatctcattataagttggattttttggacggagtgagtagatgagataatccaaatagttcttatcatcactaccttattactaggaaaaatgtctatatttgacgctctttcggattcgtagtactcaaattgtctaattagctattaggtttgctatattttagaatggatatagtatttgtcatcacttcttaataagaattttattaagcagatgaaaatatttgactataacaatgtgagtatctaagcatcaaaacattgtaaactacaaggtcacaaatatgcgcaaaagcctgcttacggtttatatttatagtgtgaaattgaatatgatttgtgaaaaaaaatgaaactttcttatcattatattttataacagtgtttattatcctataactaaaagaaaatcaacggtagaaaatatgaacaggcctataaaaattagccatggagcatctctagcaaactaccaatagtcactactatatagtcacgttgttataatccataggtatctgtttcggtgccaacagctattattcaacaccaataacttggatcattggacatatgtgacaatataggtgctaggggtgcaccccttatattagtgctaaaaacccgaaaaaaataatatttttattagggacctatatggtcatatttaacttctcacgagtcacatgactttttcaacccatattcatgggcatgcttcaagcaatatttgaactcaacccacctctctccttctaagcctccttatcatctaacctacaaacgcttataatctataattaacaccatagataagtcttgttgagatctacaaatttgatataaaatttatgttcatccgattttatatgaaaaagttagataaaaaacacacatatacgagttgtgtcatcgtgccagttttaaacgtaaactagcacctatgggcttataagtgccctttttttaattaagaattggcacatgtgtgatgcctatatatatgtcggtttatgataaataaaaacctatacctataacattgcacttatagatgctaatttattataagaactcgcacctataacttgggggaatattggtgtcggtttttattacaaactggtataaatgagtggttataggtaaaagatggaaaaagcttcataggtgatatggttttaggcaaaccgataagacaggtctctatgtgatgttttgtagtggtgaatgctatcctataagttgttcacggggaacaaatagttttttttaatgaactatttctttggtctgaaaataaatttatctttgcttttcttgtttgtcctaagtaagttcattttgagctatcattgcattggactttgtaaaagaagtggacaaatacattgtaatagataaagtgggaacaattacattaggattcggtaagttggaggatgttattttgctttattattggtatgtgtggatgtgtgaaaaatgagcttattatggaaggaaggtagtatttagtttcgaatgggggcactactttaaatgactacgaagaaataatctgtcttagtgttttctttatttctttttttttcccatgcatgacagttgacgtggggtgggtggacagcgatcaagtcccttataaacgaaagaacaataattcatactctctgtcaaaaggacttgatttctagccatccaaaatttagtaataagaagtaaagagcaatgagtttctcgttaacactatagtagtattgctaggtgggtatataggcaaggtgtattaaagggataagagtcctttgaaactcttcgttttgtgaaaaaatggtaggcaagagactagaaatcatctcgacacattagaaatcaactccttttgagatacttttaaatatctttagtctagattactgttaccaaccagtactaaaaattaaattttagtttggattagtcttactaaccagagctaaagatcatcaagcattagtatcggctggtgttaccaaccgatactaaagatgtactcttagtaccggttggtaacaccaaccgagactaaaaatatttccaaagacacttttagaactagtactaatctaactaagatattggtggttttgtgtaccacgacgaaagattagttctccaatagtgtcggaaaatcaaaaaagaggcaacgtgacctttggacatgacctgatccaaagaatcaattgaaaatatatactagtacgatggtgccacatgcatgtgccggaaatatgaataagcacttgtcattaaaatacgttgacaccaattactttgtgaaaagactacatttatttttgaagaaattaatggaatccatttagtaccaaattgcccaattggcatgactgccaccgcacctactggcactgctatcatactatagcttagctactgcattcctgcaactgatcagaggagttaaactactgttaactaatcagttccctgttgtcacgaaggtataccctccctcgcatccgatccatgcattgtgtccatatatactagtaaaatatttaccaatacttctgtagtacaaccgatgatatttaattgggtaaacattaaagtaaaacctagggctaatcaaacataatatgtatacggcatgtctgcatgaaagacaggggttttctctgtcctcaattactgatcccgcatgattttttttcccgggtcagcagaaggaaaaagatggaccaaatttcattaagatttatagaagctttttacatgagtatggtcctataacattaatctgccgagttgagagtggctcaacactctcaaaacatgtaaacgaaagacaagaaaaacaaaggtaaaggtactcctctcaggattgaaaaatttcgacggacttccaaatagagatttcttcgttcgcatcactgaccagctgctccggccttttgaacctgtgttcaaacactcttctgtttcgctcttttcagaggagccaacacaccatcaagaagagtgaatcgaacgccatcttgtagcttgtccgaaaatggcgacgctcctgctgccaccaatctgcgagcagccagtcgccatggcccggagacggaagtccaccctaatccagtcccgaagcaaagaccaaaccctatattggtgtaggcacattggtgaactgcaggttgttgcagtcctcgaagatggcgttacagagggcgcaaagctgtttcgtgtggccacttaaattcagatttttacaataccattttaaattttgaagtataaaccggtccctgtaggttttccaaaaactagcaaaaagttgatatatgatttttgatcagttctgtataaaagccaggtaaaactgctcggattcagaaaccggtgtccaacgttttcatgaaaaccaataaaatttcatatagttttcgatcagcattgcaaaccttgcataatttcatctctactcgggacatccatgtgtccaggccggtaatctatctagctaggtcaggggccgggaggagctcgtctacgcccgtcattttcccaactactccctccatccaaataaacaaacttatgattagacgtgactaatataataaatatggatagattcttagctatccagattcatggtaataggatatgtcagtcacattaattttagagcaattctacggtccttgagtaggtaccatgaggtaccaaaattttagtgtaaaatttggtaccacctcatagtacctaggtaccacgaggtaccaaatttacaatagaaaaaatggtacctcatggtatctcctcaaggtccgtaaaattgatcttaattttaggttatttttttaagatgaatggagtatgttaaacataaaggtaattagcatgttaccatcatgggggcactgcacgctggtactacgacacttgagctagctagtactcccatcgacgacctgagggttgacgcgaggtgtgcatgcatgtgtcatgctatcaaattaattaacaaagcgacactacatacggcgtacggctatgtttggccgcgtaacgggagtggttagttgcaggggagaggctctctctggctgtgttttgcatagcataactatactttctttatgattgataaacactaacaaatattagaagctaatggctaacatgtaaatcgatcagctttacatatcatcattcattaataattagtccgtactattttagagcattttaaatcttatgcaatatacgtagagcttaatatataagtatgtcaaatcatttttctcacatcattttcacaatgtttcaaattttatcatttctataatatttaacatatattcatccataaatttcgcagcaaattaccacggggtgtcacgtagtaaatatatagatattactctgcccgtgctttttcacctgtcaaaatgcacatatttttatcgatagctactaatattttgcacaaatatatttcttattatatatttgtaaaaatgtattggaaatattaattatatgagtgcattttcataaaaaatgtactgatattattttaacgtatcaaatcttaatttatcttttaatttatgtctgatttaggattttttttatttcttgatcgtactcatctactctaaagattgtatctatttgtcgacgcaatgagtatgtatgaatattatttatacatattggtcgttggttcatatatatattaaaattttatcagaatttatacacagcattaaaagtttatcagaaattacgtgtaaaggtcgtatttggtactcgaaattactgtgcaaggaaaaatgtactttctttttagataataaggcaaaatgtacttttaatcatcctgtataaaaaccagataaaccactcggttttcgtaaaccagtctccagctctttcatatagctttcatgtattaaaaccaattgattttcatatagttttcagatctcctttcagttggcagttcatgatcacgtacacaacgatccattttgaaattaattagtaccaccaagtggcaggccagttgttaattaagcttgagtactatctctattccaaattaattgtttatttacgttaattcaaactttatgttgaaataattgatcataaagaagtattacttgtcccatcaatcacttataattcaaaatttcacttctctgtgtacactcagccatcattccacattgaactatacatcacataataaaaggtactataatcttttttctaaaaccttagcctatgccaaataacccagaacgataattaatatgggactgagagagtaacatatgtagcagaaaccaatagctccccagcgatcgatgtagaatgtaatatatacgtacgtgtactgcggccactctgttgaaatggaatggttttgctaggctgctagctagtactctctctgtttataaataatgcatgatgcattgtacttttagatattggtgttttatttacattttagtacagctattaaaaatattagtcaaggttaaaatatctttaataataaaacaaatccaaacaaaataaatactacgcaaatagtttttaaataaaacaaatgctcgaatgtaaaagtcaataacaatgtactaactccttttcaaaatgtataacacggttgattttcctaataacatttgatcattcgtcttattaaaaatttaatataaatatgtaaaagtataagttaaaattatattttatttgatgttttagtgacaaaaataatatttatataataatcaaacattacgtgaagagttaaccgcgtcatatattttaaaatagtgggtgtgcattttgaaattgagatagtgcatgtaagcatgaccgggcgggcgggccctgtacactgggacgatgacttgacctagttgaatcagatggacgacttgacccatagttgtagaatgcacacgtgtaacaaagtagtgctctcttcgttttaaaatataacaacttttagcctttaaaattatatctcaaaatataacaacttttttgtcaacattttcttcctaatgaatcacaactctccattatttgattttctcacctactttcacttcttatccaatcatatattttttctctatttaattctatctattttcttaataaacgtatcacacactaaaaatccttatattctgaggcaaaagtagtatcatattattgtttattaggtatacggctatatatgtttggccgcgtaatcggactggccgttggaaggaggctctctgtattttgcctagggatgatatatctgagaggaccgtaaaattgctccacatctgggcttgatggattactctatcccttctttcttcgcttgtcagtaacttactaccggttcttagcagcaaaattcaaatctaactatagatttatatttttataagtaatcaaaacattcgattcaaaacttttgctaatatagcttaacatagatttaatttgtcaaacctatatagatttgtctctttgtttgcttgatgtcgcatcgtgtacgtatagatcctcgtatcaacgtactctaatacccatactttccggtctacgagtatccctcgtcgacagacagcattgacgccaatatgccactagctagccatgaccactgaattataatactagcacgtatatagccggccgattgttaagctcgacctagctagcatgcagaagctgcatccacaacatagctacctcgtactaccatgagacacaaacaagttggccatgtgcacgcgtactgcagctagcgacactctttgttgaaatggaagggttgctaggcttcatgtaagcatcgtgagcagtgagcaaacgcttggtcaatcaatgacgacgacgacatgagctactagttgaattaagccgatcgacgacttgaccccaggccggccagatgcatgcatttactgtcatactttgagaagagctgtaatcgcagcaataagtactgaaaggatggattaattagtttacagccccattggctgatatgaggaaaatgcgaaatagcatatttacagatgaaaaataatttatgaataaaacttttatatatgtgttcttaacgatctaaaagcaaaggctaaaaaataaactacgatgaaaaaaaatctcaaaatcaactctaaatttaagattgaaaatttaaattttgactgataagtataagcataagtgaaaagatgaggccgttagtcagttgagcagatatgcatatatttcaaaggaaacttcttcaagccgacgaacatggaggaagtatttaatgagaaattaggggaaatggattctactctttcgatgggatatgttcccttgcaatgatggagccaagatatattatcactttcagcttagggcttgatgatgtattcttaacaaattattttatctcttaagagttaacattttgatagattttaataggtgttaacaccaaaatttggacaacagggatgttgggtctaagagtagggcttaattaaatcctagctgcccccacacttgtctacacccctattgtctcatgtaacctgacaatgtagagtatagcgatatctagtattaattccaacaaaatcaatttcaaattcaacctacgcatttgacaaaaaaaaagacaaataccaatgaatagtaccactactatttatatgggaatttgttttttatatcataatttgtgagttgagttttctatatcatatatatatatatatgtgtgtgtgtgtgtctatatatatatatatatatattatgtaatttttaccggggttgtctaaaaaatcttaaggacaattctctcaaggaacccctaggaaacgggagtaatactacttaagagaaatcgtaaatttttcatgaaattagatatgacaaatggacctaaatattcaatacaagctctcaaatcttttgttttagaaaaacaaaattttgagtttttgaacgacctcggatggagacatgctttgtatcaaaattatagagctcgatgggtctataactttgtagttaaaatttcttttatttgagatcgttgatgccaaaatattcataacggtctctcgtatctatatgtttttgaagatattcagtaggaagtccaaactttgaaacataattttaaatccttatagtatctcctttaatgacttttggccaacattttcttagtatatttcctataattgcatgtctcacaaaatgcttcatatcacccatctaacgtgagccctatatccccaacgcttcacctaggaaggtcccaccgaacccttctctctcatctttacttgctcactagacaccaccaacccattcatttctccacaacagctccaatcttatctcatctctccctctctctctctctctctcccccttatctctctccactatctcatcacgagcagtgatgaggctctcgtcctcgacaacggtggcctcttactctcatcctcgatggcggcctctcacgctcgtcctcgacgacagcctcctcagcttactcaaaggtggctcggtcggcctcggcttcctcaacggcgatgcggcacaacatcagtagccacccgtcctcaatggcaacgggacgagcttggccttggcttctttaatggcccacgcagagcacaacacaactgcagtgaactagtgccaagtctagcgatgcccggtcaccgcagaggaggaagtagttgagactatttttttcccattttttcaatatttaagccaatatgttttaagtgttcctttgtattggatcaaaatgttgcagtgagtttttgtgttgtttcatattcttttccttttatgggtgagatctgtggatgtttcaataattgaaacttgatgtttcaaatgctacactaaaatgttccacgatgtgatccgattgtgtttcaccattttaatttattaaaatatatatgttttgtttgagagctgaaacattttcattcaagcaataaaacatttttcccgattgataaaacatctaaaacattttcaatgaataaacatttttcaacaatacaatgcaacaccgatgttttacaaaatatcaaatgtccgatttgtagcaatcccccatgtgtcgtgctatcaaattagcaaccaccgttacatgatggtggtaacatatgactttgtttggccgccgcgtaactggaattaattattgcaccttggaaaattcttatatatattagctatgtttcaccatggatacacatgcatccgggcgtgttgatcagttactccgtttgtgctttttttcagtgtcaatgcacatatatgtagtatcgatttgttctaataatatgtttgtaaaaaatatatatattggaaatatagttatacatagcttgtaaaaatttgattctgccatccgttaggatttatcaacattctttggaaactattctggaacatgtaacttttaccacatatgtttactccggcaaaattggatttctcacacactatttggaaagatcgataaagggttaactaattaatatttatatcaactagcttaatgcccgtgcattgcaacgggaattaaaaagggaaccaactgtacattgtaaagcctaaaaaattaaaaaaaaaatatttgcatcgtaaaataaattttcattgtttgatggcttagggttgtgagactgtttgagggacccacatggtagtggactagtggtggtgggtggtggcagattcaccaccatcaccattggaatattttaaaagagtatggagtatagatactccacatcttgaattttgaagtactacacaactttcttcagaagcagtgatccctcttttgccatagactgaagatctttgctgcaagaaagccattgcccctcgtaggactgaggtccatacaaccttataactgtcacttgattcatttgccattcattttaattaatttatgcaatgccaagcatctgtgattacggaagtgtgctctagccaacaaattcgtcagtcatttctcaaaaaaaaaatcaaaactaatttaactaaatgaattttaaagcacccatgcaaatacaactggcatatacaaattaccaggatgacttggttatgagtatggaaaatattcagaacaaaataaatccatatatttgttgcaactccacaatgtccaaaaatatcacttgaagctaaaaccagaagcgatttgaacatatttgcattcaccttccatcatatgtgactccggttatcgttggagaaggggtgagtggggaagtctccctctgctctctaaattcaccagtagtagatccagagctatagttgctgcttatatagctggtgttccctcctctgagttgccactcagtgatgtagctcggcttcgtcaccatctcagtcatctcaatgtctccagtaagaattgccaggaccctagacattggtggtcgctggtgtggtgacccttgagtgcacaaaagtgcggcatagatgactctgaaggcttcctcactgtcaaactcatcgagttttgggtctacgattttgattccttgctctctttcatatagcccccaagcctagtataaattatcatacggacaacgtgttgattgtgagaaatagaatcagccaatgtattttcttggatgcaaagaccattgatcaacttacccattcaaagagatagatcttgtcattatcaagggaattgtcggtgtttgatcggccagcaactgtttctagagcaacaactccaaatgcgaaaacatcagccttttcagtcagatggcctctcattgcatactcgggtgccagatagccgcttcaaaaggtcagacgagataaaattagcttagacttcaaaggtaaactcataagaaaagaaagggtgaaatgtgcatacaatgtgccagcgattttcgtgctgatatgggtctccttttcatcatagagcttggcaagtccaaaatcggagatttgggggctcagatcagtgtcaagcaagacgttgctagctttgatatccctatgcacaatccgaatgctggactcctcatgaagataagttatgcctcttgcaatacctaaaatgatctcgaagcgtgttggccaatctaggttcaagctaccatgtcctgaacatggagaaataaggccttgagaattgagatgatggtataatgcagagaagaaaagttcttgacagtacatgaaaggaagaaggtcgcacaactgaacttaccaaagagtgcttggtctaggcttccgttttcgaggtactcataaaccaacaagggtgtgctgctgtcaatgcaacagccatacaatttcacaaggttcttgtgctgcacggctgaaattgttgcaacttctgtcacgaattcacttttcccctgatgagatgattgagaaagttgtttgacagctataattcttccatcaggtagcttaccctgtcaaagaaagatccctgagttacatacatattttgattttacaccagttgagttgcaaaacaattttagttagtacacaataaggtaaatcctcatagattgattgacgacttgtgggaaccactaaccttatatactggcccatatccgccttctccaatcacgttttgagaactgaaattgtctgtagctaatttcagttctgcgctactgaagatattaggccttccaaccaggttgtatagttctgcattttttttcacaacacatgagaaagaataactcatttgaaaattttggcacctaaagagctgcacttaaatgataccttcttgctgccttgccgcttttcttctcttctttaccaaaacaaagatcccaagtaaggctgctgatcctataactgacgcaccaatcactatcccagcaattacaccagctttacttttcttttttggaactccatttctcacagtaggagtaaaatctggacaacgtgtttcagtaatcagaaaaaaaaaactatcatacattcttcaagttaactaattcgggtactgagcttacttggagtgatacttagtgcagagatcatgggtccatagtaaccttgagtaggaatgcaacaagtgcctttgccagcccagaacagatgtatctcaaggaagttttttgacacagttgcgttgtatcttttgttaactgcaataaaagattttccgccagctgttttccttacatcgaagttcttttctttcagatcaccctatgcagatgccaagttggacaaacaaatatgttaataaagggtacaaaataggtaattgaattattgtactatgcgctcaatatgtacctggacatatatgtcaaaaactctccttccgatgctttgccaagtctttgtgtctggataagcaaactctgcaaattgaagaagaacagtgtaatttccattctcaagccctaggccatagtatctcagggacgatggtgacattctggcagtctggaacaattctgaatccaacgcattttgaaattgttgcgagctgtacattaggtaacttccatttggggcctcattgaattttcctacattgctgataccccatcgtgtttgccccgtaacatagtatgatgcagctccgagacttgtagcatcagcttcgtacacagtattatccaaacctctcacagatctattactaccagagtctactgcaaaggaatagtctgcatgcagttaagatgaacaaaattataaccttttattgaaaatcctgagatattttcttaaatgctaaaatcgatgaagagtgcaaaaatatacattccggagaaccgaggaaacaaggagtgtcttgctgtaggcagtttagtcctgaaggtagaatactgtgcgcataacagaaacaagaaataaaaattatgaggaaggtgacgtcaaaaataaatatttgcaaatatgttataggtacctatcgttgttgcttcgaatattaaatttgtttgccaccaaattccttgtacaaaaaaatacgtctaacttgtcaggcaataatttcacataatgtagagagtgtctaaatcaatatatatttgtctgaaatttcagaactttcaacttacagttgtaaattattattggtagcccatgaaggaaagtttcccatgagttggttgtacgaaaaatctctgcaaaaagcctaggattacgaacgtatgaaatgaatatatcattgcaatgctgaaaatcattttagcatacaaattatttagtgaggagctcttcacatctggcaggcttcctgtaaggctattgttcccaagaaacctgaattgagtttccattcaagacgatgaggcatggacattagcttaagatgtatttctataacagaaataatcgccataaaagaattccttacaaatatcgaaggctgttcagattaaggatggactgaggaacttcgcccgtgatattgttaaaactcaagtccctgtgccatatgtttagcaatattacttgagtaaacacttcacatgaaactatgagaaacaataactaataacataaatagtcagtatgccataaagacaaaacctacagcaagtttaatcgagaaagcttagtaaaatttactgctccaagattatcggatatcttgcagttcctcaatattctgaaacaaagaatatgttgtctcagaaaatactactccaatagtactttgcaataaaaaaaacaataatatctatcgttagaacttaaaagcaggacacatacaggacatttaaggacgtcaggttgctaataaaggccaatgaagagctcccatttacaatatcaccaatccgtctgcatatgtgtatttggcactattaagacaagtttggccttcccaacagtcaagggacaaatgtggccaaagaacagaatacttacaagcttgtcaacttggttaacttagaaaaacttgctgggatcggaccttgaaaagaatttccttgcaacctcctacaagttcatgctttaagaaattaggaagatgtaaagtccaccttaagatatacattttaacatcttgcatgaatagataaagaaaatgtaaatttattcataacgtagcatttatgtcgaagttgaggactaaaaaatgaataacgttgttctcttaattcaaatgaaaagaatacatacagaaaagttatgttgcaagatttctattcatctccttgataggatataataaatgattatgttaagaggttgacaaaaatcttacaaatcctccaagttagtcaagctcccaataaaatcaggtattttccctgtgaaatcattatctgatatccacctgcaagcacaacaacatatatagcattgagtgtatgaagacacaataaacataataactgtggctcagttcttgaatgtacaggatcttcagcttcttaagttttgaaattgtcgaagggaatggaccagagaagccagaactatcaatatacctgttattgaaacatagtaattagcatgttcaacaatatagatcttgcttgtcagttctttctgaagtagtgttctactggttaattaaaggggggaggggggagatttacatttgctcgagtttggtcaagttgcccaattcttcaggaaggtttccagtaaaattgttcaggctgatacctctgaaacaaaaggaaatagttgagtaacataacttatttgtctgcaacagtgttgatccataatatccaccacttttgagacttcgttgtttgggtttcagtatattaaacacactaggaaaggaaaatgaaattgaaatgattaagtaacatgagaaatcgtggaagggatatcttacaatgagatgagatttgtgaggttcccaagttcctttggaagtggtccagataatggattgattgctaagctcctttttaaaataaaacaagaaagaaagaaagaaagatgattaagagaaagcaccagcagatattggatggtacaaaaatatataacttggaatttaactcttacaagtactgcatgggaaatttgccaaagaatgatggcacaggaccagtcaagtaattttgcatcaggtttctgaaacaacataagaatcgccaagcaagttagacagagtacaaaaaggaattgtatacctgatttctgatatctatttatccgtgttttgtctggcaagtgacaattgaatgttcaaagaatgggactgaattagtatttactgcagaaacatcgttcaacagattgtgttcgatcatcaaatgttaagacagacatgtgttccgtcatcaagacagaggcataaagagttaggcaccatacaagttagctagatgggtgagtttctccagctctgcaggtatctgaccgacaacattcagcgcgtacaccctcctgcataaacatcatcagtaaaattcctctgatgacaagtaaaaaaaaaaactatatatgctttgctaaatgaattaggtgatagttatccaaattcaattcatcgtcacttgatcccagagcattcctgcaaccaccagcatcctaattttggaggatcgcatggcctctctctttcagtcaggcaatgcgtcgaacaccttgcctgcagctgagacaagaggtttgagttcaggggaggatacgtacagcttgacgatgcggcagacggtgttgttgttgaatgtgcagtcgcacttgatgccggggttgacgatggggttgttgtcgatgtcggtgtcgtcgacggcggtgccggtgcaggggtcgccgccggtgatgttccacgttttgggcggcttcgttccccatcgccccagaatcgtgttcagcgccgccactgcgttgacatttgcacacgaatccaatcaatttttttaccttttattctctccgttttatattataagtcgttttgatttttttacaactttaactaaatttataaaaaaaacatattagtttttttaaaaaaaaaacttattatcgaaatatattcgatcttagatttaatgaaactaatttattatttttaatgtttctattttttctgtaaatttgatcaaacaagtttatctacgaaaaaggtcaatttttaatgtttctatttttttctgtaaatttgaccaaacaagtttgtgtagaaaaaaagtaaaaagactttaatttgaaaggaaggaagtatgtgtgaagagaaaactagcaaaaaaacagaggcgagaaaacaacgtcagaaagagagaaaaaattgactttttaacggtcaccaaccacaccaaacagaactcctctcctccattagtcaacaaaacagaaacagcaggaagaagcaaagatttggatggtgtatcaaacttgaacttgatcactgaacttggaaaacagaagatgtctgatgctgttcatcgccgtaatgatgaaattcttgctctgaactttttcttttactgttcatcacaaaaacgtgggtgttctgacctttggtcttctcttcaatttaaaaaaaaaaaacagtaaacggccaagaaaggaacgaattaataatatccgaggaatccgaggattaactctcactgctaactgctaatttgtctctaagctgttgcaatttgcaagttgcgtcaattatatccatgctaaatgctacacatcaactcatcaaacatgtagtaagtttcatgtctctctaaagtcgcaaggaaaaggaaagaagatccaggcccatctctgaacctccaagaattagagacccctaaatattacagtttcaactgtaatctgttgcaagttgcatcaactgtacccatggtagatgctactacaaacaaggaagcatcatcaagcatgtagtagtcataactcataagccatgtctctctgaactccgaagtctcaaagaaaatggaaagaagagaggaacatgcttgtgtgcaaccatgaaaatctatgtcttttctccaagaacatctctccagcagaaaagaacagcggtgtctctgtaatctgtgaatgcatgtaattaactgataaatacatatatacataccttcgactggatcagttgttgctcctgccggcttctgagcctgagctcgagctactgcaacccatgagcacgcgatcaccagccagcacaggatgagctgatgaccaccatggccgccgctgctgctgctgctgcagcgtatcctcatcatctctttgcctctctgtgtctctgtgtcacgttatctcgctctgatcactctgtctgcctgtctgtctgtctgtctctctgctgcctaaaaatcgattcttgtgacaggtatatatgtacaaattaatgtacttttatcagcgtgtgtttctgggtttaatttagtgatcgatcacatccaccatcatcatatacatatcgatcgggaaggacgacgacggggtcgtccgatattttttttccaagaggcgaccttctgtggttatatcaatcggctacttgcaacccatcgttgtggctagtactgttgcactggactctaaaatgtacaccccggaagaatgacgaggtcatcgtccaatctctctcaaggacttgtgcatggctgggtgggtgccaatctcggtcctaaggctcagccactcaaccttgctgggacacagggccgtcccgtgaaattccggggccctgtacatatactctctccgtttcacaatgtaagtcattctagtatttcccacattcatattgatgttaatgaatctagatagatatgaatgtgggaaatgctagaatgtcttacattatgaaacgggggaagtagtggataaaccaaataacgtacacattaagggcttattcgtttctaagaaaaaccaaaggatttccaaaacagaggatttgaatcctgtatacagcattcggtttacaggattgagctataggaaatttgaagggaaatttccttttgtgccagctgtatcggtaaaacacaggaatttttgcatccagtatgacctcttgaaaattttcctggcgcgaaaagagcgcgccacgagcgcactgcgcgcgtaatcttttcgctctcacgacaaaaaaggtaggtaccgctgaaaggaaaataaaaaaaatcacaggaggcaaacagactcgcatagaagccatcgcctttgatcccatctcctctaccacttcctctcctgtctccacgattgggtactggacctcctctcccacatcgatcgccggcaccggatgcaccttcgccgcctaggtgacaggacgcaacggcaacaacgggaagagccacggcagagatcggcaaggacgcgttgattgcaggtttggtgcctcctcttccgttgttatgcatagatctgatgccccatgctgcttctttgcatacaccttagcatttgggtcgctgcggatggggtcgtagctgtaacacacaagggttcatagtgtctgcccaatggcaatcttgtttggttcagagaagttgttgccggcgggcggcggcgatgagcagcaacaagtagtaggcgagctagccctgttcatagtgtctaccgtacgttctgccgtacctatcggctgccgctgccatctgtttgtctacccctctgtcggctgctctcatcctttgctgtggtgtactgtggtctgctccttgattcgtcctgtgcttcagcgattgaccgctctctcatgatgagtattgaattttagggcttattcgttttaaaggattttttcattcataggattaggaaaaatgaaggaatagagatggttgtggagttcaatcctatgggaagctaaacctcaggaattgaaaaaaaaatgtgcattcggatacaccacaggagaagtgtaggaaatctgccatttgaaatatatttttttaagtttgcatcaactgacatcggccctcaactagctgttagctttgaagtgcataaatagccctcgttagccttgtgcaccattctcccctgttctttctatttgctcatcaactgtggaagaagcttgctgatcctttgttcttctcttcactatctgcataatttttccagaagctttactcatcgtctagccaccatagctagacgttacttgctcgtgtaacaacaaggtactacttgttcatctggtgcaccaaaattgttttttcctcagcaaaagtcttgatttttagctctcttctatgtgagtttacagcatcagtttggtagcatctgcacaccatgaatccaagctaccgacgtatatcagaaagtgatgatgagttcattcattttgttctgcctactttaggagattcatcacaatcatcttgtattaggagaccaatgcacacgtcaaaacttacagggggttgccgtgtacatgagattttaacaggacatgaaagattatgcaaaagaaacttccgtatggaggtcgacatttttcatgcactagtcaataagttacgtgagaaagagtacctaactgacacaatatatgtttcagtagaagagcagattgctatattcttatatacagtggcaaaaaatgcaaccaatgaaacacttcaagattggtttcagcatagtccagatacaatacatagatatttcaaagcagtgctggaagcagtcacaaatctcacatctgtctacattcgtgcaccatccctacacccacatccaataggggggcccctggaaaatgggaaccctattcggtcgctccggccgcgcgcccttagggacggccctgctgggacacttgagtggagggtggtggcgagggccaatgcctggctagtttcgtgatgcaaaccatacaacaaccgtgtgacaatcgcgatgaaaaagatagcatcccgataataatgagaatccgtacgcactacaacaaaaaaacatactggggagacgttttatgaatattgtaaaaaacattattttaatattgcattctagctaacaatgcttcataatgagttgtcatagttaatgatgagatattttataaaatgtctttacgcagcattttttttccacatgcatttttattcttataagattataattgtcggcaatgcactaaccatctcaacctaatctcatgacttgtttatctatgtgtcatgttgcttatatctccctatctagtataaattaacctcctaaaaatccctctctatatatatatatttaaaatatacctcgatgcctttgcatatgattgcataaaaatgcctcaatttagcaaatatatatataatgtgttaaagttgtctcctagaataaacaatatcataggtagaataccttaaaaatgtctctatctctgtatgaaaatcccaaatttagaggctctcctttgaaatttgccattagagaggtatatctaatcacttctttctatgaagctaatgcccactaagcacgtaaacctcagcatgtaagcatagtatttgtttgccctcctaaaatctacatgcaagcatgtcacatcaacctattaaacatgcaagcatatagtaattatatttataatttatttcattctaaaactaaacatgcacatgcaaaatcatcattctcaaatcattttcataatattacaatccaaatcattttatcatttctccattatctaatacatatatctgcaacaaagcgcggagcattatatagtgtttgtaatgacaaaggcaagtgcacatcacaaacagcggcaagtgtgcatgtgccttttttactcgtgctagtgcaaaatcttagactggatcggaaccagtgtgcagcttccaccataataaacctagccatgtcacctccaaccagtgaatttggaccaatctgaccccttgctttgtttctagaggctagatgtagccatatcacgtcttttcaattacacatttacagcagaaataattctatctactttttttagtccgtccattcagatcaattgtctcggaagagcatcatggagtaaaaaataattatctttaaacttttttaagtgagttgttaaaataattaacggtatcgagacctttatcgaactcattcatcctaataatcgacagaacaagaagcttctatcggtgcaatgtttttgttttgtttgttcttatctaattgttgtcagaaaagtttgaaggtaacatgttctctactatactagataacgttttttatagactctacattatggctgtgttcttaagtccaagttctcaacctcactctctcatttactgtgcgctcacttttcaaactgctaaacggtgcgtgttttgcaaaagttttctatagaaaagttgctttcaaaaatcatattaatccatttttaaagtttttaagctaatatataattaattaattacacattaatccattgctccgttttccctcacctaagaacacaacctatatttcttttgactagaaaaaatacccgtgcgttgcaacgggtgaagtttattttaatcttattattattatatggtttagttaagatgaaattcactgtaggagttctcttggatatatatatttttagaaaatcatgagctgcagttaggagagtccgatcgtctcaagttagcatgcgagttttttttaaaaaacagatttcttatatgattctttctgtattatcaaaagtgaacgatcttaaaaaccgaatcaaatacgaatatgtattttcaaaagcaaatgaacttaaaaaccgactcatacatggatgaagtaccaaaataccggcaaaaacatcttcaatttttataatagtggagaaagaaagtaggctagtagtaaccaggagagaagggattggatttaatctaatccatcgaattaaagggatggcttggattaagtaaatccacctggtggatttgaaggcaactccagggatccacaccccaaactatatgtttatcctcagctacgcaatattaattttaacatgatagtagcaattaagctaggaaggtttcatatgaactaagtgacgttagtagaaattaaattattagttgacatgacgttgtcaatctatcccattggatatgcacatgatggaaatgttaagcatttcaattttcccaggattaattgatgatatcaagtactttttgactcgatcggcctcgattcccattggatgcatgatggaaatgttaagtatactctccctctacactttttgactcggcctcgattcgagaatagtactggcacaatttttactacacttatagactttatatatctttttaatcgtatatttataaagattagtaaaagtatatatagggtccttattattcgtgaaaaacctattaatattgtttgtatataatgaatcttaactttttttatttcaagattttcatatttgaccatacatatctaaatgtgaactctcgttgtatgacttgtgcctatatgaacgacaaaaagatctctagctgaaggaacaagcagtgctaccaacagttgactataggctcattaggttcatagggtttttttcagtgaaatatctatgttgtgtttcctgaaatctcatgaccctaggaagattattgaatgctagctaaattatggagtaccatgttaattactatatgagtcaataattagataattagtacgtgtattggtcattcttgttctagtttgaccattgggcttttgaatggattttcgtaggattggtaatttctttgggtttttaactgtttatgtactcggttcacatgactcgcacgcaggaattttagaaaaatgccgtagcaaccatgtgaaaattatatgtccgcaatctataaatatgtacaactccaactttactctataaatatgtagcaacctactttggtgaaccaatctaaataattaaatttgagattactttttttccaagtggacaactaatgctgtggtttctactttctagtaccaattgggctacaacatctatgtaactaccacatagatcaacggataagtgttgagaaatcttgatagctagcggcccttaaaaaataaaaaaaagatttaattgaaagtctctaggtttctcaaacattattttatttatttatttattttctcaaacattaattactcgagacaatgtactctactgaaagagggcgactgatttggattatatgggatatatttggatgttgtactattgaagttaaccctgaaaaggacggaagtaccttgctaatagttgtcggtattattttaatttggctctagtttactcaaaatatagtactatctcaaacatttatttactcgagccaacatactcttctgaaagatggcgattgatttggatttgatatggatttggctctagtaaacaccgaaaaggactgcagtaccttaatttattgttactaattgtcagtattattataatttgctggacattgtgcttgaacgttagttatgttttgacaaattcaatggaacgcgcgttaggtatttcataacaccaacaaatatatatgtagattgatagtgacagaggatggcatttgagcaagtatcttgtctgaatattatttttctaaacaacaatcttgtctaaatattaataaagtttttggcaatacacacctgcttaattagaagttaatactccccctgtcccccaagatatagccaaccttgtttaataatgttatattaagcaacctactaaggtcatcgtacatgttttacacatagtatcactgatcgtatctctttttatatagggctttgatgggtattaatattttggttgttacaaacattgagttcgtcagaagtagcaatcccctcttctctgtagattagatcttcactgcaagcaagccattgcataattatgatccatacagccttgtaaagctgtccatttaattctttgttattttttttctcgaacgagcagaaaaactacgtatcactatattaagaaaatgtctaaaagactcctatacacccattaacattaggaaaaagtacgaattacacccccgaactatcgcggtcgtctgaattatcccccgaaccacaaaaccggacattcttcacccccaactatgaataccggacgaattacccccctcgacccaatctgcggtggttttggtctacgtggcgtacacatggcagttcagtcagcattctatttataattttgtgggacccacctgtcattcacaactctcttctctctcacttctctgtctttccctcttcctctctctctccctctctctctcacggggtcagcggcggcagccgcggcgcgtgacgcggcggcggcggcagcggcggcggcgcgtggcgcggaggccgcggcggtggtggctgccgggaggcggaggcggtagcagccggcacgtggaggagcggcggcggac

SEQ ID NO: 9013 - DNA, 22362 bp, Oryza sativa
attagctgtgtaattaacgagcaatatgctgaatgccatggagtaatacgctgctgcaggtctaggagcccgggcacctgcccatgctggccgggccctggctccaccactgcatctaataaatattctcaatttgcctaaaaacactcaatcttgaaaggaatgaatagtgtagttgattaagaaacataggataaacctgatcccatagaaatgtcaattgaagggataccaatgtgttgaacaaaggcagaataatctgatcctccacctcctattcttccaatcttaatctgcatgtgtatcatcagcatatggttaagagggatagagactagtataggctatacatgcatctactctttacgcgagcatgtgtaacaacaattgctctagctgaacttgaaatgcttaccatggaagaactatcagaagccatccataagtcatacagactttgtgtctcattatctggattttgaaccttcccaagtaagatacgagacgtagcatatttagagaaccgatatagttgatagcgaaaaaagtcaaactaacaataaaactatagttgattgatattcataccaacagaaaaaataaattagatatctgtatcagtaaccaaaaaaaattgcagcaaagatcacttgtaactttttgtcatgcaacattctgttattgactaaaggaaattcatctaaaactggaatacctgtttactcgcctccttaagcaactcatcaagttgaggagtagctgatgcataaaaccctgcaccatacactgcagaatcaacattcaggtaagcaacagttcttgaagttagcatagccctgttctcttcaacccattcagtggatccaaccttcattttcaaacaaaagaaataagaatatagattgacatgtgaattacttctgataatagtcacagagagagagagaggtaccagtccatactcttcggcatcccagttacacaagatgatggtccgtcgaggcctccaacccttcttttgtagctcagagaacctttgagctaactaaatagccacagatcataagttcaatgaaataaaaagtgtcaatagggtaaccagatattgcatacctcaagcaaggctgctgttccactgttcggatcaactgccccaaaagtccatgcatcacgatgattaccaaggattatatagctgcgtgagtttcataattattttactgcattgttttcttattgactcataaattcatcactactaggcacttattcagaatggtgatttttttttttggactgaagaaggtagagaggctctaccttgtaaccattttattaatggtagtcaaggtgttacagcaagagtacattagagtggaaaaacaacggaagacaatgaaaggaaacagaagaaggaaaaaggaaacagaagaagaaaaaaagaagaggaagaaaaataataataagaagaagaagaataggaagaagtaggaaataaatgttgattttttgatgaaaattcagaatggtgatcaacaacgaaatgtaaaacagttctctttcagtttctatggttccgctttattaaatgagtagggcatgaactttacactcttcaaggcgaacactgaacagtggccgagttggggatattgaactctccggacagaaaatatgggcagtacagtattagagcataaagtttaccgttcaggttcttctttcccttcgatcactgagatgacattctgaatagtagccattgtctcgttcccctgcaaacagtgccacccaaatatcatcactacctcgagccataaaaggattataaagcatctcacctttacagtccaattcatcgacagcaacttacaatgtaggtgagattgagcaccgccggcccgggcccgagccggtaaaccggcgagccatctccgccttgccaatccttgggcgcgacatcaccgccgataagctgtagtatagcctccccatctcttcccgacacaggcagcgccggtatccccggcatgtcgtcggtggccatcgcctccgggatgctcacgcgctcgcacccttcggacgacgcccacatcggcgtcgtgggatcccccacccccttgaacgtgctcccgacctgcacaccggtgggcggcatccatggaccatccgggaaggcctcccccgccgcgtagtccttggcatcggtgtatatgaccgccgccgccgcgccagctttccgggcgtttatcacgatgtcgccgcggtacaccttgccgtagcgcgcgaggacgaccttcccggtgacgtctacgccgcgggcggcgaggtaggcgaaatcctccgggcggccgtagttagcgtagacggcctcggcggcgaccgagccggacgcggcgtaggcgaggaaggtggggacggcctccgcggagaccgcggcatagggatcaccggggtatgtgtcctgcaccagcgcaaagggggtggtggcgtggcctggcgccgagagggagagggagcggtggaccgggtaggcgaggaggacggagtagggcacgacgcgggtggggaaggagagggaggagagcgcggagacgacgtgctcggcggcgcgggcgttggcctcggtgcccgcgaggtgggggcggagggtgagcgcgtggaggtgggctgccgcggtgtcgttggatccgagggagaggaagagcgagcggtagtacgacggcgcgggcgcgacgaggaggtggtacgatgcggcgaaggccgccgcaacgaggagcgggagagggtggagccgcgccaccgctcggccgggaggaggaggtgtggggggtatgagcggcgtccgcgcggaggaggacccgtcgtcttcgggcggcggcggcatggccgcgtcgggcaacgcggcggtagactcgccgttacactagcttgagtgcttgactaccaccagggtggatggagacgccgagcagagtgagccgaggtgattcaggtgacaggtcaggtgagccgtgaggccggccgctgggaggagctgagcgcgtgtgccgctgacggtgtggggcctaccactaccagggtggatgctttatccttcgccttttccgacggcgtgggcctagatgaacggtggagacgtggattgattcgagttgggctattttttacgttttctttgtgggagtgggtttcatgtgacgtgtgcaaagcatcttggataaaactatagataagtatatttacatcccttaactcttgctctttattgaatctcatctcccaatcggcaataccgaaattgtggtcgagggatgcgattcaatcaggagcaagaattaaaagaggtaaaatagacttatttctaaaactattgggctttcaatgtctcgtttgaatggaataagttcgtctgaggtcccttaacttgtcaacgaattcgattttcgtccctccctcgactatcaaaaccggtgtaaattaagtccctcgacgggtttaagggtggttttggctgacgtggcgcctacgtggctaatttgactcggtcttcatctgacgtggcgcttacgtggcaattcgatctagaaaaaataataaaactcatgagacccacatgtcagtttcacacgcaaattaataaaaaatggtgggggcccacacgggacccacatgtcatcctcgcccctcctcttcttcctcctctctctccccgactccccttcatctctctcccctctcctttgtcctctctccaggcgtgagtgaggaggggcggcgcgcggcggccgacgggtgaggagggagcgacgcgcggcgccggtgggagacggaagagttggcagcggcgcggcaccggtgggagaggagggagtgacgcgcggtggtcgacgagatacaggagagaagggagcggctagaacgagcaagctcctcgccctctccaccgcggcggtgctccacgcgcagctccagcaagcggaggccgcggcacaggcgagaggcaaggcggtggaggacgacgacaacgacgctggcgccgcggacgacgtcgagcaaccggcggccagcccacaaacgacggcacctccttctcccttttcccctctcctctcgtcgccgtggatccaaagggaggacacggcagcctcgctccccagatcagcgtcggcgactcggcggagctcggcctaggcgtcgaagacgccgcgtggccatgatcctagcatttgggatggcatccgctgagaaaggatcgtgtccacgtaagttgggtcatcgtgcccacgttctgtaatcgcgtatggataaaagggaaagaaacagaaaatgtcacaagcaagtaatatgcagcgccaaaaagactttcccaattggtttgttcttctcgcgtccaagcgtgtgtgtgttgcaggtttcactgcagttgctggagtttagctaacatcgtcccccacctcttcatcgacggtggtggggattgagacgacgacgacaatggcgacggccgtgaggcggtgccgtggcgcgaggagaagcacccaaagacacggccaatacccatatctacaccaccattgacgcaatcccggcgctgttcaacggtttccccctcctcaagggtgtggacaagccatactggtttgaggacaccgacgacgacggtggcgtccttttagcctcatcccgttgccatctccaagagctcgcctgccactcgccccctctctgcccgccgcccctctgctgcgcccaccacctttcggcgccgcagtgccgccgccctttcccgtcgcttgtgccggcttgctccagccgccgccgcttagctctgccggccggccactccgctcagacctgctccgcccaggtgagagagagagaggatggagaggagagggatgacatgtggggccaaataggtcccaccatttattattattttgtgagtttttttacagtccatcaggacttttggtacctctaggtacctacaatcacagccatccattgaggtagatccaacggctatcagtccttggtactgctaggcacaataattccctcgatggtacctccccttcgtcgaacaagtggaagggtaaaactgggatttcgcatagttcgttcgctgattccgcaccgcacgctcctcccaatcgccagcaagctgccaccctcgaggcgcctcctctgcatccttcctccatggcggcggcgcggctaaactcgtggccaaatctaagctatcgggacacctccgccaccctcgctgcaacctgcggccacgacgacgacctcaatacgacaacgaaaagacggccacagtgatgtgctcagcgccacagacgcagcggtgcagccttctccccggcgctagtacagctgaggcggctgttgggcgacggcggcgacttcaggggaacctcctgactgccctccccataccctcccaacggcgccgttcctgcttcctccctcctcccttctcccttctcccgatccaatctcaacccattaggaacaaaaccgaggtcagcaatagatgcaaatccagcttcatctcaatccatcagcaacaaagccgagatcagcaacagctaagttataagcctcttattacgatgtgattcctgacttggtgatcgatgtgattcctgacttggatcttcctctcatccaaaatcataagaagccaatcgtggagaccatgatcaggggctggacgaaatcgaaatcgagggcttctgctcctctgcaggactgcagccacagtcgggtcctggcggtgccgccgccgtcgcgcgaggatagtaggaggtcgcgagtcacttgattcctttttttttcctatcgtgcccttgcttattcaacggttggatttcgtttgatacctggtggtaccaggaccttgaggtaccacttgttggaccgtagcaaaactcttattttgtatgtagctgatatgtgggtcccatgttttttatttttctaaattaaattgccacataaacaccacgtcaatgccacgtaggacgaagatctagtcaaaagagccacgcaagcgccacgtcagccaaaaccgggcataatattgccgagggacctcttttgcacggttttataagttaaaaggatgtgttgtacctggttttgcacttaaggaatgaatttcaaactcggcgacaaattgagggacctagaatgaacttattcccgttcgaatctggcagtaggttgatacgggccttatttgggctttattacgttagttggcctgcacggcctggttgctaaggttgctaacaagcgtgtccgatactcgcttctgcaggccacacactaatccctatacgcaactgatatggttgatcattcgtccgtaaataatcagatcggttttgccgatcattaaccatgtatacagctattacggttgccgagagcttgaagatagaaaggctgtgaaaattttctactgcaacggaaattgcatggccagggtcgccatggcgcacataaaagctgcatgggtcatgctcatgcactccattcatgaaaccgatcactatggccggtgagacataaaggaaggcgaaaggagaaagatttgcaacgtcatccgtcgcccatttatgatttgttgccgccatccgtttcaagctttcaacgctagcttcttcttgtcagtcgtgcaattaaaaacagcactgacgtcgcactgaatcgcttgcaactttcagtcctggagggatctgcattaccagaagcacccaagacggagaggtgtatggcggctttgattaccctaatcatccagacccattcgaatgatgacagaaagcaaacatcagtttttgttggagccaccaaatccacttgtgtacttctagagttgcaccaaattcagagcgcgcgcttcattacgtgcaagctgatgatcatctaattgtcatcattttgctctagtggattctgatgatctgatcaacctgtgaaatagcatcacaccgccaccacgaactgatgcacttttattttcttgtggttgggaaggtacttacgaagtccggaaacagtcctaacgctcttaagttaacgcaagtactcattggcaggcgaaaataaaaaatagaatgaaatagcaatgctactccatgcttaagagacaaacaaaggatccagtctattctggccctaaaccatgaagcagaaaacaagtacaggaaacacaaagcgttcaaaccatcatgggcaaattaaattagccacacagttaggtacgttttctggagttacatgtttagccatttaggtacgttttttaggtgcaaactcgaagacaagtatctaaaaaaaccattagagctaatatgttgtatgaaaatatttccaaatacgaatctagtgacactgtgtgcaaacgtatatattttaaatttagattagtcaaataaatagttgttgactttaggggaaaaggtattatattttcaaacaggcgcagtatacggttatatcgatttctaccaccctctctctattttctctcacctatatgtttaattaatgcatatctcttatagcatttgcgaagaatagactttttttgcgaaaattgcaaaaatcgcctcataaatcatttgaagtttgacattccacccccataagtcattttgttgcaaatacccatctcctatttaggtttgttgcaaaaaccaccctaacacgcatgtacttaatcaaatcagtttgtttattgttgatgtacggttatcacaggttaaattagtcaagtcaatattatcctagtgtttgcattagacttattttctatatttgattgaactttttttttcatatatagcgaaactcagtgtgacaacgtttaagctctcgtctgtaattttatttgtggaatctcaccaaaagagtatcaagaatactctgtaagtatttaattttggtaaaggccatattaactgttcacactttatgaaaacatattgattcggttacgcatgtatttattggggtggtttttttaacaaaaatatgtaggtggatggacatttgcaacaaaataacttacgaggtggaatgccaaattttaagtaactttatgtgatggtttttgcaattttcttttttttttcattccctcctttttcacatgtggaacaaaaaaggatcatcttacgcagtgtgacaacacacgcgcgtggcgtactggaatctgggcgtagaaacggcgtccgccgtacgcgcgccgccgttccggccgcgaggcccgcggcgtcgtgtaaagccagatggtttggctggtaccgcggccgtgtcgccaaaagccgcgagcagctgcggcggcagcgcagcgctgccgttatcagagcgccccgccgctccgggagccgcgccgttttcgttctagtactagcacagagaaggcgggcgctcacggagtcgcggtcacgggccggcggcgtgcaaagcggcaaaataacgtacagggagaaacagaacggcgcagcggacgcattagcgctttgccaggacaggatggcgggagaaacaatagatggaggaataatcaggggatccacctaccgtttactattagtgttgtagagtcttcaacgtgtcccaaaaaaactactactagaaaagaacggaagcgattttgtcagatatgttggacagttcatatttcaagttggaatagtaagtgtaaaattggaccacgggcataagctgaaagtagcatggatggcaaaccatgccagtttagtagtttacattagtatcaaactatcaatcagcctatgaacttgtcatgtgtatacaacatgcacccacggttcgtatgctggctaaacaaggtttgacaagtcaaactacacttctctacgtgacaaattacagttacgaatgaaaagatcacactcgtcacatggtgacatggaaaaggaacatacatatccattatcctgcaacaaattaaacttcttttcctccctgccgtgtagatttcgaaccaacgccatttgcaaacttcatttccccacgcacgctggcgtagttcatcccaacgtcatggccgaaccggggacggtacaagagtacccctccaactaaaacaataaacccattcaatcacaaggagaaaataacactctaatacacaaaacgaagcaaggacaacgtaccgaagcccccaaaacgaaccgtatccgcactcgcgagcccaagaaaatcctctgctacgctgcgaatttagcgcgcagaagtcgccatcagtcgccgggatgcgcgcgggctcgagtcgcgcgacgccaagagcaagagcacgagagctgtgacgaacgcatgcatgcacgcgcgcgtacgtggtgggtacgggctcgcgtagcttgggcggcgctgccatgccaacacgcggcgccagcgaccagcgcaccaaccgcacttccgcagctcgtgaacccgcggccttgctctcgtctcgccctggcgtacgttgtttgtgtcacgcttctcaaatcccttggtgttctcctcttgtccctcccttgccccgtgaaccgtgatcgatcggtcggtagagccgcgagctccttaaatttccccctctcgtttcgcctgcctccatcaccgaacccgcccggccgccacacacgcctctctagctacccggcgcccgttcgagtagcctgtaggcgcgtggcgtcgtaatggccgtggcgcccgtccggctcgtggcgtgcattgtcgccctggccgccgtggcgccgggcggagtggcggggcacacacggggcgtgcggccagggagggcggcggggaagcagcagccgtcgttcccggagaacgcgacgcgggtggaggcgatcgagcggcagttcatggagtgggtacggtacatgggcgggctggagcacagcacggtccaccacgcgctcgcccgggcgttcccctcctactcgctcgtcgtcgacaagaacccggcgttcggcgacttcaccaccatccaggccgccgtcgactcgctcccgatcatcaacctcgtccgcgtcgtcatcaaggtcaacgccggcacctacacgtacgtgcacgcgcgcgcattgggactctgatcttgttggtgcttacgagagagtactgaccatgcacaacgacgatctcgcagggagaaggtgaacatatcgccgatgcgcgcgttcatcaccctcgagggcgccggcgccgacaagacgatcgtgcagtggggtgacaccgcggacagtccgtccggccgggcgggacggccgctcggcacatacagctccgcgtcgttcgccgtgaacgcgcagtacttcctcgccaggaacatcactttcaaggtaacaaatccaccgccgtaattctgtcggggctgtatggcttcgttctcctcaattcgcggtcatgatattgagcagaacacgtcgccggtgccgaagccgggggcgtcggggaagcaggcggtggcgctgcgggtgtcggcggacaacgcggcgttcgtggggtgcaggttcctgggcgcgcaggacacgctgtacgatcactcgggccggcactactacaaggaatgctacatcgaaggctccgtggatttcatctttggcaatgcgctctctctgtttgaggtaacactgtctcctctgctgttctcccgtgaaccctcccccccccccccccccctccattttgtgcgaaatcactacgttgtgttttatgtcatcctgtatcatactgtcatatgtcatgcatgcgccgaggtgcaaatatggaattcatatgcaaatgtttcgggaaaggttcccaggcgttaaatttttttttatcgccatagagtatacagagcaaccaaaacagagcacgtcagagtggcatccaaaaggagtgttccttataggagtgatctgaaatttacgccagtttcctaaaaaaaaaaatttacgccagcacgtttaaatactaccaacacgaagtacgaaccagcttaactggagttcttttcgtacgccatgacgacttgacatgtcgttgttaattatgcgctgaccaaattaggatgtaccgtgtcaattcccgtacatccccgtttaaacacatcaaagtacgtatttttagcctcggttttcctggcgtgcacgctggaccatgtgtcaggtttcaaccaacgccaatgtagcaacacgtgcacctcgaagcggtttggttcggtgttcggcccagcacaccccacaactgacgcgacagctaaccgcgttctctttgccggtgtccgcttctgtttctgccgccgacctcgcggctggccgccggccctacacccacgggcgtgcagagtgggggacgctaatgaacaacctctcgtcgtatgcctactaggcttggctgttatttgagttccgttattttgcactttttttttccttttggcttcggttcgatgcatgtggtgatcggaggtatatgtgtatgccctgcactgcaggattgccacgtgcatgcgatcgcgcgggactacggcgcgctgacagcgcagaaccggcagagcatgctggaggacacggggttctcgttcgtcaactgccgggtgacgggatccggcgcgctctacctcggccgcgcctggggcaccttctcccgcgtcgtcttcgcctacacctacatggacgacatcatcatcccccgtggctggtacaactggggcgaccccaaccgcgagctgtaagacatctcatcgctctctccgaacttatctgtgaagctgctagcctgttacgtgcgatcagagtgaagtttgtagaaacagttttgtatgtacagaagcaaagtcactttaattccctagccaaccgaaagccgcatcggtgttgcactgttggtctgttgctgtttgcaaaagctcggtgtagctaggcgcatggccgtgtgcgcagagaagaatcgtagacatagcttccatatcaataatttgccagtgcacgggaaaagggagagcactctccccttctcggtgcatggcgttgcacgggtgcatctcccccttttgatctctttggaactgaatcatacagcttttgagattcgatgctctgttactaaacaggatcggcaaaaggcagtgacagtctgacagatatatcggtaaaactcagtagtttcctgatgctgtacgcaccactgaccgttgttgctgtattgctcctgctgctgttgcaggacggtgttctacgggcagtacaagtgcacgggccccggcgcgagcttctccggcagggtgtcgtggtcacgcgagctcaccgacgaggaggccaagcccttcatctcgctcaccttcatcgacggcacggaatgggtcaggttgtgagagatcgatccatcggtcgatcgagttcattgtagcacaccgcacacggcatcatagcgtcacacgatgtaaaaagaaaaacagacgaatatatatacagattcatttgcagtctcgttggagattgtcttctttcagtttggtgtgagtttgggtgcaccggcttgcatttactatcagctagtagctgcgaggctctcagcatgtggtgagcgtgtacggcgtttcctgattctccaccgaaagaaggtaattaggctgctagtaatcggggacttataaacgccgccgtactatcgcactctcttacctaaacacgcgactgcaccgttctatactcgcgagcccttgttggtgagaaatcaagtactcaactggcaccactgcctgacgcgacaaagtaatacaagagcaaagccaacgctgctattagaactagcaagttgcaactcaactaatcacgactcgattgaatgcttagggagcgttctttctagtgagttaggatgagaaagcacatcgtaagtccgtgcgcacgcttaccaaactactaaacggtacgtttttgataaaaaaaattatataggaaagttgctttaaaaaattatattaatccatttttgaaatttaaaatagtttatactcaattaatcatgcgctaatgactcacctcgttttacgtatcttcccaatcttctcaatcacctatccctcaaactcacccttagtcgattcatggatgtaacagatcgtatcacagtatgggcctctgacaagaattgtgggctacagatgggccttgtaatagcccaataacgtaaacactgccagctactggttttcaggctctattggctatttcagttagcgtaatcatctgtagactaccaataaaatcaataaaatcgatcattttagtgctttactaacctgattagaggtaaggttagttagtatttaggttattttccgttgttcattggaaaaaggtttttatatcgattcagatcatatcgcttggctactcgacggcgcatccttccgctgctggtcggcaactcatcccgtcgggtgccgacggctccggtggctgcgttcacaaggccgttctcttcccgcctcttcttcgcctctatttgttgcccggtttcagatacgaacagagaatactccctccgtctaaaaaaacaaacatataataatatagtacaacaaatctaaacattaagttatttttttttggaacggagggaatatagaagacatgtagtcgttggcaggaaatttcgtcccttatcggcaagcacatatctcactcgaaaatttcgggtttttccattttccagaatttgatcaaagtttatttaaattcattaaaaaatcatcaaattttcaaaaaaaaaaaattgaaacttcggttcccccacccccaacccgggccgcgccaaaaatacaatttcgagattgctaacccatgtcgttggttaatcgtaaagcatgtgctttgaattataacagtggggactctattagatgtctcgtagtttagagttgtgctccatctttttcatattacaaggcctggtttagttcccaatttttttccctaaaaacatcacatcgaatctttggacatatgcatggagcattaaatatagataaaaaaactaattgcacaattgggggaaatcgcgagacgaatcttttaagcctaattagtccatgattagtcataagtgctacagtaacccacatgtgctaatgacggattaattagtctcaaaagattcgtcttgcggtttacagacgagttatgaaattagtttttttattcgtgtccaaaaaccccttccgacatccggtcaaacatccgatgtgacacccaaaaacattcttttcgcaaactaaatatgccctaagttatttgacttttttcttagtcaaaattctctaagtttgatcaaacttataaaaaaaattagcaatatctacaacaccaaattagttttattaattaacattaaatatgtttgttttttattgcaaatcttattatatttttctataaacatggtcaaatctaaagaaatttaactaataaaaaataaagtgacttataatatgaaacggtgggagtatttaattgaagctgttgagcaagagagtagaaacttcgctatgatatagcagtagcagtaaagggcagagctagagtattcccatgaaccgggtcaagaaaaaattatagctatacctgacctatttttaccatatgtacacccctctcaatataaatttagacacccgtattagcttaaacttgatataaaacagagtaaattaaacaagtggcaacccctctttctcgctatagctccacccgctgcagtttaccacgtcaagttcaaacttttacctttatctcttggtaaattttgggtgtgtttagttcacaccaaaactaaaagtttggttgaaattgaaacaatgtgatgtaaaagttggaagtttatgtgtgtagaaaagttttaatgtgatgaaaaagttagaaatttgaagaaaaaatttgaatctaaacaagagcggctttataatgtttagtcctgattctttccgcaggctggagatggccaaccaaagaaataagctatctatcgctaatcagctgtcggcgacgggcagcggcaactatgccagccacctccgctcctagctctgtgtagtgacgccaccccgcaccgcatggtcgcccttgcgaggcgcaaaacttggagggtttccaactgatgtgtaaatttaaaaattatcatctcatgtttctactaccgttacgttaaatatagtgatagtacgaataggtcttatcaatcaatctatctattatataataaaaaatcattaaacttcctataaacgctactaggccgccacgtggcatcctataaacgctcataagccaccacgtgacactctaataaattagagaaattcttaaaatgacacaacatctaaccgttgattttttttattaaatttagtggaccaattatttataaccattagatttattagaaaaaaatcatctccttatccctaggcccacttcggcctgttggcaattgcaagtacgtacgtacttctgctcagaaaacccacctcccttttcatctattttttcttctattttcgtgcttttagaaaagcataattttaagtcaaacaattaaccaaatgtaacatctaaattagaatactaatatttgatctgcttatatcgttagatattttacatttaaaaacttatatccactttaattcaacttcaaagagaaatatgtcatattaattggggctatattttctaacttttgtgtgccatttaagtaattataaaatataaaatataatgatatatattttatcatcgtatataacttggtgataattaaattatatctaataaaagtaaaatgaacatatctttgagtaatattaaaaaacagcccccccaaacattgtaacacaataaaaagtacacatcttataaaagctcctaaaatattatgtcattctcttaaatcggaaaaaatatactcttaaatcggaaaaaatatactcttaagatattacgttgttctcttaaataagagaaaatcctaaaaattctaacaagaaaacaaaacattcgaccatcagcttcgacttaaatatctgacacattattttagtttgttagattaattatttagaaaaaaaatcccaaacctccattcctccttgccgtgtacagcgtgcgtcattcttctctctattttctatctccttatcaactgaaatgaaaattatatatatgaaaaaaaacacaaataaacctccatctattacttatatcccattaggcgtctaacgactttctaccaacttaattaatttcacttaacatgcatatgagggctatgtacctatacaaattggccttgatacttttaaaatgattttttaggagataaataaatattcataagaaagatgatcatagcatcccaattacacatatgatctatgaagtcactaatattcatttagcaatatagacaataggttgaaaataaaggcgtggctggttgaacattataccgataagcatgtgaggtgcacataggaatcttaacagtgaaacaaccttgaggtggcctttacaataaatcgagtcaattccatataagaattaaagatcatgcccttttttaaaattttatgataaattctgctacagtatattgtaaaaatcttgatgcacaccaatctagaaatgtgtgtatttgttataagacactccactttagtgatgattcgctaaacacactatacactatgaccattacttcaatatttcttgagagaattttagaacgcatgcctttaccccatgccatgttatatgcacttatattttcgtcccaaattgcaaaaatcaaatcatttcaaggatgattcatagaatgaaaatctcaaaaagaaaatatgaacatgaaataaattaaaaattaaataaatgttgctagatttaaaacctattctaaatagaaaaattcaaatatcctactgtggagttaaaatatctaaattttcttataggaacaacctcctttgtttcgacacaatattttctcatcaattcaaaaccgcatgttctcaagtaattttatttttgaatttatatgttgcaatggtaattatgagaaaataaccaacgttcaaaggacacaaaataaatttaattttagtttagaatataataaaaatattttagtaaaaagccacccacacataaatatttataataaaatttcatttacattatataagaaggtgcccacgtatacgcgggctacttttctagttgaataaaaaagaatcaacaatttagatttatttgtactactagtagataacactgtactaggattcttcggttaagagtttgttttgaccctgatttttctttgcattttgcaacagacatcgaacatcgataagaggttggtcgactatatcattattaagaaggaataactgttcttcctccaacagctatcaaaattaactagggtaagtgccggagcgagatatgaaaacgaagaatggaacaaagcaatcaagggagtggacaagttattttgatttttgaaacatgttttattccgatctttcctctgtgctgcattaacccgtgactagtattagcagcaagtagcacttaatgccaagtaaacgccaccgtacttaaagttcagatctagatctatcaccgggaaagaacaaaatctccatcccttggtttggatccgccaatcagctgcagaatatgcaacaaatggacaaaaataagaagcaaaaacttcatcgctgagcagtaaacgtaggactaacacttggtgtccaaaagggtcgtttccaaacgaaaaaacttgtcggttaatgtccaatccatgtacacagaagcagaacagttccgtttaaacgacctgctcagtcacgagacgccttacctaacaatgcaacgatatagttgtctccacgtcttaaacaaagccttaaagtacctgaaatgtaaacatccggttggaattgcaccgacctcaatagcctcgaagggtaaagattgatggcgtatctgtattacagtaatagtacaattaacagtatcgaaggtttatgacacgacgagcatataaaaaaacaagatatgtatattgtatagtacaatgctcctgttgttgggagcaatttttccaagatacgaccaacacaactacttcactgctcacaactcaagtgacaaaaccgtcaatgtgactggcgagtattacacttgaccttactcctagacccaccagctcgtgactgttccaagagtcttgtaaacgttcatgaccaaagtacgaaatgaacgtgacaatgatagcaacggctgccggatcatgagacagaacttcttatttgaaacgaaggatcgtgagacagaactagcttgatgcttcacatcagtcgcttgcttggggtctagccaatccgaaggacaacgtagcacgcaactacagattttgtcttcactgaggcagtaaaagaactccacaagtgacaggactactaaggtcatttgttggcttaagtagagaatttcattccctcatatgccataaaacattttcattgattcaaacttgtattatgccttgacctaagcacatttggattagtatgtacgaaattttggagactctagattttgagcactagtaacatgacatccaaggcaaaacagtcttgcatctggtcaccacattctgtccaagtagtaatctctggccgcctcgtcgctgagctcctcggagtagccggggcgggagtcctcggagcactcgaagcagaagccgctgtcctgcgtcgtccgcgagcacgatctcctcgacctcgccggcgcctcggcggcctgtcgctgcctgggcgcgctctggcaccgcgtcctcgccgctgacgaggccgtgccggccatgtagcgcgggctgccgagcgcgtcccggtgcgagagccgcgccctcgccatgccgtcgacgctcttgttggcgggcgagctgccgtacggcggggcgccgaggcgcggggtgttgtgcgccgtcttggcgtgccgggtgtcgcgctcgtggtgctggctccgctggatcgacaggcgtgggggctgcttgatggagatcggcgacgagcacgacagcggcgccggcggcatgggcgccggggtgaggcagtccgacgagtgatcgcgggagtgccggatggctatccgggaggaccgagagcggcggtggcacgtgtccatctcgacgatccgcgggctgcgctcgtagttggagtccgcgctgtcggagagcctccggcggtgccccggcgtcgtcgtcttcaaccgggtctcctccacagagatcctctcctacacgttgcaataaaacgtaccaaacgaaacgatcagattcattctgcattggctgcattgcgagatggaatgcaaaagcttgacatatcggcacgaccatcacctgctccatggatttccggtaggaagctctcgtggcggcgcgggaggaggcctgctgccgcatgagcgcctgcagcctgtgcagagtcgtggcagcctgcttcctcacgaggtagccacggaccagagcctgcagcttgacgagagacctgagagcgcgaagcgctttcctagcctacggtgtaagattcaaaaattaaacaaacacaaatatttcactaaacaatttgcattaaagaatcgcggtttaggtgacaaggcttatgtcacgctacgtaattaactgctctgacagcaaacaggaactttattataggcagaaggtcaccgctaacgcagagtaaacaattgtgtagccgatcaacgtgcagattttgtatgcaatgcaagcagagtaagagagctactccaatagtctagtagactagttctaacgaccggagtatccattattatggaacggaacattagaggtagtgacatcatatacaggcatatagcaatgcctagcctactttacatactagtagccaaatagagtaacaaaaaagaagtagaagaatctaacaaaaatacggtgcaactgtgcgagcagtgtgcaacttctgactgaccaaaacttttcaaagataaaaaaaaaacgatggatctacaccgtcacaactaacttctactgtgcattagaactctgtctctcggtcaaaagaaaaaaaaaatgaagaaagaagactgagcagcagagccaacaagaaaccatgaacagatcaagtttgaagaacatagtctgatattcagtatacgtggatcataccaggtagcctctgtaagctttctggatcaccatggccgccttctcccgccgagctatggcattttccacctcgccacaatggcacggccgcctcacttccgaaggctctactgctactgcggcgacggcggctaaggcggcctccgatggccgcctgccgctgtctaccccactcctcctgtgcttcgcgaagctccacctgctcttctccttctccgccccgtcgctcacggcgtggttctccttgaggcctttgtgtgcttccttccggccagtcagtagcttcttgagccatctaatgatacgacccatgccgctatgattcctctctacaaacaaaaacacgagaaaaaagagttaaggaacgcgtcgcaaccagatgaacaaatgttacagagagagaagctgagcaagtggtgctgtggtggggtagtactaacttcagaagaagcaaatgtgaagaaagagcttctggccggacaagcgaaggagaagaggcctagagcaagaaacgctgcataaagcttttctcttgtaccgtagcccagggctcccggcagaaaaggaatggcgaattgtacgtgcaatccaggaccgagagacttaaaaaagaaatcccaaacgcgattctcggaaaggcacgggattaaagcgagagactttgcaggacaagcagcatgcagcgaaaagaagcaggaaattacaggaaacggcgaagtttacggcgacgaccggaggaggaactctaggagaaaactctgccacctctctgcagcgatcagtacgtcccccaaaccgtcaaaattcaactctagcggcagcggcggcggcgaaagagcggagcggatatgcgggcgaagggattaggcccgggcgaacttgacgcgtgggttgcagcggcgcaccagctcatgagaaagattccccccaagaatcacacggagagggaagccaacaaacgcgctagccaaggagaccaactcatagtcccccccggttactagctagcgtacagcgccgcggccactccaggacgaagcggcggcgcccccactagcagcttagctcgatcccccctccccacccctgcacgagtaaaacgacgatcggtgcaagaaacaacaaagcttgtgcagcagaggcaagtaggtagtacacggcaaccatcggacccccgcaagggatcaagatggatcgggggatatggtagtaagcttttgtacccgtggggtcgtacggcagggcggcgcggcggggacggcggctcgatcagctttacgccgtggcgccgagcggagcgagcagtccagcacgtcgccgacgctgctgacacggatcagcccagcttcttcttattctacaccatgcagtgcctggccccatgtctgtctgaaacctctgatcatgcacagcacagggaagtcctctctgctagagtagagaagatatactgtactgtagatgagtaggagtaaaatattgccgcctgctggatgatcatcgatggcgtggacactgaacaatagtgtacgcaatatttgctgaatacacagtacttgttctcggtaaggtgtggtgcagtactcctactcgtttcttccctggcgtcacgagacagttcgcaggactcggctcaatacgattctctcgttagagtacataatccctccggcctaaaaaaaaaaaaaccctggattttttttccaactttaacagttcgtcttatataaatttttttttataattcgtattttcattgttgttaaatgataaaacatgattaatattttatacgtgacttgtctttttaattttttcataatttttttaaatataagacggacggttaaatgttggacacggaaagcagagtttgtctttttttttttttttgacggagggagtatactcatactacagtacagtacagaggatcctcctaataagaagcaccagaggtaggtaccgggtgctgggcgtgtcctctcggtgctcccttgcgcggtgtcacagtgcaccagaacggagcaggtatcctgccttttgcgggaaaatggg

SEQ ID NO: 9014 - DNA, 14064 bp, Oryza sativa
caaactgattaacttaaaagtctgtgcgattcaaggcatgtgagaaattaagcgtcttgatgcaattgaacttgataagattgtaacatcaaattttcttcatgctttaaggaaattccatattacagtagagatagacaacggcgccgacggggatagttagaggcgcatgaatcaggaggggaagggcggccaaagcgcttccatcactcttcatcgatccaatcgatctttggggtcttggccgagcatctgggtttaggattgatcggatttgttgaattcgtagacaccgcgtgcttgcctgcttagtccttgaattcattgaagtgccggaccatgtcgttgcggtcacacttcacgccataaaacttgcaccacctctcgtgtgtacgtaacagatgaagcttacaattacatgcatttttattagaaggtttacatgaattttataaataaataactcgttttaaaagtataggaccgtagtaaattttttgcctaataattttttttagcatgaccaaatttacttaagaatagagtatatacacatatacagaattcaggcttcgacaagaggctgctgaagtgaatggaggttgccacaatagcaactttcagaaagaaagacgggttacaataagatgttactcacctaaatctttgaaaaccctagcttcggctctgattctggaaacacacgcacgtttctcttcttccaaaccatccaacaaaccggcagtataagagtgtcgaaagcccttatgtagtcggtccgaaaaccctaccgcatcgttagcataataaatttcatacctaaagttaatgcgcgattgctatttggcacgcgcgcgccagctggcagcctccacgcgacgccttttttttcgattttcctttttctttttcgattttctcctatttgtagccttttattttcacattttttttgactttttttaatcttaaacatatgtgttttcaaaattttgagttgaaagtttttaaattttgatttgaaaagtttcaaatcttgacttgaaagtttttcaatccaaattgaaagtttcaaatctcgagttgaaagttttcaaatctgagtcgaaagtttttaaatatgggtcgaaagttttcaaatctgggttgaaagttttcaaatctgggttgaaagttttcaaatatgggttaaaagtttcaaatttgagttgaaagtttttcaaatttgagatgaaaagttgaaagttttcaaaatctgacttgaatttttttttcaaatttcgagttgaaagtttttcaaaattggacttcacgtatagatttcttatcaatctattagtaaaaagaaaaccttccagaaaaggaaaatattgctaattaccatcattaccgctaattacgatgctgcagggcgttgaggggggtacggctgcgtgctacttccgtagccagcgcgcgcgtaaaataggaatccccaagttaatgagaaaagcttataaacccattgacgatgatcaacttccattagaagattataagatgttactagaacatataaaccgttttatgaaactaaggagtggcagggaacaagattgctctattttttaactcgatggagataaatattattataccaatagaagataaaggacttatttgatacatgtaaactaagcataattttattgtcaacaaagaaatttttaactgtttactttctactaccaacactttgaagtcaatataaaaaaaatatgtaacgtgagagaattaacaggggaaaacatacatgtagttctaccactaatataggtgattatgcacattgaagatagtgcctatgtactccacctcatttcttacacttagaacaagtttacttataaagccataattctaaaaattaatacgtcatatgtaaccaatttaacaatctttccataaaatagttacatataaatatatactcatacacatatggttttaacccatgatatattaactctgtagctcacttttttctctcgctccttcacctaagcacaaatataatgtgacaatttttagagcccacttgcatcactaactgtactcgttcttagccaatttcagttccgcaaatttctgtttcatcagacactacgtgcttgtgtagttcccaacttttttattcaaacttctaacttttccatcatatcaaaactttcctacacacataaacttttaacttttttcttcaaactttcaattttgacgtggaactaaacctaaatcgtatctcgttatctagtgttagtttataattttggtagtttgaccgaagacaaacatacatcctccaaacatctagaggagagtaatttatagaggggagaatagtagaagtagctgattaaggtcctccaagcgaaatcggagtcgagtcttgcaagtggcagcatatttttgagatagaaaaacttgaaatgatgtacacagccagattttacacggtggccgccgcgctaaatccttttcccttcccgtagaactaacacagtactccgctccgcgtctagccgcgggtgacgtcagcaccaccaccatctgcttccccctccctccctccctcccgtctcctcccccattccatcgcatccgcatacaaaccccaaccctagccgtctccgtgctagggccgccgccgccgccgcgcgccgcgacccgagcgtcgccgcatcgctcgcttcccacccactcccccgagatcggcggcgttcctggtgtttggcggaggaatctgaggaggcggcgggggcgcggggggcatatggggctccatggctgaggatgcctgtgctgcgtagcgcggcgaggagggcccgagaggcgcaggagaatccggcggcggcggcggcggcggcaccggccccaccgccggcgaggaggcgaagggcggcgaggaggaaggagccagaagtcgccgtcgaggctgctccggaggcggaagaggggagggaggaggagatcgaggtcgcggatttggggagggaaggcggcggagagaagaagatggaaggcccggacagcggggcgcgcagcgccgacaagcaggccgtcgaggacgaggggaataccactccagtacctgatacggtgagatgttctcttatttgatacttgtgcttactaggcctgtgcgtggactggatgcagcaatcatcaaccaggcctgtgcgtggactggatacaacaatcatacaacatttattctatagatgcacccgtcatccgtgaagctaatttgttttcatcttgtaaagccggaggctaagcaagggttatgattgggaatttgggattgatagctgttccgaacacgtagatgcacccgtcagccgtgaagctaatttgtttccatcttgtaaagccggaggttgagcgacggttcacggttatgattgggattggtagccgttttgaacatttattcagtagattcacccgtcatccacgaagctaaattgttttcatcttgtaaagccagaggttaagcgacagttatgattgggatcggtagccatttcgtgtttgtatcccaaaagatcctagcttcagttgtctccatttattcaaaacgatttttttttctaatctgtttgttttggctttgtgcaggtccaggtgggcagttcaccaaagtatagagttgataaaaagcttggtaaaggaggatttggccaagtatatgttggccgccgcatgttagctaacggtccaggtgcttctgaggtatttagtgccagcctatttgtaaaactgtacttgtaaccgtggatggtattaacggttgaaaataaatatcgtgctttcgaatggtaggtggcgctaaagtttgaacatagaaccagtaaaggatgcaaccatgggcctccttacgaatggcaggtttacaagtatgtgcctcatgatctgccattatgcatagcaagttgcatgctatatataggtacctgacttttatcatggccatcgtatatacagcgccatcggtggcattcatggggttcctcgagtccactataaaggacgtcaaggcgaatactatgttatagtaatgacacctcattttgactactacgagagaaactgttttctttttgccctttccaaaattttaattaacttggtttatgaaaaatgtaggttatggatatgctgggacccagtctttgggatgtttggaataataattctcacacgtgagttttccaatttagctaacatttatgtagacttctaatttatcactaacatagtttgttttggttttcagaatgtctgttgagatggttgcgtgcatcgctattgaagctatctccatacttgagaaaatgcattcaaaagggttggttgccatctctctaattattattatcccctccccaccaaaatacattttatttcctctgttgtaatagaaaatgttttgcaatcgcagatatgttcatggggatgtgaaacctgaaaatttcttgctagggcctattggaactcctgaagaaaagagactcttccttgtcgatcttggtttaggtaactaaatcttcacagattaaccaactgctcgatcattgtctattcaattgttttaaggtagcagcagattgaggagtctgaattaattgagtttaatctatctttaaatggcagctaccaagtggagagatgcttcaactggcctccacgttgactatgaccagcgacctgatgttttcaggtgaccagatggaaattttatgataatcaataggcatcatttacattgtcgctagtgcttttatggataatattgaatgctctgtggcatttccttcgtaggttctgtttcctgtttttggttgagtcctaggatgcagccaaatcaggtcaccctttgtactggtttctggccaacaattattttcattcacttaaattttgttttatcttttttttccccgcattctgcttgttcctgtacaaccattattcattacttctcaacagcactaaatgcggctggcactggtgctggtcaatcactcctcactattatgtttggtgactggctgtttctgcatggaaatagagccctaatttctgtcttgaatgccaactcattcttcatgttgtaggcttatagcaaatcagtaactctgccttgcttttgctgctatttcagggggacagttcgctatgctagtgttcatgcacatctagggagaatcggtagccgaagggatgatttagaatctctagcttacacactagtttttcttctacgggggcgtctaccttggcaaggttatcaggtaattcgccggacccaccattccatttattctgattgtagtaatacatttaaataattgatagtgtgtgcctgcagggtgaaaacaagggtttccttgtgtgcaaaaagaaaatggctacgtctccagaatcattgtgctgcttttgcccacaaccctttagggagtttgtagagtatgtggtcaacttgaagtttgatgaagaacctaactatgcaaagtgtatatcccttttcgatactgtagtgggcccaaatccagatatcaggccaattaacaccgatggtgctcagaaggtacaatacaatcatatattgcaatctgttatactgcttaaaaatcatgactttggttgcactaatcttccttgtaatttctctaaagcttatacatctagttggccaaaagagaggtcgcttattgatggaagagacagatgaacaaccaaagaagaagatcaggatgggtatgcctgcaacacagtggattagtgtttataatgccagacggcctatgaaacaaaggtactttttcttatgaggcccgaaagttttagtttatagttagctatatgatccacctttgttaatgcagtacaatgcaacatacatgttctatattttgcaggtatcactacaacgttgcagattcaaggcttgtacaacacattgacaaagggaatgaagatggtctgtttatcagttgcataacatcttgctcaaatctgtgggctctaatcatggatgctggcactgggttcacttcccaggtttatgaactttcaccacattttcttcacaaggtgagtagcttgctccttgtttaactggtggaaaatcttagcaaactaatcacataacttttcaaggcaaagttacatataaggaagctcttgtatacattgtcaaatgtgattccatggttttctggtcatttgaaggaatggattatggaccaatgggaaaggaactactatataactgcacttgctggagcaaataatgggagttccctggtagtgatgtcaaaaggtaaccagttaaagcatgctgtttcagtgctattcctgtcttataatgtataaattattctttgactaacttagcatgcttttttaggaacaatgtatacacaacaatcctacaaagtaagtgatactttccctttcaaatggataaacaagaaatggagggacggtttttatgtgacttccatggcaacagctggaagtagatgggcagttgttatgtcgcgtaatgctggattttctgatcaggtagcattctttctgctgcaatggtgttcatcaatatttacatttgtttgacaatatgcatttgcatttattttacaggttgtcgaactggacttcctataccccagtgagggaattcaccagagatgggacaatggttaccggataactgcaactgctgcaacctgggatcaggctgcattcgttttaagcgtcccaagaaggaagcctacagatgaaactcaagagacgctgagaacatctgctttccctagtcaacatgtcaaggttcgtctgcttcatatactagtaacgtacttggcagtttttgccgttagtactttgctctgacagagtgatgcttgtctcgttccaggagaaatggtccaagaatctctaccttgcatcagtatgctatggacgtactgtatcctagaaatctggccatctagttgaagccatttcgagttctaggcttctagcattggtctctgctcagagtgcagcggcttatgtgatgctggcaagttctgaatgcgacttagcgtaccctgactatcgtgctgtcgtgaagatatttaatggctatcgttcttaattatagaagagcttgtacagtagtaaatgtttttgtagttcgtgtaatcgttcatgtagtgtactgttaattgtagtgcaaggcgttgtcagatgtgtacacctgtccgatatgattgaactcctatctaatcgtgtgaaagcatgaggttcctgctcgccaccttatgagctacttactgttaccatctcctcacctcacctgtgcgcaatgcgctattgctggcttgccgaaaacctcttcagaatacaaggttctctttcaacattgaattgattttctcctcgcaaaattaaagaaatcttttttgaaaatggtgtgttcgaaacgagacaaacgaccatgcataatatgtaactctaggctgttgctggcttgccgaaaacctcttcagattaaaaggtttgttctctttctacatcgaattgattttctcctcgcaaaattaaagaaatctttttcgaaaatggtatgttccaaatgagacaaacgaccgtgcataatactatatactctaggctagtggaacctgggatgccaggttgtttaaaatttctacattagactgaacataactacggagtagtactttccatttaggatctgggtccctctgaacttggggctcgtgaatagtcgtgacaattttatcgattatgcatgttgcatcaaggccttgcaccaccaatcaactagagtattcagttttactaacatcggaaggtcgttaccgtgtattatcaatctaccatctagggaaaggacctgtacagtactttatttgttaaacatcttcggtctaatctgcgtccttcagcagctccagcggtgaaacataagggcctgtttaggtcgtgaaatgaaaaattttatgtcacatcagatgtttgaccggatgtcggaaggggttttcggacacgaatgaaaaaactaattttataactcgcctggaaaccgcgagacgaatcttttgagcctaattaatccgtcattagcatatatgagttactgtagcacttatggctaatcatggcctaattaggctcaaaagtttcgtctcgcgatttccatgcaaactgtgcaattagcttttctttttatctatatttaatgttttatatatgtgtccaaagattcgatgtgatgtttttgggaaaagttttagcacttttttggttgttttactggactggtaactttgatgccttcatctcggcttggactacgaaagccttgagctttcaaatctatgatattttcatgacatgcgtactgaactcatcttactcttgagtttgattcccagagtccagaaaggtagatcgatcattttccaggcaccaagtttatagtgagcagtagtgactgacaaaaactgtacagacaaagccgagttgcatattcagagaacaggtcctgtatttcacaaatcacaacaaccaagtcgaatgcaagcttgacaggagaaagtggtatccaagcacaaggcaagcagccaccatgaactgcaggttcaacgggatgatcttgccggcatccgcgctcaacacctcgctcgccttgccagccgccgtgccggccgaagggaagcagtagaacaactccgcggaggcgacaccggtgtcgccgccgtttcctcggaggtcgtcattgctgtacgctggcttcccggccacgctcttgtagagcccaccgttgcatgcctgcatacacgcagccggaggaggagacaggtaagtaacgagagaacgaatcatggcgacgaaatgattgcagatgcgacgcgacggcgggcaatgtccacatggcagctctgctagttcagtcagtttcttgtttgcagacaatagaggcgtcgtcaactcgtcgcaggtagaaacttaagatttgagaaacggtttggagctgtaagagatcggacgcgtgacctggagctggtcgccgacggtgacgacgacggcgccgtccatgggcctgaatctggaccagcctcgccgggagaagatgtggaacgccgaggcgccggggcagaggtggagggcgagggcccgcgagcaccgcgagctccggaccagcatcctcaggatgtcgtcgtggcggatcgggccagaggcgccgccgctgcggtcgtcttgcctgcggcggtgcttgcggatgcagaggagcgagccgtttgtgtcagctccggcgatggattgcgtggcaacggcgccgcctcgctgcaggacgtccattattttggttgcggtttgctccagctgaatgaacaaagcgtctgctgtgttcctgggcacaaaaaaaatcaaatggttagtgttgtgagtttggactagacaaattatacaacgatcttagctcgttcttttggtccaaattctgacaatcacatcgactgtttgatctaaactatgtgacgaattctgcaaaattatcaaacctcgcatgtagatcgacatgctagattacgagttttttatatacatattatttctgaggaagacatgatcacatgagtacacagtaacagactaacagtgaagtacctgaagtggctggcgccactttggagcgcccaatttcccgccatttcttggcctccgtcaccaggcgaccaccacatctcctcaccgttctcatcgtctccgttgacctccacctcctccggctccggcgtcgctgcccttgcagttgcagctgccacatgacgcaacgctgctgagaccaagctccggtcgaccccatggccgaccacctggaagcagccaaacgcgacggctgccgacctcagcgcctccgccaccggaccgccggcctccggcaaggccagcaggcgcacgtcgatgaccggaggtgcccacgccgctttcttcttccgcgggacggccctctccggcagccgcagcaccgggactctggcggagcggcgcaagaacctgccgatctcgtcgtcttcgttgctatcggggcactcgccgtatgcaagagagccggagctactgctcgtgaggacgccggtgaccggagacggcggcggtgcccggaactccggcaccggaagctctctcggcctctgaagataggtaaccaccgatgcagtagccatagctgatctcatggcctcttagctttggcttgaactcttatgtgattcgcgttggcatggagaaatggtgcttgagttcttgtgttcttgtagggccatggattttaagcttctttttctttgtggaaaaggggaaatgataagaggagccagatgccagctagaaagagggagagggtggaaggcatgatgctgcatcagccatcattgtgtcagaggtgcaagtagatacactgtgtaccttcgaaatatcattctgcgttctttttaaggatattctggaacagcaaagcgctttgctttgtttcaactgctttaaatcaggcaggtttagcgtccttttgtcaggtcagtcctttattcttgcggttgcacaggtttcgttgaatgagaggatcagttcatcagtcacggtagaagtactccattttaccaactttgggctttcactttcatcagttcactcatatacttgtcagaactcaggagtaccgttgtaaaggagttatgagcattgcgtgcgatgtccataggcatgttttttctcagataatacagtacaaataaatgcgcaatctaccatgttagtggggatagctcagttgggagagcgccagactgaagatctgaaggtcgcgtgttcgatccacgctcaccgcaaatttaatcttctcattttttttcacagaggatttcctttttgctgcggatgtgttttgctaatcttctcattttatttttcacaggatttcctttttgcacagaggatttcctttttgcaggatgtgttttgctaatcttctcattttatttttcacaggatttcctttttgcaggatgtgttttgctaatcttctcgtttttttcacagggtttcctttttgcaggatgtgttttgctaatcttctcacttttttttcacagaggatttcctttttgcaggatgtgttttgctaatcttctcgtttttttcacagggtttcctttttgcaggatgtgttttgctaatcttctcacttttttttcacagaggatttcctttttgcaggatgtgttttgctaatcttctcatttttgatatttcctttttgcaggtgtgtttttgcagggtgtgttctgccaatcttctcattttttatatttcctttttgcaggatgtgttttgccaatcttctccattttacaggatttcctttttgcaagatgtgttttgctaataatttttttccacaatatttcctttttgcaggatgtgttttgctaatcttctcattttttatatttcctttttgcaggtgttttttttttggctattcttctcatttttgatatttttccccatgatttcccttttgcatgatgatctcttttttgcttatttttcttcttctcacaggttttgcctttattccccttccttttgctctcagggactaaaatttgtctcacagatgtccaggccactcactgacacacagggtaacttcttttcttctcacaggattacttttttcccctaacccacagcgcgcaaagaaaaacggaattaccgcatgaaagccgtgacaaaaatggtacaaatgttcgctgctcatcatgaatctttaaccaagatacgttgttgagtcgaccagcgaaacttatacagatacacagaaaacaccagtagcacctcctaaactaccccccgtgtgtttcagcgcaaaagttgagttacatcacagttgccaaacttgcatggatgcttcgtcagattctatttctaccgtcttttggaaggcttggctaaggatcctcctgtcgcctgcgcagttccaggtctcatgctacctgtttaatgaatacaagcttatcagtagaatgttgtttgtgggttccatttctaggtgttctcatagcaattattaaattttggcaaataccgagtactggtgacccagcatgccgaatatttttgggatatatacataccttgagttttcggaacaacctcccttggttttggtctagaagttgatggctgcccgttcttcgtgagaaagaatctggttattcttgatggcgctttatgcctgttatcatagagctcacccattaaacagtggacgtcattgttttcttaaaaataaaaacgaagtgtttttggtaatgcatatggagcaaaagaatgttgaagccctacatattttgcttgcattgtatgctgtttaagtcagtaaatgatgagaagaaaaaagttcatcacactgctagagaaacggtttttactcccggttatagcaaccaggacatctttagtcctggttgagagaaccggtactaaagttgcatagcaaatgaaaaatatatgtgggatgtgggatttgaactcaagatctctcgcctcagccctcactaaccatcccacctactacacacatctgacttgaatagagatgcttttttttttaactaaccctagaggcatcttaccaaccaggactaaagattattttttagtcccgattggtaataccaacccagactaaaaatgtttcgagggacttggagcatcttaagtaccggttcttaatctaaccgggacaatcattagttctccactagtgtcacaagcgcacgatggtttagcacaggagataaaggaaaacaggatgagtacatacgctcgttctgctgatgtttctgaagcaccagcaggagaatactcagtttcccccactgagcaaccatcgtcagatgcattatcttcagcttcagcttcaacggatcctgcaagcccagtatcagctagtggagtcagtgtgaccactattattttcatcgacaagcgtataattttgagtatctggtaagagctctatcactagagttcaacgctacttcacctgatagctgttggttctgttggcttgccacgggaagtgatgacaaaccagtagaggaagtagattgtctcagcaagttactgccatttctgtctgtcattgaattgggagatttggatttaaggagctgaagctgttcgatttccatatcttttcgtgctattgtatctttcaaagatgcaacctggacaataacacaattatgaaatcgaggcaggataatattaataaccaaaggtgaacggagaagctactgacaaaagtatattaacaagttaacaagtactccttattagcaatacgtgctatcaaaatacataataatgttatttttactcctattaaagtctaataatgtatgctcaccttttatttcagttcaacagaagaaacgtttcagttcatctttgaaactgaatattaagtgcttgctagggattataattcaagtaagtggcacacgaactttatatgattaatcagaggctgatgtgccaaaaaaaatacctgttccagcagctcttttatgtctttcccctctctgttacttctcgcagcacctaactcaactccagaaaccctttcagcaaattttaaagtacttatggtttctgaatatgattcaatatcagggtttatttgaacaaacattagtgtctttgcttgtccacctacaagaaagcgcataagttaggcaaactagtaagcctatccacgtacacatctatcaacaactatatgttacctaaagaactctgaagaacttgagttagcttgctgtttctatatggcacatgggcattcttctgggccaaagaaaaaatgacatctccaagagcagagagagatttgttaatatgctgtgcctcttttaatctgtctcctgt

SEQ ID NO: 9015 - DNA, 32681 bp, Oryza sativa
  unsure (1)..(32681): unsure at all n locations
atacatcataagactttctgtgtggggtgaaatctattagtagtttatcatgtatacctgtgggagcgactgctcctttcatttagagctgttgatccaactgctctatttgactgtccaatttccatcaagtctagtacgtctgatgttgatttgacagggtgtaaacttgcatcaggaactacaaggccattaggctgagaagtactccaaattccaagtgtttatatatgttaaggataacatgttagaccttgttttcacatgtttatccatgtcaatattaatagctcaatgaggatagatttgtcgactggaaatagaatatataaaaaggatatcttttttgtgcaatgtcatttgacagaagatcgcgaacttgctcattgtatatttcaaccatctgcactcccacctcatatgagaatgcatttttcctacttagagaaatatcaaacagatcatttaaagcacgatagttaacaccccagtcttctcttgatgtccctggtccactctaaagggtaaaagataagagagtcaatttacaatatccccaatgatagttagcagagcaagtttgctgtcttgaattaattaaacagtagtaaataccattgtgtatgtttntcctgaaccagtttgtccatatgcaaaaatgcaaacattgaatccatcaagaactgatctaatcaaaggttggatatcggagaaaacttcagctgtgagttatcaaataaaagcttgtgagcaatgttcaactgtatgccaaatttttttttctttaattaaattcctgctcttactaatatataccttgagaggaatgtgtaccgaacactttgttaaacttaaacattcgatacccttcctttccttgcttggaggggtttgcaataagaatctcgccattttcaccaatatagtcaattgcagttaatttcccatcttggccagggagaaatggtctaacacgacagtatactctgatgttgcctgataagtcatagcaaacattagagtgcagacaagggtgctatatccatagaatttgttccaatgccaataatactataatggtgtaacagaaatagaaattacctttcaattcctgcacttcattaaataacttctggttttcagcaagaaccttatggtaattttcagcagcatctactaaaccttttaggtcatgtcctatacaagattgaaaattaagactgagcacaagataatgtgtttatatggaacaatacaaatacaactatcatgaggatcagtgcaagtaccaatatttgatatttcatccctccatgtcatttgaagggcatacatttcttgtttaatggattgagatgatatctttatatcctacaatagtttgacaataaaaaacgtcaataaaccaaaatacaatgaaacataattaagaacacaaagttaagcagaccttgatagaaagtttctgattattcataaaactctgaaaaatgtttgcttttttgctccagagttgtgactttaattgggaagtagcctcaacttcttcaactttctttttggactgcataagacaaaactcagcctccttagctcttagtgtcaagtgttcctccatctgcctagcttttgtttccatttgctcacggaattgttcatgcatcctattcatgacttgcatctcttgatggaggctagcaattatattctccgcattctccttttcacggatcagccgaatcatgtcttgctctcctagttttcttttctcatcaatttttgacttctctacctataagaaaaacacataacatattaccagtaaataataataatgcatgcagtgtaaaagatttatttgagacaacatgtagtacaaaataacataagtaaacttaggtttatacagtacaaatgtgtgatgccaatacttttattaagtaaggtatttaactatttatgaatacttactgaagaaagaaaagtgcttgaaagaaaaaaaaaacgagctaaaacatatagcaaatgaatgaagacattttggataccttaactacctcaagccgatttattgccatctgaagaaggaaccacatagttatagtcagtattacaacaaaggattaactctgacaagcatttagaactctcagcaactttggtgtttacctcgttttcttcatttgttccatttactaatgtctcaagtgctttaatttttgaacgatacttatcctcccgtgtcttgatgatgctattttgctgcgacacaagtggtttgattcaggaattaaacacgcgtgggaaaaaagagagatagttcaaaactaatattttttagatcaaatgttgatccgatgatcagcccagctttactaacaaagaccaaaggttcaatcaaaactaatattatccttacatttctaatgtgatctgcttgaataccaatgcggtgctcaatctcctgaataacattccttagtaaatgaacaacacgctgagacaagcaagtcaaaccatcagtaacaaaagataaaaagacactagtatttcattaaaaaaacgaaaatcaaaagaagtacacatacatgtggtatttctcctcttttcctctcaatactttcatccagaatgccattaacaactctaagaagggattgggtaggggcattctgagataagaacatatataatcattaggtaaggagccagtgaaaagaaaaagaaaaaggttgcagtgttaggatacactatgctaaagattttacatctaaactatttgaatgcagcatctctgagatcttagcagcaggaagatctgtgtaggttccatgcttaaattggacaacctcattgatcttttgtcctgcaaaggaaggaaaacataactatatattaacatcacaaggctcctaagtcaaaattggagagaaagagaacttgaaagttataaatgttattcgattcacaaaataacacaagttaagaacattatatgtatggaattataagaaggtatggaagtcaagctgaagtcatgggacttgttagataagttttaatcagtatatcaatatgtaaaattcaaggattaatagaatatgctcccattagcaggagaaaaactcatgataatattgtttctttggacttccgaataccaagtcaatacagcattgatgctcaatattatctgacacctgatgcaaaaaaaacaaaggacataatatgtgtacctgaaagaagagggcttctttgctgggacttagggtatcttttccctggtgtggcaactgaaagcaccggtccatcagtttctcgaagttccagtttccttctgattggagtcttagcagtgctgttagaaatatgaccacccaattgtgtagccacattatcctttaaagccaagagacactccactatagaagacattgatccctgtaatcaccaaaaagaccagagttgacaaaaactactggcacaattgacaatcataacatgaatctgattcaatcaaagctttctgtccctgcctcttacgaatatctgagtacatcaataaccataagcactaggagcaagcatctgagaatgaggcacattttagtgaatactcttgcaactttcttcctaggctaaataggactccatagcagagtctaagatccagctatccaaggccactccggttctgcaaatttcttgtactggtgcaacacttttcagcctttctaatagtctcagattcagtgctgatgttcaaatcaacagtcagaaaacttaaaaggacagttcataaaaaaatatgtggaaataatcatcttggtgaagtcatagactcatcatcactattccatgccaacaagattagagtacttattttctttccaataaggcactagtactgacaccaactatgttaattatattgtcctacaccttgacaaggagatgacatcattaagttggaagttggaacatatgctagtatcataattctactgtatactaacaactacttcacattactggagcaacctcacctcctcaagatccttcacgccaaagcctggcagccccatctctgcaacaacagagaggaacttcttcacatttgaccgttggtccgatgcataaccaccccacgtcccctgcaaacgaagccatatcagcaagagcagcttgcagaaacatatgtatcagttcagttagctcacctccagaacaccgggcatgagcttgtccgcaacatagcatagcgcttctccgttaatgaggtaatcccgcagctcctcgtccgaagaatccaacggcaaatcgaactccggcagtaacccgccgagccaatctatcacctccgcacgccgattggctagaatttgaagaaaaaaaaggtgtcaaccaaggaaacaaccgtgagatgcgtagagatctcaaattgagctctcacattacagtttactgtcacaaaacaacattttaggaacaaaagatctcattttgacctcccaggcaaagaaaagaaggcaagcgagatgcagggaaaaaaaaggggggcttcatcacactgcactggcaaaataggcaacccaaaacgatttaaacgccgcgcaaacttgactccataagcgccaaacctggagcataacatgaaccgaatagcaccggcctcccatttcgcgaaatttttcaaaagcattcattaaactctgaaagatccaaactttgtaggtccgcggctcgaattcgagccacttccccgcagcgagaagagaagcgagaaaccccagatcgacggcctcacccgcatcgaagtcctcgtactcgccgttcaccgtccccatgcctcaccgcccggggccggagcgcgcgcggggcggggaatgccggccgatccgggcccagatcgagccctccgaccgggtcagcgtcggcgcgaccccggatcgagcggcgccgaggcaatgcgggaggcgagccggcgcgagctccggggattttggtttgggttttcctcctcctcttcttccccgtgctgctgggtgtactgcgcttttgctcagcttcccctgctgtcgtttttgttctctttctccggtggttagttggggggtttgatttttttggctttcgcttgcgcgttaagcccgggcatgctcgagtactgtactgccatctcacgctttaactcgcgtcaccttaccggtcgtaggagtaacgaggttttttaaccctcgtgattttactgacaagcttttgactagtggaaatggtcaaacttttataacttagactatcaataactttaaaaatatttagttttaaaaaactagaacaacatatatatttgtcttttaaagtactaaacatgtatttatttattatatatattataatagaaaaataaggtcaaagatgtatattgtagaccgtgttattatttaaaacgttaattaaaatgaaaccagagggattatactggatagacgtaatcacatcagagttggtgccgcaggtatgctggagtattgcatgcaagatccaagatccaacatcgcaacgtgtacaaaagagaaaggagggaggcgtatgcagatgacgggcacgctggggaattctgcaagacagcaacagggcacagggcggaggcttttttttggtgctttctcgggacgcggcgctcccaacagacacgagacggacagcatcagtgtactgtctacaccagtacaccgctgccataggattgatgcgatgccgcgatcttaagtttaagatatgacccttttgcccgggtgatggccggcatcgtcagcggctgggtcgtcacgtcgcgcggggcgggggggtggtggggggttgttgtacacgccccactcggtctgcggcgctccccgtgatctcgtcccgctgcgtgcgtgcgtgctcgcacggctctccctgctcggctgctcctcctcgcggtcgcggcccaggtaggccgtgttcctttttaaaaaggatctgttgcgtctggcgtggtcgtgttgatgggcagccactactttttttttcttcaatgaatcagaaagaaagagattgtgctatttcgttatatataggaggaaaatacaatccctataaataaggtgaaaagactgtacagagctataaggatgtcgagaggagctcctgaagcttttttttctcctgtcagtgcctatacgtcattttccaagaaactaagtctacggggatacgtttatatattttttatatattagaaatatagaaaattaaggagtttttgtacgaaaatagcaatataatactagtattagagcagtccgttccatgacaatcttctccaattctctattctatttgacgaagggattataaattgggtgtaatcaagtgtaagactacaaattaatagtacacaaagcacaaattaatagtccaatcatatgtagttgctcctgatgaatgtgcgtcaacattaggagccgcatggggattgctagatgtcctagctgcacagaagcacttggatgtaacaaaaacgagaatatttgtcctaaactaatacaagcattgcagatcaagcaaggtacgttagaacactagagaagtggatttgcctaagataagatggtcaggagaacaaagaaaaatatgctcggtgcttcgatgctggatgttgtgcctgccttgggcggtggtggccctgataacctggccggttggcctccgcctcttaagactagcgatggaggtgctgcgcctgtgtggatgtgcacccatcagcgggaacttaggccggccatctcacggaggaggcctgtgccgccgggcgcggcggtgatgcagctgcacgcctgcacccggcatgtggcggcgacatcgctagggcgcatgatgcaacagtgcccgacggacggcggttctgtgcaacaacggcgaacagtgtagaggacgaggctgcagcgagcaaccgaacatgagttggggaaggtggcactgtgggagcgtagatttggctcggtactgggtggatttgatcgaaggagggttaaaacatatcaaacatgtatctgaattgttttaattatctgaaaatcaggaaattgctcgatacgtatccagacatatccgatatcgtatttggtacgaataaatggcctgtaagccatatccaggtaacgtaggtcagtgcccaagttcttgcttcctcctttatttttgccacaaggctaggtgtcgtaacttccttgtgttcaaacactcattggttcctttctttccagatttcccagaccaccagaagaatcaagctacgcagccctttcttaggaacctctcttttgttagcaagcatctcccaccagccttgtacagataggcaaggctcccattggcttgggtccaactgctggtaagccacccaggaggctaggagcgtccatactcttttggtgtatctacattgggaaagaaggtggagtgccgattcattcgttgttcggcagagggggcaatgggcgctgtgtggccatcctcttgttgcaagtctatatgaggtctagactctattttgaatgactacctaagcagtgggcagccactactcgtacgccgttctctcaatgcctgagaaataggccaatggagaagctcgacgtcacgcgatggacccaagccgtggatccttgtcgtgccgtgatcatctttggcgagcccccaatgcctgacgccacttcgcccctttgctcccttggttttcgatggctcgccatcctccatcctaatatcttcgattttcagtgcatcacctccgggtctctctgtgaatcgagctccctcacgtccgttccactccacggtgattgccatcgttcggcaccgaaagacgtttcggtcttccgggtgacttcgccgggagaattgcacaatttcatagggtcccttttcttagacctgacaaatcaccagttggatcgtaaattaggtggtgtttgaatcacctgaagatgaagatgaagataaagattaaatgtttcacataaaacgaggtggtaataacgtgtgattaattgagttttaattattacaaacttgaaaaatggattaatcttatattttagaacaactttcatatagaaagttgtcacacgaaacacaccgtttagtagtttaaaaaagtgacacttttatccaaaagtttatccagtttttgttggagaaaagaacacggcctgacactagatcctattcagggtcggctatcacggcatagatcgaggtaggaaaatgcacactgcacttttgcaaaagaggccctaattatcgaaggacgtatggcgaaaaaaaactatcaacggccgcgatcctattctctaggttcgcgtgaaccgtcggatctgatctcgatccaaaacggcgcaagggagatgcactttcacaaatactctctccatccataaaagtcacatttgattttttttttataaataagttgtacctatttatagcttttatgcattcaagacttaaatgaagagataaattaaatattttattagaatccaaggagccatctaaatacttattggttgcatatttacattcacttctttattttataacatatgatttaattttaataggtgtaacttggatggagggagtacaatcctcgaacgatagattatcgtatcacgctcatatcatcctcccctcgtctccgtcccgctgtgccaagtgcaaacgccggggcccgggtttcgccgtggcgcaggaacacggcggccgccggcgacgtgacccaagtttcgtcgacgctcaggctcctgcctcctagtacacggataggttgcctcgaaggctctggatcaggccgtgcgccggcgcgtcgcgtgccgttccgggtgttgcgcgcgtggcaggggctcctccgccgcgcgcggcgcatcgcgtcactcatggccgccgccgatcgaaaatccgggatggctcggttcgtagcggagcctttttccatggaatactgacgtgacggcttctttgcgaggcggtcgtcggcaaggatgcctttctgttcttccgcccatgtacacgaacacaactgtgcaaatgaacgatagattgattgaaagatccattttgatcccagaatctgaatgctttgtaaatcgggaaacaatttcagcatgcttcagagaagagaaacagggttggcagaacagaaccagaggcatggccaatatgagccctgaagaaaatgcattatgcacccatcatcactcagaccccgtaattcacagcctagagtgaaaagcttccgcatccgccacatgacgggcataagcaaaagtatcagtccaacacaaaacactggccactcgttatgtgatacgctctctgataaccgaaaaagcaccgaaatacacaggcacacgacgacgacgtttgctcaagactacatagatatcacaattcacacgctcagaacactgaagctatactgtaaaccagtaagtgatatcatgtttcatgctcgtattacttacacgatagtacatccagtctgtcatctcttcttatttcactttaatacttatacaagcgtatttaagtgtggcacatccattggctattgccgtagaggcgtcgggtaccgacaggctacaaacttatatgctggcctagttataatgtcagcaggaccagcatatcgaagatgctggaagagcagcagtgcgccttgcagaatgcgaatagccggttcttacatgacaggcctagtggcagctccagcggggccagcttgtcttagcagctgaaacacatatcaacacattcagagatactacaactatactagaggtaatgataaattttcatggcacagcaacggagcaggtgaagggtgaaggttacctggaaataggattctagtttctgcctcaggacagcatgctcccgcttcactttctggaaagacctcatgcaactgcatcacaaaatatggaaggcgtatagatattaaacagtgactgttttcaccgtgggaacataattgttcaatttcaaaaataacaatagtgtgaagtgacatatataagagagaccctacccttcaacatttccttggccacaactatccctgaacgacatgcactcattcttcatcctagaagcgccgatgctgcaccaagttgtgtaatgtcaatgatagatcaatgatacatcgaattaaaaacagtctcgtgctttctatacatcatgccaaatgagatcagaagcatgagatgcttcaaaaaggtcgatacacttcgagtttttagttggcaacagtatgcatatttagcggtcaattggccgattaaagcagatggatttctctgcagtatgaggtctcctcaaaacattattttaacttcagtggacatgcattaatgcatacagagcttttatgagcaagacacttaactgggtggtttcactttcatataaaccaaaagggagatggaaagctgaccaattaactgtgatatgcaagactttagatagaaagagatggtgcaaaagagagtgccttggcttcccaagatgcttaactaaactctgtatcatgtcagttcccatggttcatgccacaatgaactaaaggttggcgctgctgaatctgacaccctttgtgcatcatatgcactacaacaaagatattacatagaactagaagcaaatcaggaactacctggaacagctgccttttagttgctgcatatatgtatcccacctgttgaaatctcttgggtacttctccctgcagtgttttcaaatctcagttagtcagcccctcttagcaacatttcctgtgtagcctaaaccctacagatcatattttcagaaaaaatgtctcatgctgcatatggaacttcaagtactttttattacttacagagcttgctcaatgtttgacattagcctgcccgagtccttaaaaaacaaagtaacaacttcttccacaaaattaggactagcttcatcctgcaaatcttccacctgacaaaattgctcatctaggtatccctgccatcaaaatataatttgctgaatcagcacatctgtcaaagaattacatgaaagagcagtagaatactgaaaatgggatcagatgtggacacttccagcataagacctaatatggtcgacacaccctgagcacacataagattactgttgaaagggaaaaaaaagaactccagagaataggatactagcctgatcaaagaggctctttttcatggatgcagcttggcgacgcaaattagaataatccatttatatgaatgaatgaggaaatatgtgacaaagtgaagccgttacaggttggaacacacttaatgatgaacatatgacttgtgggagctatggatatacaaagtcgaacatgggatgagtttatatagtagagggaacataagaaaaagtgcagatattctaacttctggatagcaaaggttggcatcttgcatgcacaggtgatttgattgccacggtgtgcataagctatccatatttgttatccatattttggagaatgacttgaatagatacagatacctgtaggctgtagctctttataagatgtatgatgtgtaagtatgcatatgcatgaagaaaccattaacggttctgatatggatcacactcttcataatagtatatgtcactgcatcaactgatcaactgcccaaaggtagttatgttcctaatgtatcacatggaaaaaagtcatggttcagaagtaaattaatcatacacgtgattgttctaccattaaataagatgaaatccctacaattggggaactcataacagaacaatggtttggacataattctgttaccagccaaccacagggcctggaaggctgaatggagtctgtagatggtaggctgaatggagtctgcagatggtagtgttacattaactcctcaaaatgtttttgaagtagggctgttcattcccagttttgaatttaccattcaaaatcggtggtagtctgttttctggcatgctcaactagaagctaaggtaatcactgcctaaactcattgatttccagtttcgagcgggctgagtaaactagtaacacccctatttgatgatttagtacaaccaacgaggtattttgcacaaatgtagaaaaataatgctctcattctgttccaataaatactaaattgtagttcaattaatatctactaggaactgaagttaaaacctacaaataaaactagtaactttacaccaatctcttctttggctattgattaacagctttgtaggtgaagaataccatcagctttaagtgaaaacttatcctaatatttcaaaagaaattatcttatgtaaccagacaaggaggggaaagatagaacaatatatctttttgtgcccctcaaagttcaaacaaaatgtggagataaaatctgagagaacgatggggaattagaataggcccactgatgcttactttgagccccagcaaaagaaaagtagacagagaaacaggcaccaacagttccttccaattgttaaaaaaccaagactctctcaacacattggaccacgtgtcagaaccaacaaactttcacaaaaggagtaaaagagattcattcaatcattgatccgatgattgctcctgacctccaatcaacatcacaacttgataagagaatctgacatggattaaaaaatatcgaaataaccaaaacacctatacagggaatggatcagaaaagacgcattctggatgagtcactgctgaggccacgaatgcgtgaactacatatcttgtctacatacaatctgcacagtcaataccttccctacttgatgtgtacatttataaaaggataaaaaagcatagcggtccatcattcatcactacagaaaaacatgccttctctttctatactgaacattcttatgacaacattgttcctttctgcaagatcattcttgtggcaaacatcacaaaacatcctttttacaaagcacggtgagggattgtattctcacataacataagacatatttcagtatttttttaaaatcttaacagcatgcttacaggtaaccatggtaacactctaaaagttgatacagataagacgtaggtatatagatggtaatgtttccctatgagttcatgcgtgacaagtccaatactccaatagtacttatggctccaaagttcatcaaaatgtaaatcagaaaattcctgtggtcattattttaggtataataccatgttgatataaacattagtttcagttgaaaaaaacaaatatgatactcaaactgctatatcatgcatatagatgagtgaggtgcaaataagtctcaagacaaagctataagggatttggcctttctcataaatgaaattatcatactatagcatttgctatagccttatgcccctctgcaaatggattaggcaaatggaaatgggagagatcaaagacaattttatatccatgcatcacatatctgcttccacgcatcaaggttattgacactccatggcttgtgcgtgaccacgttgtcaacaatccttttatagcatcaacacatgcactttcaacaatctaaaaccagtatcgtgtgcccaacatgacctagattttctcccagtaccctccaaaagtgtatatgtagctttatcatctacggttccccaaaaagagagatgcttctatggttgcgttttgtacgtatagtctaatgctccaatgcttttgtcaccttagaattggtttccatacgtgtgcgtctatttgcctcatatcctgctcactttcgaaacacatttggaaatcgcgaaaaatatgcatttaaaaacaaactatgataatcaattagattaacctccgccgtatacctcatagaagctcaggtagatctagaggtcaggctataactgagattatcaactagaaaatctcccaacttctcatgatgtataacatagcactggagtagagccacatgcagtgagctccaatagagcaaggagacactggagtagcttcatcaccagaaccaaaaaccagtgactcctttccataaaggaatacatgatgtgcgaaagaacccaacactaaagtctcgaagttcgatcaaatatccaagtttgcgcagcctttatcgttccagtactagaaaataaaaataacacggtatttagctataccggccagcttccttgattgattcgaggtcacacgagaaacgattctctcgagcgacatccgcgagggatccagcaaaggaagcaaggtataccgaccaatggggagccgaggggccgacacgattgattcctcgaaagcaaaccctatagttggcatccacccacgacaggatgagcgcgccggcctgatcccctccgctctcgcctcgacgtcgaccggagcgcagccgcaggctccgcatccgggggattagaccaaagggtggagaggccgaaaagacgcgcggggaaaaaagaagcggcggggggggggggggggggggggcgagtgcggcgcctccgctgagattgggagtgagatgaggggatagcccaggaccgcgagagtgattcgatgatgcgatcagctgtggtgtaaggggagttaccgcgagggagggagagacgacgacgactcgccgggcggaggagacggcggcggcgggggcctcgcgggtggcagcgttgggctggccggcgacgccgccgcgcgcggggaggtttggagagagggcgagctcgcggcgaaggctcgccgtgggtggtggcactggtgcggtggtgcccgtgccgcaggcccgcagtggcaagactggcaactttgcggcgaccgtggttaagtcaagtggctcggctaggcgttcgggccgggcctatggtgtgtggtttggagtcctaggacccgatgggtggaagaggattggcccgtgtaatttctatgcgaagctaggctgaattcagtccggccacccaggccattcaaggcctcttacaaatctcaaagcacgaatctgtcgtgcgacgccccgtaaatttttttttcatttaaggccctttaaatcgtagaattgagaaaacattggaatagaaaaaacatagaattttgatagaaatagaagtgtaaattagaggattgcaaaacataagaaaaaacacatgaatgaccatttgattgaaccgcagaaaaaacgtaggaattggatgagaaagatagactcaaaggaaagttaccaagaagttgaagctcttgctaaattttctctaaaatctctatatggttatccattccataggaattttaaaggattgaatatgattcaatcctttatttcaaagggcatcataggaaattttcctataggattgaaatcctcttaaatttctatgtttttcctccaattcaaaagggccctaaagaaacttaaaattgtgagaagcaaactgtttgatagttaacttgtaagaatttggtttctagttcattttctgaattctacaactataatttatcagaatctaaaccaaaagctgaaagagagtttctggttatgggataagctacaacagttagaagcttcccctctcttcctccccgaacaagccatttgattaccagacaaatagtatatcgtaatgaatcaggttcacagagttaaaatagactgcgggcctgtttagttcataccaaacttcttcccaactcccaactttccatcacatcacatccaaaactttcctacacacataaactcctaactttttttcaaactaccaaatttctccaaacttctccccaattttagaaactaaacacagcctacgtcatatatttggatatagactacgtgtccgtatgttaacagattaggtccatataaatagaaaggaactgtgattatttttcacatacgaacatactgcgcatgttgggatgagaggacggaagaagaactactccacttttaaactagtagatatatccatatctaaacgttaagattatagcaactatttaatctaaaaattgcctgttttgtatctttttatttttattttttatccttttttctataataaagatgaaagtgtaaaaactgaaagtatattgaatggggagagaacaataatgtctttacagtgaactgaaatttataatgaaatttcaacccctttaccttttgtttgttttaacatctcctaaattttactgtcctcgtggagtatctgaacttgaaaattcaaatgcctatgcatgtgaaaaaaaaataagaaaaatcaaccacttgctttttcccaactatatacagtttctaacccttgttttttagcttcatcccatcccaccatagtatccctaaaatttctcaaaccaaaaacactgtatttgaatccgggcgaagcgaaagcccgggaggaggtggaggccggaaaactctttcgccgaccttccccacacggcttcaccctaagccagtgagcccaggcggcggcggcggcggggcggaatggcggagccggactggatcctggagagggagcggaggcaggtggagcagatcctggagcttgacatggaggagctccaggtcgaggaggtcgacgacgccggctcatcctcctcctccgaagtcgacacctttctcaggtccaaacgctaaactcgcttctcctttgccatttccgctatccacccatggtttgcttaaaccgtgccttacactgttacacatttcggtgcgggagttggctttcgcgttgatacggcgagaggattgacgccgcgagagctgctcgttgctagcaactattctgaaatgaaatcaaatgttaagttgcgccttcccaaagtagcctgaatccagacagaggccatggaggttagggttggggaattttccacaggttaggatgaaaacagattagacaaccgcttgctaggatgtagaagttagacccggtttgtttaatgcttgtggctttccccaagttaatttgttcatcccatagggcatttccacactatttgaatagattgcacaaaatctactcagtttggcatcgtatggtacttagattttgctgatataactcagcaattcatgattttgctgacatgttttgggttttatggagtgatgaggtagtttacatgttacttacgttttcgcttaactaccattaatggtattcatgatggaatgtgcctttccccaacataccatacagtctaaatttttcacccctcaagttcgttggtaatcaacagatgtaattttttgccacttatttaattcttatttttacagaaacactcatggggatggaggatctagaacttctgaagcacttgcattcaatacgtctgtggtttcgctgcccacctgtgatggtggtaagcattcatgcttatgttagtatatttcctgattctagctgcaacacttacaagtttgtttccgcaccagaggttcatgatgccccaggcagatttgctttcttggatggtggtgtggttctctgtttaccaatgttttatcttcaaggtagcattcctataaccctgtgttccaacataatagtatagagcttatctcaatctaagctttaaacacccaattcaatctcaagtgttgttagctgatccatgtcgtgcctaatattgaatgctgaacttgctaaagttgtgtcctattgcaaaccaacaaagtatacatgacatgtacgcatccttgccattctttcatcttactcttgaacagtcacacatttagttggcatctgtaaacatagctgcctgtattaaaggctaatagtttgcaacttttgcaggtgttgttttgtttcctgaagctatcctgcctattagagtagttcagcctagatctttgacagctgttgacaaggctgtcaatcatgttgacgctccatgcatgataggtgtggtgcgtgtcacttgtccttgttctgctgcctttgttctagctttgtttttaatggcaattctccaatgtcaggttcatgtttatcaacacactaatgatggacaccatgctattgcttcagttgggacaacagcggaggtgtatttttcataaagctcattcaaactagaatgatatctgtgccttgaagtttcatcttgcatatttgctcatttctgaatttctgttgtctgtgttatgtttcccttttgcattttaatcttctgatcctccttttggtttcttttgtgacctattttgctgcaaaaacaccaaactaagatagagtttgcagtggtcaggtagtaaggtcggacaaaaaaaaaactaaaaaagagaaaagttatatgcttgtctgagatagcgtttgcaaatacccatgccattgaaaagatatacatcaattctgcagaaagagacgatgaattatcacaggacctgtccattcatttctagatatcacgtagtatgcacagctatagttgactgcagtcacaaatgtcttactaggacatcatgatcaccatatttgatcttatctgtgcggttatatgttgttccttctagttctatgctgcacaataatacaatatccttgggcacaaatatgcactacacacatgatcttcatattatagatatgaacttctataaattttataaatgagcccaacagatatgaacttgatcatttgaaatatggctgaagttatctttttccttaaatcatttatcttcaactgaactgtgaagcagtgaaattaataatttcttctggatagtcacatcagcttttgattttgttttatgtcatagatacatcacattaaacaacttgatgatggctcatcaaatgttgtcacacgtggtcagaaccgttttcgccttagacgccgttggatcgatgctgatgacgttgtaagttctaacatttggttgagaaataagatgttctgaactgcaaatgattgtcctatgaagtagtggtaagagagcatataattccattttattaaccatgggcagcaatggggtgaagtacaaattatcgaagaagatacacctcagagaactccaagagatgcatttggccagttagctacaaattatattttcaaccagtgtggcacatcgttactcagtttgggtacatcttgtttcagacaagatgatcatgtgaactctgatcaagattgggattctctatcatccactagtacttcaagtgaacattcagtaacagatgcaagaacatactgttcctcaaatgaagatgaagatctcatgcttgaacagtcttggcagaagtatgattctgtgaaaagaaatgctgaattagagaatccagtcaagcatagcaacacaagaggcaagggtgaaccttgctttcaatccccaaaatctttaccaacaaaaaacaaaggtgctgaacaacgcaggcggttctgtgctgcttatagttcaaagctggcattgcaggctccattgtcattttggcctcgctgggcttatgaaatgtacgattcatattcccttgctcgcagagtggcaggtattgaattatttcactacagctatttcaatccgttttgtcttgtattcatgcattctttagccaaataatattctttcccactggctaacatgtcatttgttactatgattaagatgtgatgtatgcatgacattaaattggttttgtggcagatttgtggagacaaatagttgtaaatccaagcatggatgattatgtgagaaaaccagatattttgtcatatcacattggaagcaaacttcccatgtcatgttctgtgagacaagaattgcttgagatcgatggtatctcatatcggctacagaaagagatccagctactcaaggcctttaacatcataagatgcagaaattgcctggtaatgattaattattttttaaaatgtgattccactgaagttctgatcataattcaagcttatttttccaattatccggtgttttaatcttgattgctgcagtttcacacttgcacttggctataacttgtgggcttacctgtctttggttgctgtcgcaaacatatggtagagttgtagttggtttgctacaccataccatggctgcaggataagcaatagtaacgatatttaatcataccgcttcatccagatatctgttggttgttgcctgtgttttaaacaaccatggtaccatactaccaggatttccgagagacagggttttgatcatcaaagcacactagtattctgatttacaggtgatatctaagtcatgattcagttctctgaatcattatgtaaatgacaaagggacatgttcttttaatcgcttcttctctacctctaaagggctggatctcactggttgatttaaactggatttgtaacagaacttcttggaatactttcaagttttgactaatatggcaacaattccatttcttgtcgcaggctcttatctcaagacgtagtgatggccctgtcggtgcttatgtcaagcagttcagctgtgggcaagagatgatgacagtgtacaatgcaactggtcttgcactccgtggcgctccttccaaagctcacagtttgtttccagggtatgattctaatatattctactaaactctattactcaaaaaaggtttgaaatccagcctatcattaacagaagaaatgaacattgttattcgttctgtttgatcccgttgttacttgcaaatcacaggtgttcagttagcagcaatttcctgtgttcttccatacgcaactatcatacctgcactctgttattacctccattctaaaatataaaagttttagggttaggcacatgcattaagaaagtggatgaaattaaatgaggaaagattgtgtttggttaagaaaataaagtaggtggtgatattaaaaggtgaaaagttgtaattggttgataagataatgtagttaaggaattatattttggaataaattttgaatgttagaagttatacttttagatggggagagtatacgctgctaacacaaagacctgtattttttgcagttatacgtggacgattgctctctgtgctgcctgtgagtccaacataggctggctgttcagggcggagaagacaaatctgcttccaaaatccttctggggattacgcagctcccaagtttcagatgacacacaatcaggacataactgaaccttaacagtaagtcagggccccattttgtaattcgtataggtctgcctttaatttccttataagattcttttttttttcaccgggaaggccgaaggaggccaaccgaatatattaacaagaaataaaagttacaagagaaaaaacatcaaaatgcaccaaggtgcattgccacacaccacgcgctaccacccaagcacaaaccgctgagggtgaaacctagcaccaaacgaccctcgctgagcgtggccgaacgccgctaggcctacggcaacaccacagagacgaggcttcgaaaaacgatgccaccatggtggtcacgacatccaggatgccgccatcgcccatctaaaaagatgtggtttttacctagagaagctcgccaagaaagggagagggtaaccctcgacaacgctccaaggagattacgacgcccgaagacgtagccgctgccggcccggtgaaccaccggactaagctttcgcctgggaccctacgaccttgactgcagatcgccgtccaccaactcagaaccaccacacggacaaatggcagcacgtggcatccaccacaccgcaccgacacccctccgtcggtcgacttcaacgaaccaccacccctgaaaactggcccaggactcctccgttccaccacccgccggccgcctcgccatatttggccgaaggagaacccgggactaggtggcattgcttcggcagcctgagcttcccccactgacgagctgccgcctcaatccaacctagaaactccccgcaaagaaggggaggagctccacgaaggctgagggtgccgaccggcaacgaggaagacgacccaccgccgctagctccctttgcactgccacttggccgccagtggtgctgctgcttcggaccggcgccacccgccggcgcccgcgaagtccggccgccgcgcctcacctggccaccgcgacggcatcccggctgcccagccaccacgccgagtcgccaccgaggcctggatgacccaccgcgccatgggctggcgccgggcggccaggccgagcgagtgagcgggggcgccgccgccgctccgggcaggcttagctgcccgccgcctccgagcgcccgccacctccgcgacccggccggccacgacgagccgcggccatccgccgcctgcgcccgccgctgacgaaccgcctctacgccgagccgcagctgtccgccgcctccgcgcccgtgccgggccggcctagccgcagccggccgccgcctcgccgccttgccaccggccgccaccacgaccgcatgccgtcgcgccacctcaggccttctcgcgccgccgccgggcagatccaggcgagggagggccggatccggccatgggggctccggatccgccgcctcctccccaccttgccgccgtagccgccatggaccacaccggtggggagcttcgtcgtcttcgtccttcgcgccgaggagggagacgctacgaagagaagaaagcctcgccgccaccttccctgcccgctgctggcttcgccgctggcgggctccagcggcggcgaggtggggagagggagggagagaaggcgcgggcggctagggtttttcgcccccgagccgcccgacgcgagagcgacgcggggatcaggtttttcccttggctcttttctcccctccttataagattcggtatgctagctttgctaatcgtgcggctttcttgtattagacgcgagagtttgtcaataacatagatgcctgcgtattaccccacttatcgtgccccagctgccatggtccagcatctggcacatgcccagaaaattgtacatatatcacagaatgtgccttgatgctttcgttaaaaaatgcaaaaacaaacatgttcatccgtgtgtggatagtgtatacacctttgttgcaatcgtacgagcaatgccatatacaaagtaaaatcatactgaaccaaattctgcaatagcagacttgggttatttattacatgatgacagggcaaatatgtacaagcacagttcagggataaaatgctactgccgtacgatataggtccaaccgcaaattattactgtaatacaagacagcatgctgtagccaaatgaagctgtacactaaggtgagcatcacttcatctataagaacggtaaatggggctgtacatgcagctctcagcgtacttcaccaagtcttttgggcgagggagatggctagccaatcctgcatacagaagtgcgaaataactgttggtatgcgagcatcttgttttagctagcgtgctaatgaaccacatcaaaaggaacaaatattaccaaggtcataggcttttgcagcaacgcgggctgcgatgttggctgatatcttcctgatgcaggaaaagggtggataaataaggcctttgtcaacatgctctggggtcacctggtcagctaagccttcagctgtccaatgccatgaaggcaaaaacaaaacaagcaagaaaacaacaatagcgtggttagcacattagtaaagtggatgggaaaaaaaactcttgggctcatatagaatgcatttaccagcagcaaggatcatttcatctttcacccttatcgctcctgaaatcactacgcctaggccaaatcctgggaatatatatgcattgtttgcctattcaaagggtaaagagtatgtttaaattgtcaaaaacctgagaactaaaattcaggtggggaatctctcccctccagtgatttatcaaaaaaataataataattgagaactgcacatgtcgtgcgcaaaggtaatatccctaacctgtgcaggcacgaaaagcttgtcattgtatttaactggatcaaatggacttccactcccaaatattgcacggccctgcatgatgtatcatttgataagttataaagcataaatgcttgtgacataatttacagaagtttatagttcatatatgtgttgatctcaatgggatagatcatagatggcgtgaggttgcacatggaatatcaccttactccatgaatatgcctgttcagcagtacattcagattgtgatgttggattggatagtgcgaggatgattggtctctgcattatattggaaccaagctttcagttcttgaatgtgtcattaatgtgacttattatgagtcaattatctgaagaggtcaatgattttattgttacctcattaattgaactcatagcctcaatcacctcttttgtgaaactttgacccacaccagctgaacctatcaatgcagtcggtttgataacctaaaaagatacaaatcagtctagtgtggtggtgcctgaaagaaaaatgtatactgatataatatgcatctcttatggttcaagttttgcaccttaacagcatccagtagatctttgactggttcatgctcatgggcatatcgcttcttaaagggctgaagagaatctttacgtgaactgacaatcaacccctgcaatgcataaatcaactctcaatggtccaattaccaaaggatgcaagttaacactgcgatatcattattatattaacctttgaatcaagtagccagatctttttgcgagcatcttccactggaactttggactgaaaaaaaatcatagctaacgattaattgagccatcatagacaaattaccaaaaatcaaattaggtgaagctagcaatcgagttacctgatttgatatctcgagagccactagttcagcaatgcctgtaccagcctgcaagaacaggtaatctatttggaacaatctataggttttacatgatagaacaaatttttgctcgtcggtgattaagagtcaaatcactaatttactggtggcatgcttagattattcactattcaagcaaaaaaaaaaacttttttgcatctcaactagcaagaaacagaaaaggtttctgaacaactgaagttttgaattgtgataagtcctattcctatggctaaccaactctactgataggataatcagtccaactatttatgttttttttttgttactgactatcttcaattattcattgctacagttatgacaggaatgtaaaagcaatactcaatgtatattcttataatacaatacgcgatgtatagatggatgttcagagttcagacatgttgcagcagtctaaagtaaatgtgagcaatgcagaatgcaccctccatatcactgaaagggaaggtcagcttacctctcctgcgccaaagaataagaatgtgtgatcagctaaagtcccactgacaaatttctgagcagcaatgaggcctgcaagcactacagcagccgttccctgtttacaccacagtttcatggtttactcctattgttgtgaaacccagtataaatgcacattcactagttcgctttcatttaggaactgtaacgagaccaatacgaagagtaaaaaagtgagatctgaacctactacctgaatatcatcattgaagacaagattgtttgcacggtacttctcaagaagggtaaatgcattgtaatttgcgaagtcttcaaactgtaaaataaaacaaattgaacaattgcccataggaacagctcatttacagaccaaagttttcctctttccttttaacatttccatacctggactagcaccttctgtccatagttctgcttaatagcagccatgaattcatccagaagatcactatattcctaattaaagaaataaaaaccaactttcatgactgaaatcacaaccatattgttacatatcattcatgaaaactgaatgagcatatccaagaaataagcatgaaacctggccagtggctcgtttttgtcttaatccaatgtagaactcgtccttcagtaaatcctcattgtttgttcccacatcaatggtgataggtaagcactggaatgcaaaatggtgggaaaatgctacatcaatctgctattctgctcattgctgaagaaaacaattgaaatgaaaataacttacagcagaaggccggacacctccaagggctgtgtatagtgcaagctttcccacagggattcccataccctatatatgttgcaattttcaacgaacatggaaaaaaaagtcatgttaagcagcaaagtaatagcactttaaacaatccaaatgcatgaaggatccttatcaaagcacaaatgtcaggactaatttactgacctggcaaccaagatccccgagacctaaaatgcgctcaccatcagtaacaacaataacctgaatgctcttctctggccagttcctcagtaactccaatattctccccctggtacaaaagcacctcattttagaaaattgaagatgatttacacctcaaacttctgccatcagtttgttcaaaataagtaaaaattaacataaggtgaaggggcaaactaccaacagaaatgagcaacagatacaaatgatggaagaaacatacttctctttaagactgatgtacagaccctgtggtcgtctaaagattgacccgtacttctggcaagcctcgcccaccgtcggcgtgtacacaacggggagcaattcctcaacgttgtcgatcaggagcttgtagaaaagcctctcattcctctcctgcaaaccaaccgtccaccggaacaacatgacatccgtgcctagtaaactgcaaccgatatctagttttcttctacccttctgacgctttctctaaacaagatgaagccagagcacacctgaaggtccatcagagccatgtaacgttgcagaggaacctgaaactgccgcacattttgcagaagcctcttctcctgcaggtgatgcacgcttcagtgagaaacgtctaccgacaatgttatcagatgaatcgagcgctggggaagtggaagggagcaaacctgaagttcttgggagagcacgactggaggcagcaaaccccgcaggtagtgggcgtctcgctctttctccgtgaatgatagccccttgttgtgccgtggatccctcagcagagagtgaccgctaaaaaaccaagtagcaatcacaaaattaacaccagatcacatatgtgtagactggtcgtttactttcttagtttagagctggactgggcttatcatggtctggttagtggttgattgctcatagttcaaacgaattcatgaagtaactaggaatatgttgaaatgactatgcgagatcgtgtgataggaaaatctcaaattgagcccagataagctcaaagctactagtactagtgaaatcactaatcacttaatcaataatcattagttcagtactgaaagtctgatacgttggcaaagcttcttcaaatggcgcatgcacacatgtaaaaccattttgtcccgacgcaagaacagaagatcacaaggcacaagccatgcatacctggcgacgcagacggcccacggcgtgatgggctggtcctcggtggcgcggtcctcgccgtaggcgtcctccacgccaccggtggccacccccgccatcgtcgcagcgccgttcccctctcctcgccccgccatgccgctcaccgtcctcgcgccttgcctgcagcgccgccgccaccaccaccaccgcttcgtcgtctctcggaatgcagcgcgagaagccacgacgcgtagtagctggaggcctggaggagccccgtgccagcagcgtacataggagcgcgcccgcgcgccgcgcggcgggcgccgaggccacgatgacgccgccgcccgcttgtccggggacacgtcgcaggagaggtggcgccacgtaacccccgcggttaggccggtttctggagagttacacggggccgggccggccagtccgggccgcacctgtggctggattggcaaaatcgtgggccttttttcctccaccgagccggcccgagcgatctccggcctcaaaacccgaccaacctcagttcggctcgcggctcgtcgtctccttcgtcctccacttccccctcccacccaaagacgcgcagccaaatccgacgcgtgcggcggtgcgacgccggccggggtgggggacgccatgagccgcacgctcctctcccacatcctccaccgcccgccgccgctcctcgcgtacgccgcgcgctccgccgtgctccgagacctagcggctgcttctgctttgcttccgagtccctaactttcctccctgttgtttggcttcgcaggtcgaggggtggtgggcgaggaggagcgctcccgtcccgcctccgcactctccgactcaactgcagcgtggctgaagcgactgcctccggcgacgaggcgcctgctcctccggctaggaagtaagcccctggccgcctagtgttcggcgtaatgcgtctggtaggaagaggattgcggcaggtttctgtggtattttgttgttatgcgatggcgtagcctatgatgtataagtaagcgtttgctctggttcaaggctagtatgcgtgagaagtcacggatgaaattctgtaaggcttgtagcttgactgtggtaggaccagcttgtgatgtaatgcgcctgtagggtgttgtaatgagtgagtacagaattactgaggtgttgggaggggctaagaatggcaatgcaggaattgaattgctgttgaagcctgcagttcacttgctgctcttagtgtatatacttgtttgttagaatacttaactggtgttggatgaagcaagctacccataccatttgatctgaattcatttatttttctctactagacactagttgttaaattaaccgtcacttaatttttttcgtgcttgaaatgactcgatgataaattccacagaaaaattgtacatatcctagtatccaacaggctaaagtgaacttattttttgcgcaccaaggaagagagcatgccatcacagctcgcttctcttggtgtgcacaaaatgaaggtgtactcagttgactgattgtttttgtatttacaacttccacaattggtgcctcatatacaaattcagtgttcatttcatgtagtatcaagaaacaatgacattttttcagtccgatgaatatcttgatcctaagttagtttacactgtcaaattaattagtttcttcatgatcttatatatacacttgtttgcactgctcaaagtcatgaaaatattattgatggctagtgtgaagccagaatagcaaaaatagctattttggatatgtttctcatagggaatatttttagcaagtatgaacatataatgcataaggtaatcaagaacttttgattacattgcatttttttcatgatgcatcttttttcatgttggctgtttaattgtatttggatcaaatttattactcttattttatagttattattatagtcatccgtttgcagtgtgcttccaaagcaattgtttttatgtattataaggtttcatgagaaagaatgcagtttctttgcccaagttccatagtagcatctattcccacgggtctactagtcgtagttgtgattttcttcttcttttttttttcagataacaaagttctggcctagtcctgattaaatatttatacgcgtttcactaatttgaacatctatatttatctctactgactgcaggaaaagagtagtttctggtgtacagccaacaggattggtacaccttggaaattatcttggtgctattaagaattgggtttcacttcaggtagtggtttgagaactgcatcttattattctttaattttgatggtaataatctcaaaagaaaatttttcagaaaccatgaagctagtgataaataatcaatctgtagctcagtaacaaggcaacctcaaattctgacattgttcatctaattgagatgcatttgagagctaagctaacttattgactgataatacacactttatctgtgatacttgacatcttatgcatagaaattccttgcaggatctatacgagacattatttttcattgtggacttgcatgcggtaagttctatctgacctcttggcatcctaccaaaaaaataatatttatattgtttgtacaaggtgtcacttattttgtacttttatcttttccttggtcaaattagtatgtttcattttcctttaacacaagctgctacatatttgtgtaatatgtggtgtccatctttcaccaatgttatttatggtaaccaaagtgttcatgatgtatatccaaattgccgagttaccttgcaggatcaagcaagtggttcatgctcatgtctgatttgtttgtagttcatattgcaattttttttttgtctttacgattcattttgtggtcctttgtaagcttatcacgttgtttaaaatgtctgcagattacgttaccatatgaagcaccacagttgtcaaaagcaacaagaagcactgctgcaatatatctggcttgtggcattgacagttcaaaggtctgcttcacatatttacattatatgatgatgtttgttgcaggtgcccttgtggagctgaatgttttatgttgttttgtgtctttacaggcttctatatttgtacagtctcatgtccgtgctcatgttgagttgatgtggcttctgagttcttctactcctattggttggctcaacagaatgatccaattcaaagagaagtcacgcaaggcggtgcgtcattcgctgtatgacagcttcaccatcatcttttgtttgagctgaattccttttcatattacataagggtctagaaaatgcaacagctcaattcacaagagcacatgttttcaacatttccgagattgaatatttgatgattccataacactgcctgctcaacagatatgatatcatgtagttaaaaaactgttctgcaccagtaatattcacatggtgtgttccctacttaattttaataccctatcaaaccagaggaagggaaagcattacataaaaatatcttttagtgtatgccttctacttgtacaccactaccatatgattagcgtaacagcatttttgaggcagtagtcatgtgaagatcgtccatagttctagtttgtaactttcacactggacgcattaactcttattaatagatcataggcacagataaataccattctaacattagattctttgcttgggtgtaacatcacttatctatcagttggctttcctatgttctgaacaatgtttggtcctcaagattgcttacctgattcagttaaaaaaaaaaagattgcttacctgactgacaccaaatgatattcatgcatctcccctgatttctaaattactagtagaccacctctgtcattcctgaatgtgatgtgtagtgcttctaaaagtttgaacctctggcattgccattttactggagcatttattccacaatattaggaatcatgtggtgcagtttcttttttctgcgtgcaaaaccctcaactccttatatcatggtgttgtactgtttaatccgtcctattttggcaaatttttattttgttgggtttatttttttcttatttatagggtgatgaaaatgttggagtggcacttttgacttatcctgttttaatggcttctgacattctcctgtaccaggtaaatattactcgtggctattatttttctgggttgtattctcagtgatgtgtagaagctaatattaatagatgtagtttaacaattcaactttgttatggttctgtttctctcctttctatgatgccaataatagctaatgattgcagtccgatctggtgcctgttggtgaagatcagacacaacatttggaattaactcgcgaaatcgctgagcgtgtaaataatctatacggtggaaggaaatggaagaaaatgggagggtgagaaaattatattattttattccacttttttgtgtaaataatctattgtaacgattcttttttgtatttgttcttgcaggagaggtggttcactatttaaggtgtgtgccatattatttatatatggttcagcatccattttataccctcggaagtcagaactgaactttgttttgcttattatactttctttttgtttattaggttcctgaagcccttatacctccagcaggggctcgtgttatgtccttaaccgacggtctctccaaggtagttagccatactcattatcattttaatcctgatcacaaaaaatgaaactactaggacttttttgttattaaattacttattgaagtgtcattacaccactagtattgatgctcattcattaacatataaacaataacttgcagagctgattccaggcatctatattttatactttctgctcagtgtgctgtatatctctgccatactgacctttgttctgtttattcatgttagatgtcgaagtctgctccttcagatcagtctcgtattaaccttcttgatccaaaagatgtaagggcaccaagaattgaattccctgatg

SEQ ID NO: 9016 - DNA, 14380 bp, Oryza sativa
tatagtatatagtgttagtgagagtaattacataaatgcagcgcctacaaaggagatattttaaataatgaagtatgatcagttgatgatattgatttgggaaggaaagaatcaaatcattaatacgagtgctggatcgaatatcacagcgatcgagcatctgatgtagtaagaatttaatgatcagtcacagcactagattgttaatttactgtgatgaaatatcagtgcattgtttactggagtactagttattattagtactgaaagcagcatcttcttcagatgtcaaatgtataagggaggcgccgaccaagaaggcaaacagaatggctcagaatttgtctacttaacgtaggatccctgggtatagagtcccctgcacagacgtgcattgttcagactgacaatgaagacgatctgcaacgctgactttttcttcttattcatgtataaattgatctgcttcttacgaatttctatgttccaaaacaataggatctagatcggtctaagtagttatatataagccatttttttttgtcggtatacgcttattgaacgtgagaaacctttggttgggccgaaaaaaaaatcgaagcttgaataaaaaaaacccaataacattatatttgaaaatttgtaatacccaaggatccaacggcccatgtagccatgcatgcatgtttctttgcaaaagcagcccatagtagccgaagcccaataactgaccggctgaacgccacagttgatgtgtgtcctcagaaaagccgatcgaccagctcatccagttcatgatcagcaccgggttcacgattccgacgaaaaccggtcaaattccgtgaaatttcgacgtttcgatatggctcggaattaagtttcgattggaatttcgaaggttaaacagtagatttggtcgaaatttatcaaaaactgtgacaccgatagggctcgaaatttagtggtcaaccggtaatgtaaaccttgatcagcacttaaatgatcgatgttggagaattaaaaccgtagtgtatctgtttgatcaaatttcaacttatattgttgacaataagatttaaagttctatactggtttgttttggtaagtttaccgtgctggaacatgaaacctcatttagtttcttcggaattcaacggcagtagagtaggagacatggtttgtgtgaggtacttattaatttagtggtattatatagagccaaagattgattatgcttcatcatcatatggtaagacaacaagtaagaacttacaaattgattacacaaccacacattcatatacagccaaaggcaaggcctttattccatatattagttgcagcacacaaaacatctaatttatcatgtgtagtaccagcacacaaaactttaattcagtactttaattcagatgagggttttatgggtgcccaccaccagacccgcttcctgagccgcctccgtagccactaccacctggaccgctcccaccacctccgccgccgccaccaccaccgccgccgctagcataaggtccataatatggcccaccagcttgaccatatccaccgccagcaccataaccatacccgccgcctccaccaccaccgccaccgccgccaccaccaccgctagcataaggtccataataaggcccaccagcttgaccatatccaccgccagcaccataaccatacccaccgcctccaccaccaccgccgccaccaccaccgccgccgccgccgccactagcataaggtccatagtaaggtccgtagtaaggtccatagtaaggtccatatggtccataataaccacctccaccacctccaccgccaccgccaccaccgcctccaccgccgccgcctccgcccccaccacctccagcatagtaaggtccataataaggcacatatcctcctgtttggccaccaccacctcccccaccaccaccgccaccgccgccggcggcgtatctagctaccacccccatcctcgcattggatactccaatacttagtagcacgaagaaggtaatagccagaagcttgtttccagccattttgagcttattccggttgaaggatgagatatggatgccaaagcaagactgcacggttatttatagtgcaggcagggagaccatgcaattatatattgcaaaatgacacttgtatatgtaaatatatgtactagtgtgacgagatgcagcagtattgcccttcgcgaacgagtaatacaaaatggagtggttttaaacacattatgacttttgctggataaatccctgctagtgaacctttaaattttctgacttggcctgactgttacgtttggattatatatgtgagtttaatatttgataatgatgctgcataaggccaggtcaagtatcaataccacgtactcgagctcaggcatttgaccatgcatccatcgcaaaaaagcagcagatacagccagactgatgacaaaaaacatttgccactagcagtaacgcagatgacatttgttcttattacctatatataaaaatctatgaggcattgacattgtgctgcttaattacaaccaaattgtacatatgctcattcgtacactggctttgtctaatccgtgtaactagtgctttcagcgcacactgtaccactctgaacaccctgaacaaaataactgaacggttttgcagactgcagtgtgttgtttcacaaatcaacgctgctatacgtacgatctgggtgtttacgatattcgtactatgaaacgcttatgcgtttattaatggtgtgccgtacgtccgtcttattcacgttagatcattgataagtacgcatagcatttttcctttcgcaaatctcacaaaacatgtagcatgcgtgccatgccgtacgttacttgactgaaacatataaaagcatgcctgatttctaaagcccatcgatgatagcagattgatgatccggactgcaatatacaaattaatcatgattggcttccaagtgaactaagtgtgtgttcgtttgaatcactactaaaaaaccaaccggcttatagatgccgattcatttaaaactgatacttataagtcttttcccacctccgatatctttaattaagaaatataggtgccggtttattagttaaaactgatacggttagttaaaaaactaacacctataatataataacctataatatattataggtatcagttctgtaaaaaaaccagcacctattctaaatcaagccgatctaggcgagacgagccgatcgacctggcctatctacgcgcgttgctcgatccttatccttatcccctcccccccccccgggctcttctgtgcgctctccccctcgccccttcctccgccacgccctcccctccccctcccctatggcccccctcccccctctcctcctcctccgatccgccatactcccctcccgccccctcctaactggcgagcagtgtcgcctgcgatgggcggcctccccaccggcggcgacctcagcgtggggagggatgtatgggtgcggcgacctcggcatggacagggacctagcggctggcgacgatctcgtgcggagagggacccggtggctagcggccacctcatgtggagagggacctcggcggcgacctcgtgcggagagggacctcggcggtgacctcacatggagagggaccccggcggtgaccttggtggattgacgagtgagtttgtgcatcttgcttgtgttcttcatctgtgatgggaactattgttgtttgttgttgatgatttgtgatggagattgttgatgttcatatctgtgattggtgatggattgaattagggattgcttgaatggagattattattgttcatctgcttgatttgtgatatgtgaaagcatgcttgaatggggattattgatgcgcatcggctcggcttggagccagcttcttttttttttttaatccggaagagcacaaaggtgacggttctatgactggcaccaataacactaggtcattggtgctgaccaattggtgtcggctaggaaaccggcacctattacccgttcccaaccggcacctataggggaatatgtgcttcgatgcaaagcactacacacgagtacacggtacatggctatgttctttcccgatctttcctaactcaccttcttcgttttttgcgcgcatgcttcccaaagtactaaacggtgcgtattttgaaaaaaaattctatagaaaagttattttaaaaattaaattaatctatttttaaaatttatttcagctaatatttaataaatcatgcactaaccgccactctgttttgcgtgttgggagctagggttgtcaaccctcactcacttccgaactcagccatacagggcagttgctctgctcagaacagaacagcatgtccagcaaccaggcttcttcatcaaagaatcaaccaggcaaggcacctgcaaaatctgcaatcactttcagctttttacagagctgctgctgttgaaacttcgttcttgttagttaacttctctgaaaatcctgaaacttggtactcacatagacttaaatctgaatctgtgtacgtttacgcggtacatgacgggatgcgttttaagcattctcataattataaatttataacatgcagagaggcctattatgttttattatacatgtaaattggtttttgatgatgaaagtgaagtgaactgaaccggtgtcaggatacgcgttgacgttgtactactcgtacgttcgtagcgtgtggctgcatatgcaattgcatttatagtatgctatattacacgttgacacgcctatacccacgcggacttgtattccgtcaacgggacattctctcgatcgataaagctccacattaaactctatccattttttaatatatgatgccgttaattttttttgatacgtttgattattcgttttatttaaaagaattatctaattattatttattttattgcgatttgattcatcgtcaaatattcattaaacatgacttaatatttttatatctgtaaaaaagttttgaatatgacaaatagtcaaacatttgtcgaaaaatcaacgacactgtatattaaaaaatagaggtaatatgatgtcagttgccaaagatcgatgttctaattgttgtctttagtattatccataaaaggtagctgtctcaagtgttgaacatactcatttacttagtcctacataaatcgtgcacatgttgacttcgtaaaataatacacacggctgtgttagatagtgcagaaatgctgagctagttagttgcacgggaaccaaaacagattgttaacgtatgattaattaagcatgaacttaaaagaaataaatactaactattatttacttgcaaaataaataaatttatttttgaaacagcttctatataaaaagtttttcacaaaacacaccatttaatagatcggccgggaaacatgcttatgataaatgaggaagtagcccactcaataaacggttaaaaacacaatctaattaagcaagaacagtatgaatgttattttttctttttttcttccttcattagtataacatattttgaaacagaaactgtatgctttaatttcacaatattaattagcccaagcctatggattgctcaaaatcaaggggtacaccaaacagataaagacaataagaaagactaaacatatcttgacacgatttctacgtatatgtaagcatgctttgctttcgtcaaaatgtcacgccccgaactagtcccgaccggaactagcccgtgacgctccaaattaacctgttaatcgataccagtcctaggaaacagtgctggtatcacaggaagacagaatatcacagcaacagaggtctctttaatatagagaaggagtacagtcatattgggctgcagacagatcccgagctcacaactgcattacaaaaggaaagcggaagccaagagttggaccaaacaacacaggcgcgacttgggaactaggccgaaaccctaaaactcaacgtagccggcttgctcctggaagaactcctcgtcagcgggatccgcttcatcttcttcagcaactgggggggagttatttatatagagcaagggtgagtacgggagtactcagcaagccatgggaaataagtgtttaatgcaggcttcaaggaaaggctgttgtttttgcaattgattttatttgaactcttttctgaaaacaactaagtgagtgcttctcaaacgacacggatgagacagtgcgtctcgtccggtcggagtatgtgcaaatgtatcagtctttagaattgatcaagattggcacccggccaacaactttcaaacggccacccgggccaacaactttcaaacggccacccgggcctagctgatcccatcagctgcagattttccaagcatcgatcccctttccacaacagcaatttcacaagcagtagtcaaacaaaactacgctaggaatcacctcacatccgcgcatgaccgtgggcacggctgttcgaacagtttgttaacctctgcagaggggggtacactttacccacacgacattactaacccggatcacccagcccgtggggatcagccacgtcgggagacctccaagctttcatgacaaggcatttccaaagccgacacaggtttaccatatgccgacgagaggggtcccagaccaacaacaggttaggtcccagaccatactgtgccaggaagcccaggagtcctctctgacaccaccccggcgaatccacatgtctcttggcatcaaggctcccctgataagctagttactcagccaggggtgtcccattccacccatgtggtcgtacttgtcttatgttcggatgaaattccaaggaaacggtccttaggtgcaagagcgggaaaccgtacacccggtacgttccccggtccgcggttttggaaattcatttagttcgcaagcaccgacccaggtgtcgggttttccaagtcttttgtaaaacccaagttttacccaagatgtttttttttcagattttaagtttgaaggcggccgtcgatactcgtgcagagtgcacgatttccgaggcgcaactgggtggttacaagggaacatggtataacaattaacaaatgaaggatcaaatgcaacaaattaggtaggtccgtcaatctgccttgcagacgggacaagcagattaagtgcgatcctatcaatgcataataatctttcaagcaatataattaagttcaaatataggctcaagatattcaaaggtggcttgccttgctcgagatctggagcttgatcctcgaaatcctcgcactgcgggtcttcgggctccgaaactacacgcaaaacgggacaactcaacaaacggcgaaaataaagcctattaatgacctctaagcgtgccattagatagatctcaagatttgaggaattttggaagttgaacggagtcaaacggacttacggttggaaagatattgaatttctaagattattggatttttggtctaaaggaaaaggatttacttaattcctttttttgaaaaagaaaagaaaagaaaagaaggagggggaaaattagacttccctcgggaggctagggcgcggcccgagagaaaaggggcggctcggccgagctaaatgggccggtcggcccaacaaggcggcccagagcgcgcgcgcgggcggggaggagagagggagccggtggaccgggctcacctcgcgtggtcccgagtgggacccgcttgtcggtgacacggttcaccgagcggaacgcgcacgcggcgcccgctagggtttgggggagggacgcggtgcacgcgcgcggttcgcggaggacgcggatgcggcgggcccacgcgcagcctcacggctcgcggtggaccgcgcccgcgagcggggccgtggggagcggctaaccggggtcggctcgacccggtcttggccgagctggcgccgacgtggcgcctacgtgtcacgcccagaaatttagcccaaatttccagactattttgtgtattaaatccctgtccaggaccagccagggtacacaaaacgacaagtaatatacagttccaaacgtaaataaagcgtaaaatacttacaaaagaggcacttagtcctcgcaccgaaacgaaaacagcagcagcggaaaaaggcgatcctagcggggcttcagctccactccacaggcaaaactcaactggggtctgagccttggtcctctaacttcgtcttcagctcagaagcactacacttctgaaaagggggaataatcgcaaggctgagtacaaccaccgtactcagcaagccacaccaacgatgcagacgtgcaaggggaacacaaggacggtttgtggctatttgcataaaggcggttgtaaaacattttattgagcaaaacagtaaaactgttgagtaattaaagtaacattgaatctccactgatcaacgctacaccacgttgaacaggcccaaccaacccacctggactacggtgcattgggtcgatttattagggtgggactaatcacggtgaatctggtcgaccgcccataaccgcgggcacggctattcgaatagttttactctgatcagaggtgtacaactgtacccacaagacacagccccacgacacgtttccgtgcgccgacatgccaccacgacataccggaaagaggccgtgacaggacccttcgcataaccccctctagccaagcacaccacacctcaggtttcacccccgttcccagcgggcaacgggcagtcccctctcgtgcctaggtgaatccggaagcgacagaggccgtcgcagggcccgccccgctccatcacgcccacccttgcctggatgcgtcgactagaggaaagctacactacaagcccagccgttgcccacgctggcttgtggtaagtacgataagttcttccagggcatcccgcgaaccggtccttaactgccatgggtgcgaccagcaaaaccatgcacccacagcccaccattcagtcgcattttagttggataattacgaccatgaagcatggccaggtgtctcgagcacgcagctcactctgatactaaaaaggtctaatattgtaattatcccatcaactgagctagtggtaattaagcatggctaagcatatagttctagctaggtcacataagtaacacaagctggtcgatttattacccaaggttgacaaagaacagatatcaagtaaacatggcacaagcgagcagataggtaaaccctgatcccgtgtaattagcaaaacatgcatatttatttgcaaacagtaaaacatttgtaaattaggatcaaaatgctcaaggggaatgtgtgacttgccttgcttcttcaaacaatcttccgaactcttttcctcgcgaccgcggacttccgaaacgacggaaactacacgctggcacgcaaaacgaggaaaaactctaataaaaaccaaggaaacagtacataaaaagtaaacaaacatgtagagctcaattttagatgaattttgcaagttgaatggctcaattcggagttcgaatgaattagatatgaattttagaagttttgagccatttaaatgaatttctataattatttacgaattattgcgcaattattatttatttttacaaaggaaatggatctcgctgacgtcagcaaggggcggccggcgccgacacgcgggccccacacgtcagcgagtcaaaggggcggcgcacggtggaccaagtccacacgtggcctcggggcgtgtccaccacgtggatggcccagatcggcccgaagccgatcggacggccacgaggcggcgcggctagggcacaggcacggcatgaaaccggctcggccgagcgatagcgcgcggcggcgtgcggccagacgaccgccggcgacagcggcgcgtcgcggcagcgggcacggggagcggcggaggaggaaaaagggagaagggacggtggggattcttaccgaggacggcgacggcgagacgaccacagggaggcggctggcggcggaaagggatggtgaacgcggcggcggcgttccaggggcagggaggggaaacggagtaggggccggggtgcggcgaggaacggcgatgccgatggcggtggtagcgcagcgcggcagcgacgggagcggtggtggcgcgcgactggaggtgacgaaaggcggctgtggctcggtgcacggtgggaatggtgctgcgggggtggaaggggaggacggagtggatgccggggtgtggcacgacgcggcgaagctgttggaggcaaaagcacggccgggcgaggcggcgctcgccggcggggagcggatggaggcggctaaaggcgaaggtggctcggggtggcggtggaagcggcgttgcggcggtggattggcgaagaggagcggtggacggggtgcgcacggcgactgtggtgccggggagggcgacggcgcagtgcggggttggcgagaatggcggctaggggcggccggagctcgccggagagcggcgacggctcgattttgcgtggggagggcgggggagagtgcggggagtacgggaaaattggggaaaagggggagggtggcacggggatcatttttataggctcggggaggagaaatcgtggccggacgggcggcaacggccggcggagtggggaggtgaagtggagctcgtggggaggtcaaaccggcgccgtttcttgcggggtgagtgggggagatggtggaggaaggggatgacgtggggtggaccgcgcccacacgcgcgcgggaaccggaagacgcgcggggaggggcggcgacgtgggcggctcgggcggccatggcagttgccggcccgggctggaggttggggatgaccccgacaggtggggcccacctgtcggtggctcgggggaaaggagagaggaggagacggttggggggacgatgacaggtggggcctcgggtccacctgtcggcgaggggaggagggaggaggctgggggttaagtggacttggaggagggggagccgagctgggccggcccacgcggagaaaggagggaaggaggaaagggagaatgggccgagcccaaagacaaagaggggaagtttattttgttttctttttatttaaattggttaaatgatcttcgtgactttaaaactatttctcgagctccgaaaattcacggaaaaatccggagagtattttagggcacaaagaatattacaaaatattcccggccaatgatttttaagggaaaatttcaaattctcccattattccacttgattaaattgatttaacttttatttaatttctagaaaatgtattattaattgatttttaaacccgaacgaaaatcggggcgttacaaatctaccccccttacaggaatctcgtcccgagattctgggatggctagaaagaaagctggagctggcgggcgatctaactgatttgcaccctgcactgttcctttctgattcaactgaacgattcctcaatggtccaaacctgctcgactgaactgaccggcattgaccattctgttcttttgctccaaacaactgaactgactggcctcattggattcgaccttggagttctggcgccccacaagactgaactctgtacgagtgatctggctggtttcagctctgcggtcctgttgctcccaaaactgaacagattggttctgcttgaactgacccagattaggactgcggatgctcctgaaacttacttatcttggactgaactgttgaggttggcaattttggtaacctgagaactcaccacgctggctatgagaggatgaaaattgaatctggcatttgtaaatcatttaccctatgtccgcttggattggtcccaactcaaaagacaagtaattccaggaaacctgcttgacccgtcttttgtctgaactgcaaccgtctgcttgacctgtctaagctaagcggttgaactggcctcatgggtgtaccttagaattcaacctgttgacttgagattgggagactccgctagtggctcgcaacggactcctttaattactaaccaaattgctacactgggttgaacattcaagtgaaatgccgacgaggtaagccaaaagtcatctctgagacctaccctccttacagtgggtagtcttactttcgcctgactgaggacctttgaactgttgttcttgaagaaaaatcgacacttctcgaatttacgaatggccctggctttgaaaatagaaaacttcaacgatcaatcaaaataaagcaatgacgatgcacttccatccaggacaagacttggaacttaacccttagttgtcgataggaaattccacataaagaaattctcatttagctcgtgatcttactaactcttgactacttccccatcagttctattgctggcatatctagcatgcttcaggcccgacttcggtgtcgtccacctaaatgggttgtgtagttgatatctcaaaactaaactgaccgactcgcattggaattgacacaacttgaggaactggggtgctgcgaatagagctgttgtcttgatgacgctaacgccttgccgacgaacaaccttgcaagaactgaccttgtaaaccataaccactataggtagcacttgttgcctctgggattggtggtgacttagctgtgctagtctgctgaagacttggtggcgtactgtctgaggttgcaggtgcttgctcctggaaaacaaactgactttcgctctgatcctgattccggcttgcatctgagcttgtacttgttggtgaagacattgtcgttgcatttgctgctttggactctgcggttgcggtatcaacatctgacacatccatcattagatcttggctagccaggatcttaccagagcgtggtgctccgactcagctggtagtttgtcgtcttgaactgatccactgactctgactgcaacacactactgctagagttgcttccgctacattcgaccttgcatcgggctttgcatcaatacacccatcttctgatcctggataccaaatgttgatcacgagcagggattcttctagcatcgggagtaccttgtagctttcgactgatccattgatctgtgactttcatacaccgttgttgttgctcttctctctgatacagaccatctgctaccagaacggaggagaggtggaagagaggggtggctaaagataaggtactaaaccacttgcctattgatctgctgtgagtagatttttatggtttaagttgcttaagcaaacaacctagtatggtcgcatccccaccaatgatgcaaaccatacccctgcacacaagcaaacaacacacgatctagaagctaacgaaactactcttctgggacagattgggtttaggtcatctccggggaaactcttctttaatcttcgcagaacgacgactctgaactgatcttctcgctccttgcacgaagcttgaggctcgacctgacttgacttccgaacagacatgacgctggcggtttgtcctccaggtttgacaactaaaggaattggaggggcagggaggagaattttgaaaaaccgtttcgcaaagaaaagccgaagggcgaggggaggcatttttcaaatagggttttcagaaagcttgtccttagggtttgaccatttggctcaacctacagtcaagttggctctgataccactttgtcacgcccagaaatttagcccaaatttccagactattttgtgtattaaatccctgtccaggaccagccagggtacacaaaacgacaagtaatatacagttccaaacgtaaataaagcgtaaaatacttacaaaagaggcacttagtcctcgcaccgaaacgaaaacagcagcagcggaaaaaggcgatcctagcggggcttcagctccactccacaggcaaaactcaactggggtctgagccttggtcctctaacttcgtcttcagctcagaagcactacacttctgaaaagggggaataatcgcaaggctgagtacaaccaccgtactcagcaagccacaccaacgatgcagacgtgcaaggggaacacaaggacggtttgtggctatttgcataaaggcggttgtaaaacattttattgagcaaaacagtaaaactgttgagtaattaaagtaacattgaatctccactgatcaacgctacaccacgttgaacaggcccaaccaacccacctggactacggtgcattgggtcgatttattagggtgggactaatcacggtgaatctggtcgaccgcccataaccgcgggcacggctattagaatagttttactctgatcagaggtgtacaactgta

SEQ ID NO: 9017 - DNA, 80616 bp, Oryza sativa
  unsure (1)..(80616): unsure at all n locations
taatttctagaaaatgtattattaattgatttttaaacccgaacgaaaatcggggcgttacaaatctacccgaacgaaaatccagtggctcggattcgccggagggagctcgacagcggcggattgcggcagcggcaaccggcggagagaaaagaggaaaacgacgacgaggtcacgaggggccgattcccggtggcgagagcatctacgcggctacgggaatccgtcccttgtgccggattaggaggaaacgcatcgagggaggccggcgacgagaggcgcttccgagcttgggcggcgacggcggcgagcacacggcgagcggcggcaacggtcggggcggcgctggctagctacgggaaggctactcgtgctactacccgagtctaaggggaggaggtggaacgaggaggatgaacggagggaggcactaccgtgcgggcgggcgcagtgacgagagccgacggcgcgaaacgtgatcgttttggcctcgggccgaggaagaggagggggagggcgcgcccggagtccccttccgcgtccttgctcgtgccggctcctccgacacgcgcaacgacgaacggggacggcgaacagagcacgggaggcggcgacaatggcgtggcggcgagagacgaaaacaagggagattggaggagggaggagcttgggtttataggggcgacaatgtcagtttgggagaggggaaccgacattggacggtcaagccggcgagctggcgcccggctagcggccaaaacgacgacaggaggtgacgccgacgagaggaggaaaaagaagaaaggaagagggaaagggggcttgcctccttgccgctttgggaaaaggaggagggagcgggggggtgatgcggcagagggaggaggagctctgcctcctctccttggaagctagcgcgtggaggggaggggccgagtcgatgacgacggcgatgacggtggggcggtttggagcggggcgacgacacgggcggcaggcgcgggcaggcgcggcagaggctgatggcggcggcgaccaggcggtcggccaccacggcacgcgcacgcggaaagcaacgggcggcgcggcggtttgagcggcgcggctcggtacgcgtgctgactcgcggggccgagcgcctgcgcggctacaggcgcggtagggcagcggggccgggcggcgcagacggcgcaggcgcggcacgggcggcgaccacgcgggcgcgcgcacgcgagcaacggcgcgcgggggccgattttggggcggggagctcgctagggatggaggcagggagagggagagcgagggggaggggtgctcggcgcggcttacgcgcacgcgcgcgcggcgcgcgcgcagagcgagggagagagggagagagagagagagaaagagagagagagagccggggagggaggggaagatgggccgagagagatttggcccatcgaacccgagggaggcaaaatagacttttgcggaggaattgatttgggaaggatttggattcgggattgaactcgacgatagatcggggatttgagatctgagaaggcacggacacttgacaacaagcaaagaaacagatttcgcaaataggatttttaagagataatttttcccgctaggcgccacgacggaacaggcgctacacaaaatcagttattttcaagccattgaaatataccaaattcactctgaagaaaacaatataaacctctctgatgcaatcccaacacttgccctacctcactctgcatgcatgtcgtaactgacatcacttttcctctcctaatgagcgatccagactggtcaagtgtgatgttgccaccgaagctcattaattagagatggagaaggcaacttttggtgtagtaatcctatagatggccaaatgggccgcccgaccaggcacggcccaggcacgatcggcttgggccgaggtcagtcggaccggcacagcctgatctacacgccgggctgggccgtgcctgcccacgggctgcacgcatggccaggcatggtccaataagtttcgggttgtgtcgggctggctcgaaggcatgacagcctattgcgcttctccatagaataagtctacttctcctccctcatctctttgggctgtgtttgttatggatggaataagtctattttgtatccctcttctctttgggtcgtgccttatatatcttatgtaagtctattttggttccccccaactatttttctttgatcgtgttgggccgggccggtccaccgtgccaaggcatcggcccaggcacggcccaactatcgggtcgggccagcacgggctcgacaccagttgtgccgtgccgtggttgggccgggcctagggcctagggccttgtggccatcttgaaggaatcctatagcatcgtgggaagattggaaattgaatgacctaccactcaaaatggatacatgtaacacaattatgcgattaacttttcatttgtgtggttatttggaattgtatctgtaacatgaagaaattggtgtttcttgttagccaacttaccctctaagaaattatgaacactctccctccaatggtgtggtggatcgcatctagcctccttgtagatctgtcggtgcccacatgcatgctggtggaacgacgatctttggcctccctcccattttcaatccgtcagtcctcaccttctccatggtgtgttggccataggtaatgttgccagctagagggaagcggtggtggacaccctccaaggctatcattgttgtcaccaccaaatccacccttgagttcaggtcaactggatccaagaccactaagcccgtggtgatcgggatctaactccaagcttgtggtggtcaaatttgaccgcctctaagcttgtgcagggctggccagaggaaagggaggtggtggcgccggaggagaggggagtagtggcacgtcagtcagattcggatcatagagaggtgagggcactcaggacgctaggtataggacatagagaggacagagaagaaagaatagaggagagagcggtgtcatgttggcttaaaattttctagtctcggcctccacctcgtcttgttcttacttaaagtgacgactatacttgctttctttgcagcaatggcctagtttcactctcagttcaatccttgaactggaaatgatattgagtaacattgtcagttcatattggtttggaaaaaaaaaccagacaaccaatagtaatactcttacatcaccgtactagtacggaacaagacatctgtgtcgggaaccttcatctgtatcggagggaggctgcgtcacggattattggacagtgatgtgaaaagttatctgtgtcaggcactcaggctacataccatcaccaatgatagtgatctatgtcgggccgacacaaaagaccattaccaataggtttgacccaacaaaggagtgaaactagagcctgtcacggatgattcatccgtgatgatcccctactacaaactgataaagatgtttgtcacctttgtcgatatggttttgagaccgtcaccgatgacttattgggatggtttctgttttagaaccaacgttttttatgcgcacccgtgacgttgcttttttttaacccgtcaccgatgagtaatttaccaaaaaaaataaatttatttttttggctagcgtcaagcctttgctagccatgcctgctgcaaaataacaaaaacacagatacatattaccattcctagtatccccaacatcccagcattcccagctggagcgcggactactagtacctcgttcaggcagcgacgaggtgaagaggaggagtgaggagaagtggtggaggcggctagtagggttttgctgcccgagctatccctcctggagtgatgcaaggttcttcgccaaaattccctcttgtccataataattgaataggttaccgatcatttaaggagaaagtgtacatatattgtatttagtagtcttaaagactactacttttattacaactatccagctatgacaactatgccatggcatattattttggtacaagacgtattatttggtacatatttattttagggccatatatgttggcacacatcattcacatagttcatttagataacagtcctatgggtgcccaccactataggcagatccagaaccgcttccagagccacttccatatccatggccacctgggccactctgccctccgccgccgccgccaccttgaccacctgcatgagcatagccaccaccgtagggcccgtatgaaccagcttggccgtaaccagatccagaaccagaaccataacctgatccaccattgtatccaccgccaccaccaccaccttgtccgccaccctgagcatatgctccaccatgaggaccgtagccaccagcctgaccatagccagagccagatccggaaccatatccagacccaccatttgccccaccacctccaccaccaccttgaccgcctccttgagcgtacgcaccaccatgggacccatatccaccagcctgaccataacctgaaccagatccagaaccatacccagatccaccgttttgtccacctccaccacctccaccgccaccacctccactagcatatgctccaccagagcctccagcttggccataccctgagccagagccagatccccacccagaaccattccctgacccaccaccacctccgcctcccccaccgcctcctccagcgctcacatacctagctacccttgtagcattggtcagtccaatgccaaggaggacgacgaagctaagagcaacaaacttgcttctagccattgttatctcacagatgtgaatctgaaggttgagatgagagtacgaagcgtgtgtctctatttatagtgctggaggccatacaaagtgagtgtaaaaaaaaagaaaaaagaaggccatacaaagttgctgtgcaaatatgcaatctgtgccatttggtcactggttttatcaaagcagagcagcgttgccgtgtgcttcgtgagtacaagtccaagaagaggttggcatcgtatgactattgggacaatcaaacgcaaccttttctttgattctgcttgactacatgtgtgtacgttgtaaggttgggcgcaggtatatatgccctatggtcagggaaagtagcctgtcgatagtcgataccatgttctatgagcccaggcatttgaccatccattgtactccagcataggacataccctacaaaaacacagtcaagtttatattttagtggtacactggttgtcgtttaggtcagatacgtagagagcattggaagttgcaaaagaaaccaaaacactgcagcaatctgcttgctttctccgtgtgcacgcagatgctgactagttgattccaacaaccaattttatcttgcgttaagagatgatcacggtgagacataagccaaactaataaactatcttctggatcgaaacactatcaatcatcaaaacacaaatacacaatcgatcaatatataggagtatatgtttgcatagaccaattcacctgcatctgtttgttcttgtctaaaacgaaaattctccaacatctgcatggctaattaactagccagaattggccagaataatcgtagatctctctttcagtgacagaatactgttccattcatttaactgaatttgacaaggcgaagagaagtataaagcgcctccgttcaatcagccacgaggccgccgtctccgcctcgccggcgccggcgccggcgccggaggggatcagagaatttggcccacaaacaaattcggcctactacctcttatcctcgatacaatccagcccatatataaatctagcccatctcttctggacgaaagaattcagcccattcagcccgcaaaagaaattgacggccgaaacgtgggtccaatcttgacggcccattgatttaactagaggcccacactgagatggatcgctaccatattgggcctcgtccatgccggcccacagtactaccttgcccattagcagacgcgggggcggagacgccgccgccggcgtcggcgacggtgacctcgtctagagccgcgccccctcccgcggcggcgccgaacgctacagcgacgggcggtggattcgccagcggcgcccacgccgttgttgacttcctcgaggttagtcttcgagtgtttctgtatttacccccaattcgtagttctgttgattgcttcgattgaactcacccatgcatcggacgattcaatttggatttgaaactcaccggtggttaggaatctggagggtgtgtgtattctccgtgccttcatggtgattcactgtattatattacctccacagaaatgttgttgaatcgtaatgtaacattgaattcccacggtaatctggcatttgtagacagggttgacagttgcattttagtagtgagacatgaacctgagcactagcttgggtagcttcggtgaaaattcttccctatgcaatctttagctgtttattgttaattgtactcgctgagatagtttttattttgtgatgttagaaatttataattgctcagacactggctctctgctgtttttcatcccaaaaaataacttggtggttagtagctagagtctgtagatattgcagggcgaactagaagctcaagataagttcagaatgcattctttccatgcccctttagttaactgataaacagtacctggtctggaattcacaatgcttagctttgttccttgctgttaaattaaccaatcatattcctgattcaaatttaggctttgagttggttgcaaaatgtggaactttctcccggccatgatgtgctgtatgtatttccaaggatgagatgacggaacgaattgcatggtgcataatgacattttggtcaatagtgttcgacaggaagcttttgaaaacgcagtgcacccatcatcatctctaaagataaaggtgagttccagcagaatgtctattgaactggtactaatctgatttcaaacaatccaggaacttccataacattggcgtctcgtcgcaaggctcatttttagttttgggtcatagggcggggcaaatataggtataaagcctgggcgagtgtctttgtccagcgctttcactaggggtacacacaactctggacttgtgcagcgcgaacatacccgaccggacgtagagccaaaattcgttttttctttgatgttcgccaaaacaacttacttttctttccgtgcgctggggtgcgagaacgagtaggaagttctggtcccacccggaagagtgcactgatagcctatctatcaatcttctacagccaatgacataagataggaaatgatcccaaatgacaaatgaataggtgtggaagttataattgtaaataaaccacgatcgaatcagttttggagaatagtgagcatatattgcagtgtgcttcaggaataaaaacaatagccggagtaggtaagggatgactcgctaaagccagcgtttttctcataaggcttgactattacgtccagggtgtttaagatttgtctgacttttttttcgctaacgcacaaaaagaattgcacgtcggtatattagaagaaaacagggttctggttacacgacgcaaatggctagaaggccattgccaggggattggaaaaaaagatttgtctgattttgcagtttgttctctagttcagggaaagtatcaaaaccatggacgtacataagcccatgcatttgaccatctctagtttagttgcaagtatatatctgtacatggatatccctttttagtgttactgaattcagggaagtgaggttttgtcaacaatatcattaagaacgctggcagctagccctagctttttgtgcaacatcacaaagctctatgacgaacattgtcgtaatatttatactacctactgtatttgatattgtcgatattgtcagtttgtgactttgcagtgtaccaagctaggaaacttaattacgtggcaaaataaactgaactacatgtctacatgtgcagtgttcttgtcagtcaccccatgcaagcgctgactctccaacatgattagaccatgcacgagtccttaatctacaaatagaggtatgattactggacaaatatggctgcatgcatgcttaagatgtaatgaaaaaaaatgaacaacatataattttactccacgcagaaggaaaaaattggaaaaccatttatccagttatgataaattaagataatatttggtaacatagagtaaggtactgcccatcaatcttaaattaaatatgtaaggtaaaaaaaaatgatctacttatattaaaagggagaaaattaaaaagcctatttaactcctataattaagcaaattatctggctcactaccagatatatatatatgtcaattttgtttctcctgtggttctttgttttgaatattaattgcgagtgatagatgatttgtaattttagtgattgattgattgtacaaagtttggagcacatcgacaatttttcgacaataaggctgaataattttcagaatattatgcttggttggggcttggttctttaaggaggatattatctcttacatgtttgtaggatgaaataatgctctctcttagcttcctcattctttcttggttacaacatttgtaaacttcaattttttttgttcctttaaaacaacattcaatgtcagtgagaatctgtttatattttaaaatgtttcattcaaaacttctaaagttgtcgtccaaaaatttttttcactccactaggacctactaacataatagtttctacaatagtataagaagcataaggcaagaggttattcattgcaccagtaacattacatagtagtttacattaccactacttttattctattatcggttaccacataacaagggcctctttgatattatttaactgcataaaatgcagttgttcactatatagaagttctatggatgcccacccccgccaccgccgccttgaccgcctgcctgagcatatcctccaccgtaaggcccgtatccaccagcttggccagaaccagatccagagccagaaccagacccgccgtattgtccaccgccaccacctccaccttgtccacctccttgagcatatgctccacctgggccataactaccagcttggccatagccagagccagaaccatgcccagacccgccatactgtccaccgccgccacctccaccttgtccacctccttgagcatatgctccacctgggccataactaccagcttggccatagccagagccagaaccatacccagaccctccattttgtccaccaccgccacctccaccttgtccacctccttgagcataagctccaccggggccatagctaccagcctgaccatatccagacccagagccggaaccatatcttgacccaccattcaccccaccaccaccgcctccaccttggccacctccttgagcgtacgctccaccatgagggccatagccaccagcctggccataaccagaaccggacccagaaccatatccagatccaccattttgaccgcctccaccaccttgacctcccccgcctccactagcatatgctccaccggaagatccgccggcctgaccatacccagagccagagccggatccccatccagaaccatcctcggaccctccaccacctccccctccactaccgccaccctcggcgctagcatatctagctacccttgcggcattggctagaccaacgctcagcagaacaacaaagctaagagataccaacttggttctggccattgctaattaagtactctatgtgtttggatgatgagatgggtgcagagtgtgagggttgcttgggtatttatagtgttggagaccatgcagagctctagcacagagtgacacattcggtctctggtttatctgaatcagtgttcttcagggaacaaaaagaagaacgagtaggcaagatatgactctcaggccagttagttaagcaaacttttttgtttcaggcatggcttgactatcactttgtgggctatgtatgttgggttgaaattgttggtagctacatggtcagggaaagtatgaaaaccacgtactctgagtccacagtttgacaatctgttaatttattactttgtcacaacatatatacctccattctttacaatataacattgttgtcttttgtacaaacataaaaaatattagttatgtttaaagaacttttaataataattcaaatcaagaaaataaatattaatcatataaattttttaaataagatgaatggttaaagtgttttaaaaggttaatgacatcgtatattgaaaaaacggagggagcacatcccaataatgtgatggaaagattcagtggtaggcaatgtacctgtcgacaacgagacgcctgtggtgacttcgtcaatctcaatgacttgccggcccagtcttcgaagatgctcgtagaggtagggtttgcgtgcgttcatagggggtaagtacgcgtgcattgcgagtgtctgcgttgtattgtgtaattctaaaaaaaaataagagaaagaaaagagcagagcacgcgtttgtgacttgagctgaaacgtgtttcttgcagaaggcctgtacttagtcctctcggtaataacaagtgacccccactgtcttcacccgtagttattaggtagatttctgccagaatagcactttgcatctaatttaacaattaaaaaaacaatgaagtggcttaaaaatataaacaatgatctcgaagaatcatggaatgggatatgtacgttcaatatgcattacttttgggctaattaatcaagtgggtttttagcatgtgcgaatctaagcttatggggaaaaaaaacgaaaaaggcaatgaacactcgatatgtgtgtgtgcttcccaatcaaaacaatggatctaattaactgcacgatggatcatgggtcgagttgcccagagactataaacggggtgtcacgattatagttacgagcaaaacagtttattatttaacgattaaataatattttatgagtaaaacatttatatacgtgtttgttagtgattttaaaaacaaataaagaagattaaaatatattttgaaaattcaaaaaaataaatttaagttttaaatttaaattttcgtttatatttataagctaaaggctaaacgaagcagctttataaggaaataattatcgaaggaaggataggcagtgccagtgggggtatgcctgttagtgctgacaaaatgaagataaccaatttgccataataaatcgtcgatcaacactttaatgactcatgtctcaaagaaatacacatcacaatacacacaaaaaacccaccacaaccgcactttggcaagctatactattatcatgcccacacagaaacatgctatttcgcacgtgtgctctcgtgtcccgtgtggccatgcgccacacgagatgtgggcttctttaaaatttgatttaataattactttgaatatcttttaaattctagcacaaatttgcactacttagttaattttttaaattaaataacaactttcaataaaaagttaattatttgatttttttcatagaattttaatttgctctaaagagaaaaagaatcgatgctggattaaaagttcttaattttcagttgatttttttttcatactgggtatacgttgttatgtagaacattgttctatggaaattaaagcttttatccaaaatggttctagagagagtatttctacggaaataattagtacgtttctagtgtaagtcatacccatatagtcaaaagcctaaactaaaagttcagatatgaaaatttaagggcaattgcttatttgacctcgttttaaaccctaactaccaatttgaccctacttttcgaagtttgcttgtttgacccttcttttcaaaaacgaagctcccgtctgaccctgtttccactagtccgttaaggtttgatttaaaataaaaaaagaaatgcaactaatatttataatacccagaatacccttaggagaccctatccatccacccaaccttatccacatttctctctctttctccttcctccttcctgctcgctcgacttgtggcggcggtgctagggggcggcggcggtgactgagggggtggagggagggagcggcggcggcgacggctgaggggcgcggagggagggagcggtggcggttgaggtggcaccggcgcggcagctgaggggcgcggagggagggagggagggagggagcggcggcggctgaggtggcgccggcacgggatgagggaggcggcggctgtggcgctgagggggcggagggagggagcggcggtggcggcggctgaggggcgtggagggagaagatccacgccggctgaggggcggcggcgactgaggcggcgccggcgcgggatgagggaggtggcggtggcggcgccggatccgctgaccgcagctcgagctccaccgcccggactcaccgccgccattcctcgttgtcgtcgtcaccagggccggcgccgtctcgcctttcgtcgcctctccctgtggtggatacgtggaggagaggataagaacgcgccgccgccacttgtcgtcgtcgtcgtcatcaccaaggccggcgtcggctcgccgtctcgcctttggccgcctctccctgtggtcaatccgtagagaagagagaagagaggagaggagaagagaactgacgggtgggtcccacatgtaatagggtcaaatgagtaagggcagaagagacattttgtgcttcagttaacaccgttagatgcccttaacagaatagggtcataccgtagcttcgtttttgaaaaggagggtcaaataagcaaacttcaaaaagtagggtcaaattggtagttagagttcaaaactgggtcaaataagcaattgccccaaaatttaaaatctaggtagaaagctatgcgaatagcaagttttagtgtcatatatataaaaataaaaagtattgattttgaaagggacggaggatgctaaatgcatgtgagtaggacctgatatgcgttccatgtgaactatatggcggatggcaaagctttttccattgctttgcactcatatgaagaaaggctaaaaagcaaaggaagaaaaaaaaaagggtatatagtgtgagtgtgctcacaagttgggtttcatgtagatccacaactaaaaaggggagggcaggggagagccgccaccggcctcccgctcgaacccgtccctggatctgcgcgggggagagccgagggggccaccaccgtcgcccacgcccactgtcgccgtagctatcgcccacaaccgccgccgctgccggtcgaccacacccaccatttcaaccgccatcgcctgtgcccgttgtcgggagggtggagaggggagaggagtgggctggggtaggtatacaagtgggagaaagagaggagtgaagaataaaaaataagttagaatagagagggtaatcactgctctggaaacctttttcgctaaacatatatggctgtatgctatgtggaccctgcatcgacggctgcatgtgaaaacgtattttcatatatgtccgacaagaccattcgtgtggcttaaggaagctaattactcgggttcaagtagttcgacgttgtcggcaagagagatggacctagagcacccataagacaccaatacaaatcaactatttttctgctcccctattgtttctcctatatatgtcttttagttaagctacattcaaaatttaaattttaaaactcaattcaaaagttatttttttatatttttatcgtagtttattttacttttaaatcgttaaaaccacaaagatttgttcttttaagtcaaacttatctgtccagacaaaggtcagcttaaccttatttgcacgatctttttttcatagtaacctaatgcctctccatgcatactgctgcaaagcacatgtatggagtctgatctgcagaagagcatgcaacagcaaccagagattcaaatgctctcttgactttaaagtatgacgcaacactgtcaacactactatgtattgatcaaacatctagttacaccggtgggctgtgtagaattgtggtgtacaatgaccagtacattttgttattacagtgtattcaacggaggccctttattacccattatttacgtaaataacacatctctcaaacatgcaatcagcacacatggcctgtggtgctagtttatttagattctacatgtttttatgggtgtccaccatacgcacttccagatccgcttcctgatccactaccatacccgctgccaccaggaccgctctgtccaccaccgccaccgccaccttggccaccggcctgagcatatccaccaccgtacggcccataccctccagcttgaccatacccagagccagagccatacccagatccggatccaccattttgtccaccaccgccaccttgtccgccaccccctccttgagcatatcctccaccatatggtccatacccaccagcttgtccataaccagacccagaaccggaaccgtatccggatccgccattctgtccacctccaccacctcctcctcctccgcctccactagcatatgctccaccgccacttgcctggccatacccagagccagaaccggatccccatccagatccaccgtttgacccaccgccacctccccctccaccgccgccaccgcctgcactagcatatctagccacccttccagcattggctagtccaatgctcaccaagacaacgaaggtaagagccacaagcttagccattgtgattgatctagataagtaagccaaggatggatgggatggatttcaagcgaacggctcgtcggtatttatagcactagcttagccattgtgattgatgtaaattaagctgtcaagcaagatgccactagcatgatctctagtcaattacgtagtactacataattacaaagtctacttcacaggggaaaaagagtgcagccgaattagatggactatgacttttatgcctggttatacatactttcttattagttggcctgaataaagataacgtgtgaattgatacgtataatattatatatttagatagctagagaaacataaataataataccacttactgagtccaagtaattgagcacttccaatgggcaaattaaatttaattatgggcaggatgatatatagatcacagctagctggactaagcctatagatacaatagctagtactacaatatatcataaaatgagtcgctgtcacatgttaataattaagttatatatgctacacgtacatacctttcatgtgtggtaatgtgtggctgtgtagtgtatgcatgcaagatgcatagctgtatgcactaaatataatttcttgcatgtatgacatctgattaattagtcttttccgtgttgtgcttatccaccctttgattttcgtagggcatattataattcaacaaggtgaacaatgtagtgctcaaggcccgaccattattttctagaatatacatttaatagtatagtgatagcaatattatgtgatagtggaatcaataccttgtatataattagtgcccgctagtaattattagaaactaaaactcaagatgcaaatataccacatcatcatctactagcaattactattgtagagcatcttaaatcacatgcaagcatgacacatcatctaaaatataatatcgtagagttcaacatataaatatgtgaaatcatcttcctcacattattttcataatatttcaacattatcatttctataatatttaacatatatccatccattcattccacagcaaagcacgggatatcatatagtattaatgaattggtataatcaatatttttttattacctacatttcttttggaggttattataaactttatttaaagtactatagaaaaactgttttgttagatcattttaaatcacatgcaagcgtgatatattatctaaaatataccattatagagttcaacatataaatatgtcaaatcatcttcctcacatcatttcacaatatttcaacatcatcatttctgtagtatttaacatattcatccattcattccgcaataaagcatgggtatcacctagtattaatcaactggtataataaatcattttttgttactacattttttttaggttattataaactttatctaaagtattaaagaaaacgtgttttgttaaaatttttaaggctcaaatttactactcaatatctccctcatcctaaaacgaatctggacagattacgtgtctagagtttggcttgatacttatgcttctagagtttctagagttggagaccatgcaaagctgaagtgaagagtgaaattttccgttcactggtttattacgagaaccactgttcagctaggaaggtatatgactcttatttaggccagtttgcaggaaaaccttttgtttctgataaggcttcgcctaatacgtgtggttgttggcttaatttgttgacttgatactttcttcagcaagaattaatgttcagtcgatactgtagctaactaatcagggaaagtactacgaaaacaacgtactctgagtgtcgcttgctagctagtactagcagtaggaatacatatatacttagaaaaatgatgctgctgattcgtatgatgttgaccatgtgatgtattatacgtatagctttgaccaccgtacctactgcgacgcgagcttttggtcaggtaaaaagctcaacattaatatctaaaaaaaaaaggtaaaaagctcaatggatcgacctgcatgtggcgcaagatcgactgttttttctttactctttgaaagaggaagctgcaataatatactccctccgtccaaatatttgacgctattgacttttttaaacatgtttgaccgttcgtcttattaaaaacttttgtgaaatatgttaaattatatgtatatataaaagtatatttaacaatgaatcaaatgatagaaaaagaattaataattacttcaaatttttgaataagacgaatggtcaaacatatttgaaaaagtcaacgacgtcaaatatttatggacggagggagtatataatatcgtttctattaaataatcattgctcatgtctagtggatcatgctgccaaatttacggcctctcacaaggatatataaatcattcatccagcagtggcatatcgatgctactgatcaccgtgatccctactcttattcagaataggtagaattaccaccgaaattccaaaccagctcatgcatccctgacatatgtgaccaaatacacgtacttttctgcgtacttggtactccctccgtcccaaattataggatacactttttttaaaaaaaactaaaacgtggtaacttttgactaataatcatactaaccatatatatttatgctaagtattatgcatgttactctctccattccaaattgatctacatatagttttttcgaggttattcctaaataatctacatatttgtgttcattcattaggtctattcgttatttatgcattagagtaaatggacattgatgcatccatgcacacaagcatttataacccacatgcaatatcttgatttactattggctacaaaatagtagggatggtgcatgcattaagtttgttgctagagtaaatatagtataagagagttattagtttttcttggtcttggtgtacccatgaaatatatagataatttggaatggagggagtatatcactatattcatattttaaagtaattttatgtgatgctaattttatatttgttaggaacataatatggtataaattaatggttaaagtatatcattaaagaccgtgtatataaatataggtcttataatttgagacggagggagtatatatatggcatgaactaagaagtcagcgttgctgccggtgtggttataccatctgcttccttcctcttgcgacccacttaacgtagcttgaagacaactcctttaggcctttactatatatatatatatatatatatataagaatcactcagagccaatcttaaaaaaaatcattatttttttcatgacaatttagatgaacacaaacttcatatatataaaagttatagctcttgacaggttgaaaacctttttgatttagagttattatatgctctaatattcattaaaactgacaatgaatatcaaaagacaatccataattttttttttcatatacatgaatttggacaaactttttatatataagtttgtagacaattacgaaacctagttaataactttttatttcaagtgatttatctacccaaaaatgtgttaaagttttagcaaggaagggccaaattaatgaaacaaatatgataacatggtatgttgagttataccggagatggtaaactggcgatgcatgaagggagctgtgttggtttcgagtcccatactcccatatactacatactactagaaaaagggtttttcatcgtgacacactatttttttactgacggccagactctaaattcacttgcacgaatacaatgaggggtggggggaaccgcgagcaaagattgatgggcatatgacttgtgacatgtcctatatatacacgagatataatatatttcttttttagtttggcatattaaaaatcaaatcctggaaactaattatcactactggttctagccatgattggtagcaatactactggtttttattatatgaaacccactgacagtttaagacgatcgatcatgcatgattcgcaattatgcaccggccgtagtgtgattaggctttctctactactagtgaaatattctctagatcatatatataggatacaatacactcattgatcgaacatttcaattacactgatgagcttacatctgtagtggtatacaagaccactttcattattacatccaagtgaagccctttatttggttattattcacgcaaactaataacaacacctctcaaaccaggcagcacatagtgtcagtactgctaggttatttaggtgaagcacttctatggatgtccaccgtaggcacttcccgaaccacttcctgagccactaccatatccgctgccgcctggaccactctgtccaccaccgccgccgccaccttggccaccagcctgagcatatccaccgccatacggtccataccctccggcttgaccgtaccctgaaccagagccggaaccatatccagatccaccattttgtccaccaccgccaccctggccaccacctcctccctgagcatacccaccaccatatggtccagacccaccagcttgcccatacccagacccagaaccggaaccatatccggaaccaccattctctccaccgcctccaccgcctccttctccacctccactagcatatgatccatcaccgcccgcctggccatatcctgagccagagccagatccccagccggaaccaccgtccgacccaccacctcctccctcgccgctaccgccacccccagcactagcatatctagctaccctgctagcattggctagtccaacgcttaggaggacaacgaagctaagagccacaagcttacccattgtgattgatctagcgagaagctagtgaaggatgagatgaattcgaagtgatggggctcgtcagtatttatagcaccggaaggcatgcaaagctagctgtgtcttgcagttaagatgccacttgatctctgatcaattacaagatgatgactggctgactgctaagtctagtttggcaggaaaaagattacagcggaattagatggattatgactttcgatggctatcaggtatgctgttttcttctctcttttgagtaggccaggatataatttggctaactctaggtcatgcagagaaacatgcatataccgtgtactcttaatccaggtatgtgagcatccaagaggcaaaatttagcagcacatattggattgtagctattgcaacacaccaggcatcctcaagtccacaatggctagtactactacattattgtcataaagtgagtcacccatttccacatattaattaattaataagttgatgagaggtattgtgatatatatatagggacaatgtttgcatttatatatacatgcaggatgcatatataagttaactgaatgtataacctcatttcgtctaattaatgacgtctaaccaataacaagatatgccggcccagtcttccggaggtgctcataggagtagggtgtgcgtgtgtgcgttcataggggtgagtgtgcgcacgttgtgagcgcctgcgtttatactgtgtttctcaaaaaatatatatatatattcttgcatattaatgcacccgatatgtatgttggtcatattataatttcaagtatcttaggtactcctatattgatctcagataaaaaaaagtatgtatttaaaaccaattaatagtgaccgaaagcgtattggaatgcaaatatattggtcatcatatctatatataatttgataaactatatattgagcagaataaactgaactagctagtgtctgtaaactactacaaatacgacctaaaaaacagcggatcgagaataagcatatgtgttcgtcaaattaattgaatgcgaagtgtcgagttggctcatgatcgaacttctagtacgtgtagccgcgtagtgtaggagaccatacaaagctaggtgtagagcgaagtgacattttgggtcacttgtttaatttagttaatttatccaaacaatcagtgttctcattgagaaaatatcaggtcggcaaggcacgactgttaggccagttaggacaactttttttcccttttatgattaggctttgcctaatacgcctcccatgcatggtcagggaaagtatacatatagtagtatatatgaaaaccacgcgtactctaagtgaggaaatgctagctggtgccaaactgcatatgcatgccaaccttggatgacatggatcaagtggcgccgcaggcatgcactccctccgtccaaaaattaatactacctctgtttcatattataagtcgttttaatttttcttcctagtaaaacattttcaagtttgaaccaatttataaaatacctagcaacatctataacacaaaataattttcattaagtctaacattgaatatattttgatgatacatttattttgtattgaaaatactactaacttttttataaacttggtcatacttaaaaatatttgacttaaaaaaaagtcaaagtgacttataatatataaaaaggagggagtattaacttctagctacaaattaaaaaaataaattgttttctgttttaatatcagcaaggacaatgtaaataaatatcaatgcattaatttttggtaataaattgtccgggtgcttcggacacttcaaacagtttgtgtctcgcccacagcctaactaccagcctgtagaatagaaaacatgtggtagtagatcaaaatacgccttattatttcaaatagccggatttactcgtgcttctataacaagctatacagacaattaaaatctctctttcccacccgtatctctctcttccttcccaccatccctctctcccttcctttcctacctttgctcctaccttttgactctctagtgaggcatcactgtaacaagcttaggtgtcatctttacctcggattgggatcctctaacttaagctcactttgagacactgacatgtggcccctctttactatagacccagatgtcaatgaccccaaaagtcacctgacttaagtcagaggatctcattcccttcacctaggaggtgcagatttacaccagccaaaacaaggaattaatactaatcaatgaaccaaacactagcaaaatagttaatttctaaaaggcatgttttggcttcaaaccgaaatggtcctcagtgtggttcgatcgtgaattatcatgcatttggaataacatattgatcaaacattcaattacaccaagagcttacaaccgcattgtggtgcacaacaccactctaattattacattcagtgaagccctttatttcttattatccaagtaaaaataacagtaatatatctgtccaacccagctttcaatatagaagctctgctaatgttggtggaacactactatgggtgtccaccataagcacttccagaaccacttccagaaccgctgccatacccgctaccacctggaccactttgtccaccaccaccgccaccaccttggccaccagcttgagcataaccaccaccatatggcccatatcccccggcttgaccatatccagatccagagccagaaccatatccagatccaccattctgcccgccgccgccaccttggccaccaccccctccttgagcatatcctccaccataaggtccatacccaccggcttgtccatacccagatccagaaccagaaccatatccggatccaccattctgcccacctccaccaccaccaccacctccgtctccactagcatacgatccatcaccacttgcctggccataccctgagccagagccagatccccagccagaaccaccgtttgacccaccaccacctcctccaccaccgccgcctcctccagcgctagcatatctagctacccttgtagcgttggctagtccaacgcttaggaggacgataaagctaagagccacgagcttagtcattgtgatggatggagccactgaagtgaaggatgagatgaatgttgagtgaagagttcgtgggtatttatagcaccagacagcatgtgtaacttgaagctgtcatgcaagacgcagcttctttagtcaattacaggataactagaaagtctacttcagagggcaagaaagagtactgcagaattaggtggaatatacgacttctgtgcatgcaaggcttgtcatgaagacatgaagactttgatcttatgagtagacttgaatataaatattacatgtaagttctaaagttcatatgtatatagtttagctatctcgatagatctaggtcatgcagagagaaagctaagcttgcataaagaacaataccgagtacccagtctaggcatgtaagggtgcagtgggcgaaattttatgggcgtatagtatgatatatatccagtgtatatattacaacacgacaaatcaacaatagctagctagcacacacatatcattatcatcattatataatgagtcaatcgtctactcagggtaatactccctccatctctaaatgtttgacgccgttgacttttccaaacatatttgaccgttcgtcttattcaaaaaatttaagtaattattaattctttttctatcatttgatttattgttaaatatacttttatatatacatatagttttacatatttcataaaagtttttgaataagacgagtggtcaaacatgtttaaaaaagtcaacggcgtcaaacatttagggaaggagggagtatatgttagatacacttgctaacacacaaagtgtatctttcatgcatatgcgtacgtagtatatatagtgtatagttcatggatgcacgcagggcgcatagctgtatcgatccactaaccttaattagctcatcttgcatgtgtaatgacgtctgttcaatatagtttgcatgcatatattattgcgtgtatatgtactacggagtatagagataagaagaagaaaagataaggtcaaaattgacggttttactccattaaaaatttgggggaaaaaacctaggcaaaattggttatatagcatcgaaagttcgcgtttttggttttatagcatcgaaagatatcggttcactttaatagcatccaaagttcaccctgatccaatttttaacacttccatcaattctcgatcgttttccgtccgccttgattgctattgatctagctatacacacgatatgatgtttctcccctcattgccatgcattttacttatacttgtgaggggtagaaacgtcatattgcgtgcgtggctgggtcaatagagatcaaggcgaacggaaaaagattgagaattgacagaagtgtcaaaaatggaaatgggataaactttaggtgctattaaagtgaacaagtatgtttttttgcagttgcagggttaattattaggccattgttggagtcttctctagcatatgtgcctaacttaaatttagtctctaactctaaaggtatgcggtagaagacacaatcgaactaatcaagggcttggctcatggtaatgatatagctatttctttttttatggcatcagcttctttaattgtccagtatgattaattgggttttgcttgtgtgccaaaagtaaaagggaaaattcaccacctggcacctggctttctcatccgaaggagtttcatatatacagctacagtgcaattgcaatttcttccctggttaaattattacccgctccattccaaaaacaaaaatataaagatgcaacaactttttttcgatgtttcataatatgcatacatgcaattaattactagcacccctatttcctctaaatttgttttttaataccctaccctctagatctctaataccatattgggtgcattatatgcatcgtatttattggagtaattcaaacaagaaggtgatactattttttcttaatctttacattagtggtggttgtgtcttatattttaggatgaagaaagagtaattagcaatataatatttcaatttaatttttgtttgtatttctgaggaattttttggccatgtctcaattctttgttcggtttaattttccacacttataaccctaaaagcatctatatccctcaactctcatgatctgatgagaattgtatttctgctttatgacgtttccaccatcgacatataataactcgatgtacatcttcatgttctagatgaaactttagtcatgtttaatttatatgagtatcaaaggttcatttaccggttaacggtcaaattttcataggaagatttcaacttctttaaagaagtatgcataaagcttcgagtatagaattcagagtgtttcacaagtttcatatcctgttgcaaaaatgttctatgaaggttttagagttttggaggactactttatacaagattatcaccatgctttagcaaaatttgattatttatttttaataatgaaagtgataattcatagccttcaaatcaattaactatggatgcgaaaccaccatttcttgaactacgaaatccatgaaagaaaggaaatgaaaacgaaaactattgaatcaaacatgcagccaggtgtgtcttaaagagtgtagaagtggccatttaattgtctgcaattgcaacaacatccaaacattcacaaagtgtatgtaacattacagcagctccacttctgttgataaacaaacacgcgagaagccctttatttagttcttattatcatccatatataacaacatacaaaactagcattctatataggcttcatccatatgtcatccaggtagtgcgtaaattctatggatatcctgcacttccagatccacttcccgagccactgccagatccgctgccccctggaccactttgtccaccacctccaccaccaccttgtcctcctgcctgagcatatccgcccccgtaaggtccgtatcctcctgcctgacctgatccagaaccagaaccagatcctgatcctgatccaccattttgtccaccaccgcttccaccaccacctcccccaccctgggcatatcctccaccataaggcccgtaactcccggcttgaccatatccagacccagaaccagacccatagccagatccaccattcgccccgccgccactacctcctccaccgccgccgccgctagcatacgctccaccagacccacctgcctgcccatatccagaaccagagccagatccccagccggaaccaccccctgacgagccacctccacctccaccgccacctccacctcccgcactagcgtattttttcggtctagcataggctactcctatgactaggaggacgaggaaggtaagtagtactaccttagagccagccattgtgaagttaaggggatatgatgactgaaagattagctttgcattggtatttatagtgctggagaccttgcaaagctgtagtgcaagaggccacttgctcagtaatatatcgaatctgcaaacctcagcgagagagaaaatagcccggttagggaatactatacatatctgttcaacttctaaacttggccttattaagctggcttctacatatgagtttgacattgtacaagtcaatccactaaacctagtgaagttagtccaggcattagacttgtgcgtaatataaaaattttgacggaaaataaacgctaaattaactagccagagttgttactaacttaattaccactgctactaggagaagcagcgcagttgattggcacaaatcatgtggcgctgagaccttaaaattagattaattgttcagctagctgccaagctatagctctcagatttgtggtcttgatcgatttcattctctattgcattgggttttctcaaatacttgcagctagctagatgatcatgatgtgtgccgacgtgctcgcgtgcatcggtgcatgcccagatccccttcaagaattcttctgcaaattttataaatggatggtataatctttattatggcatgtgtgcgtgttttccttttctttttttttctttttctggtctaggatgcatgccttcctgtgcagcagtgtgctagctagggctgtcaacgagccgagctcgagcgagctcgtcagcctaggctcgagctcgatacaagctcgagccgagctcgagccaagcctataaaatgttcgagctttccgacaggctcggctcgagctcgatcaagccgagctcgactaccgagcttgtaaaaaatatatatatatttcaaagataacctttaaaaaaattaatttctagtttatcatactaataaaagaggaaaaaagaataaaataaatatattatgtcaatataagacatacaaataacatatttgatctcctaatttattaaataacaataaaaatgatatattactaggctcgttagaagctcgagctcggctcgacaaagctcgcgagcttagggagatgctcgggctcggctcgtctggagctcgagccgagctcgaatcgagcctagaacgagccgagctcgagcagctcgcgagcctcaagcttttttgacagccctagtgctagccagtgagatatatgaccgttcttagcttacagtatatatgatcatcaaagttttggcccatcaagttaaaacaaatttcgaagacaaaatcagcccatatatgtgtctcgtactccggacggacagaaaaaactgggcccataacatatgtatccctgggcgaataagtttactttcgtccctcaatttatcgccgagtctaaaatccatcctacaccgaaataccagatagaacgggtctctcaattaacaaaatcggatcatctgatgtcctaggcaatattatgtctggttttaactgatgtggtaagctgattcttcacacatgtaagtactggccacttacatgtggggtacgcctgggtcccacgctgactcagctcgtcacgttagctcaaatcagacataaaattgtctaggatctcgggtgatccggcggttttgtaaattgagggatctgttatatctgtcgtttcagtttatggataaatttcagatttgatgacaaattgagagacctaaagtgaacttattcatatccctggtttatctatgcactgtgctatgatatgggccgaaattgtatggcggccttgaataaatgggtacgtgtatcactctactctcagcctcatctttgtccaatatgaaatctaggatattttctttttaaaattttcaaacttaattttacattttttatgatttttatttaatttcgttttcataatttatctttaagtctatgagggcatatatataaaatttttactcataaattattttttcttgcgaataaaccgttttgctcataactaatcagctcatggtcaaccggtggtgccttttatcttttatttgcctgttcgatcattttcatttcccttgtaagctagcaacgaacgaattagtaacagtcatatcagtaaaacaaaagaaaatgaaagaaaactatacttgcaatagagaccacaccaatgaacaaaacattatgcatgcttcaattcattgctcttgtagagtgtcatcacatctcatttccgcatgctgggctaccatgcatcttccattacaatgatggagcccattaattattaagaaaaactgcctaattaaaacccaagtacaaaccctagaaattaaacttcttgtcggacagcataaaatgacgagaccaattcatgcattgtctcggcctcctccggctctagggtttcccgcgacaagcgaaaacctaccggaaatttcaatggtatccgccgctaccggatccggatcccttgccgctgccgctgccgtagccgccgttctcgccgccgccgccgccgccgcccttgccgccgcccattcctgacgcgtagcctccgccggaggagccatcgctgccggcgtcgccagcgccggagccagcgcctgcgccaacgccgtagctcggagatgctgctgggcctccgccgtgcccgccgccgccgccgccgccgccaccggctgcgtcggcgtagccgccgttgtagtcgccgccgctggatggagacggcgccatcgctatcgacgagccgctctcgccggcgccctggccaactccggcgccagcgccgtacccgctgccgccgttggagccgccgccaccgccgccgccgccgccctcgccatcaccggtggcgtaattaccgccgctgctgagagcaaccggggccgacgccgacgagccggagccgccgctcgagccactgcccatgccgtagccggagccggagccggagccgtacccgccgttggtcccgccgccgccgccgccgcctccgccagcgccgccacccctcccgtagttccacgtgttgccggagtcgccgccgctctcgccgtatccggcgccggcgccggcgcccgagccggagccccacccgccgttcgtcccgccgccgccgcctcctccgccgccgcctcccccgccgccggagtacgagttcgtgtacctggccaccctcgcggcaccagcgaacccgatgctgaggaggacggcgaggcccagagccacgagcttggtggtggcagccatggcgatcgagagagagaggtggtggtgatcagcggataggtttgcgcgggtatttatagcgagcggcggatggcgggagatttaatttcctcttcatgagatcgacttggcgccatgtgcgacgatcaaattaaaggagattcgataaccattaaccatgcatggattagagcagatacaatagcaggctataagccagctataaatatattttaaaaatataaacaatagcatgctataagctagctataaacatattttaaaaagataaaggaagagagagaagagcagcgagctacagatctgtagccagctgcagcacggactccaagacataatgtgtgtatgacaggtagggccaggtattaatagtatagtaagcaattattgtatgaattggctattatattgactatatatgatttagagcttgtagttggctatactattaaacttgctcttagtagtgtagtgcatagcatctgttgattgttgagtttgttgaccaacatgactgcatcgatcaagatgcctgaatttcctatgcgaactttcgaatcgatcaagatgcctgaatttcttatgcgaactttcgatgtggtaatatattttgttggcaattaattgatgcagaagtttatataattcggtgtggagttaattagattagctagctgtgttgcttggtttcttcgaagcctagtgagctatactagattcgattcccttcatctgatgacaccgattagaaatttctcctactggaacagtgtgcctgtgcatctcaatccttaattatgcaggtaatgctaagttcacagtgacaattaagcggtgctcttgcactattaacttccctctaacttgaatatgcatagttgaggttaaacaagtgaaaaatccgtatgtattgcgtcatgctaaattacaaaattattcgtatacgtatgtaatgccagtcctgattcgagccagattatatataaacccattggccagctgcctagctcgatcaaagtgtacgtagatgttaagcgattcgtatgaatgtttcattcgtcggtgcagcaactcggtcgagttgagattatcttctgctaagtagtccatcgtggtaattaatcacaatgttgaccagcatatggattgcggatttgcacacggcgtgtagtgcatcgacctggggattcaacgcgtcgccgacggcgaagtcccggaaaattattagccacattggcagggtgagatcgatgagagggcctcatggggttttttgtttagtttttcctctgaaagtgtatacttaacgtgccttaattatggctgtgcagacaccgagggagtaatcagcgacaagtcgcagtgttcgagttgacctcgagctctgcatgcagtggctgcatatgcagcattcgatcgatcgatcgattctgccaaatagatagtacacgagatgtgcccccagaaaagatgaacagagaagtatttgaaaaccagcaagtatacttgatgaaaagaaagatccaatatatccatctttagcaatgggaatctcggatccgatcgttgaaagtacaacaattgcagatagtaattaaacaagtagtagcaacttgatcagtagactattaagctttattattgtgagcttttgatttggatttgactatttagctaacagtatatgtgggcaaaggaaaggaattggatcgtcatttctacggcagaggtacagcagcttgtatatatatatttaatatttgtacccaccattatgtggtaaatatcgagaaaaaagtaatctgtgataaattacagatccaaattaaatactacaattaatatttgccatggtcgtaatactaatttatgatcggtaaatgtgatctaaaccgttaatatatgtgcgaaaaatattatactaccgttagttaatttggtattataaatagataggattcattaaattaagaaagttgacggtctagattaattctaatatcagttaggaccatcgtaaaaacatcttatacagtggtaaattgatttctctctgtttataacatatttataatatgttttgattttcttaaatcaaacctctttaagtttgacaacatttataaatatatatatatatatatatatatatatatatatatatatatatatatatatatagcaatattttttacactgaacaaacataccatcaaaatatattcaatgttcgatttaatgaaactaattcagtattataagagttgctatatttttctataaatgtggtttaaatttattgaattttgacatgtcaaaacatcaagatgtcttataatgtaaaatagaggaaatattatttataaatgttaaaatagaaagtaaattggtcatcgatctttctctaccagcttaaggtttttggttgagctaatcggtacatacatatatcaaagccaaatatctcgagtttagtcttggttggctgtaggagacaaaagaaaatcgatccagtttagcaaaatacagtaatcaatttaccgcttgtatatatattgccacatattgtttctctgcactaataacgcagaggatccatgcccaattgatcgaggcgaggagaccaaggaaattaacgcggcgtttggttaattacgcagttcgagatatatatgtggggtaaacatagtaggagtattcaatcgactcgttctctgcgttgaaattaaagcacgcatgcaacagtagcacccggcctcatcaattttcagtgatgttaatgtctacttgtcgcgagagatgatgaaattaatggcatcaaagtctcgtccaggttgaccgcgtatctgtgaaaaacaaaataccagttgatgtgattcacagataattaactgtgcaacagtatactgtagactgtaattaggtctaatcatgttgcttgattcttccaaactctgacatgatctatctaggaatctgccgtgcctctggctcgatttttgttgtagcctagaacgtaacacgccacaccaagctgcagcaggatctgtgcatgcatctcactggtcaaaaacagggttttgtacgtgcatctcaatgaccaacatggattgatttgatcgatccaaaataaaaaataatggtcaccttttttttaataatagaatataatattccggcttttgctcaagaagagctacagccaattattacagagtaacactcgagataagagtatagctcaaataaaaaagaacacacttaaataggaaaagccaaaataatgagaacacatttattccagtctatttatgaatctccatccatagttgacataaagttgcataaccattgtctccaacttgcgacatgcaactttcagaaactctccatcttcatcacacctttgtaattgtgcccaaaaccggagccaatgagttgccctgaaaattacctgcatataggaaatagatggtgatttgtcaaaaatcatatcatttctactcaaccatagagcccaacaaatggccgaagctccaacaagtatcagtttactctttttcttgtcaacccccaaaagccacctatcaaaaatatgagatatactaattggaagattaaaaccaaaagaaaactgaactgctctccatatgaattttgcataatgacaatccataaagagatgttgaatagactcattattcatacaaaagcaacacctcaagctgccgttccaaatccgtctcgccaaattgtccttagttaacacaacccctttaagcaagtaccacataaagatcttaatcttaagtagcatcttgagcttccaaatacacttatttctctcaacatagctattattaattaaagctaggtacattgatcttaccgagaatctaccgttctgatggtagttccatctgaaacaatcaaaagaacgattcaactggatatacacaatagaagcgcacaactcatgccaataatggtcacctagcaaagcaaacagagaatgggctggcttatgtgcacccaaaatgttgtgtgaagaagtgtgccctcgaaaatatttctcggaatactaaagtggatcgattttgttttgtctcctgcagccttaattaattacgagtatcaattaaatcatcacattatcaaatcgatctaagcttcatcagcaagccgaagtagtagttgggcttaggacaggcctaattttgtcttgctttgggcctctatgcctggtccaatccattttgcatctcacgtcctttagacgtggcttggaatgaatggataatttatggcttattttgctttttaatttctaccgagttttgccgtggcaattggtaaaccatcaacatttcaggcccagcataagaaaatgaatccatcgatctatattgggcttgctattcatcactcaactgatttttctaaaaaaatatatattagtcactttttgatacccctaaccacttctaatttttttaaaaagatattaattaactaactggtctcatctcactcactgtcgatcgagtactgatcaccacatatgtgcagcactatagcatcttcccctccctgacctcctcctatctagggtgctctaccattcgtcttgtcgtcaccaacacgagcgctagtagtgaagcttgtcaaccttcgcgttcccacgtcgtccctcactccctctttctgcttggttgtagtcggtacatctcatcatctttttgttgctcctgctaccagatctactgtcgctgcacccgcctcctaactaatcaaaagaatcgcacctgcctctaacactagcacacattcttccatccccgtggctttaacatcgccttgtcacctactcgtccctgctgctcatcatcggtcttctaccaccttggctatcgctctaaagttatcctcattatcccctacctcccacctggccaccacctctaagcctgaaacactaatccaaaggaagtttgtttgagttaatcgtcaccggtgggaccatcaaccctctccctctcctttcttcctatctcccccgtctaggtgttataacgatgcccttgttattaaattgtgatccaatgactagggcgaggtgtaacaaccctagtttgttggtagcccttgtagggatttgttcggttaatccatttcaagggggattgaaaggccctcattgagaagtgattaaccaaataaactatagtaatagtgtggtttaggtccttatggcccaaaagtggttggcgggtgaggatgagtttataaacctttatgctcccgcaatggtacctttagattaacccttttacatcatatacgacaggaggacgggaatataaatagggtactactgatagatgggcatgtttgacgtgtaaaatgaactaatgcagatcttaaagacatgatattagagtagctaggtgaatttcagtgacctgatttaactcttgctcttttttatgaacacaagaatggggtacaaatgcaacttcctcacttgagagctcagcacaaccatcaccacccccaacagaaccggagatctctacatatggtctttgaagatattatacatgcagctggttcaacatatatattagagcattaattgagatcatgtatgtgcccacgatttactgtgcggggacaggcacattattgtgacttcaagtgcagaaaattttaaagctgatttctagccattaagtgcggatactttgaaataatcgtgtggacatgcatgaggaactatatattatttttaagaaagcattacattcatgaaaaaaatccatttatttgttcctccctggcaggtacaagtttaacaaaacaaaaatcatgagataagaaagctaggttgagctagctccaatgtagctaagaacgatggcacaaaactaaagatctaagggtttgcatcaccataaccagatccaccacctacgccattgccattcccaccattttgaccaccacccgttccaccaccgttagcagaggcatctgcatttgcatatgatgggttcggcgaggagaagccgccagctccctcactagctccagatccagttccaaaaccactcccgtagccactggatccaacggtgccgcctccttgcccaccaccattgcctccgccacctccaccagcgctagcatccccagtataaccttgataatacccgctgctcgtctgactagagcttgaacctgcaccaaatccaccaccgtatccggtaccatagcttgttgcaccaccacctccacctccaccacttgaatgcgcgtgcgctccgtggccactcgtagccaccccgtacccgcttccggaccctacaccacccccattcagatacccaccaccattcccccctcctgaacctgttccctgagcattggcatacctagccaccctggcagcatgggttaagccaatgctcatgagaaggacaaagctaagcactgcaagctttgttacagccattatgaatatagctagctagctaggtgctagatggaatggacggcaaatcaagaattgtgtatttatagtgctggaggtcgttttacaggttctacatgttactagtatgataacatgatggaagtgtctagatggtgagggtcgacagtcaggtgtacctacagttaaatttttttaattaaccagatcgaatcttgtgttgactagcagaaatgataaattaactaactttgtaatgctcatcccaatgattcaagctagctattgttcagtggctgcctctgtttccaaaaactatggtacactttgtgaaatgcttactactgttaaaatgcctagctgtaagatatatgagaagcaaattcacatgtattacactgttcaaatatttcttatgggctctttctccttcgaattcgtttgacaaactcccatctatttgagaagttatgtactttttttaagataatgggaaaatttcattaataaatgaaattacactaggcttttgcatccatcagggatgcacagccaaaaaacaaaagagaactaagacagtctcaacaaattaagctcaaaacctcatcttaatgttagatgaaattagcataatcactcacatagaacgtcattatttttacagtcaatttttataatagtagagattaatggaaatggagggctaaggcccttcgataaaaaaaaaacatagaacgtcatagggaccgtctgtacactagaccagttttagttagagaaacttatctactaatttagcatctattaagcacgttatgaactatatactcggcatatgtaaggcatgatcaacagagcagctgtagaatagagcaacaaactagcaggttttcagtatatgattgattggctttcagtttcagtttcagtcatttgagttctaggtagaaaaggcaaataggcgatcgacgaggcagagaccgttgctgggtgtaaatttgtcgatgatgcattgtctttgtgactttcacaaagaggcaaggcaacgacatgacagttcagactgctgcaccagcgaagatgctcatgtctacatcacgttgtagctctgatctacatggagaagctgtctcaactctcatcacgagccatcagagctaccccaaggagacaagcagatcagagctactccacggcatattgggcacaaacagttacacaacccatacagatgacaactacttttacaacaagcagagagccaaaaggccgcaaattttgttcaatcgccatcaggaactttgaatgggatgctgctagcatgatttggctagaaaaagttgtcacactaaccgggggtcatggttcattcaggttgcgattacttggacttggacgatttgtgcttcttttttgggcgtgacccttcattacttgcaacataagactcgagtctcacattttcctgtgcttcactctttctgaattcctttgctttcttctgcaaattgagcagattcacatattatgagatgaccattctaattacggtaaacatgtcacgctcccaagaaattaataagaacgaaacagtgtttacctttagggacttagccatatcagcaatctcgtcgttgttgctggtagacttggcagattcgtatggagttgcagtgtcctcctgaaacaaattgttattatttagaaccaaaatgaggaagataatcctgaaaatacacaaataagaatattctaaacctttggaggaacaaatgcagcttctctctttcttttgttctcttcagctttctccgattgcttttccagcttctcttgccatttctttgcggacttctttttgtcactcatgaaatactcaccactctcaagttcaagatcaatctacaacacccagaatgaaacgttcaataaaatggtattgcagtacccaaagcaaatagccagcagtagctacacttgcactacaagcatatcattaggcaacgaggaaagaggaaaaacacatgacccatggatgctgttttcaccaaattataatgtagcaaaagaaatacactaatcttctatacaaataaaatgaatatgaacagagcaacctgcataaatacacaagttgtaggaagcaaggaaggactactaatcacaactcatatgctggtcaaaaccagtataacaaacagtacaagtttgacactacaaacgagtttaaacataaagaaattacttcaccttgctaggttgctgaggaggtggaaagggtgtgtatggcttcttctcctttgttatcggtttcttttgtttgacatttttcctgaggaacagcaaaagcaatgatgtataaggcctttagaataattgtcagtagcactaaacgtcttaacaaagatgatgcaagttccttacttcttaaacttcgggagaaacctgtcccagctttcattggctagcgcaggatttttggccagctcacgtttaattaggagttcctatgtagtttaacagaaaatataagtaataatcaacaatagttctgtaggaacattccttgaatcaaacatctgagaaacaaaacctgttaccttgatgtggtacacagggtgcttgatgttctttatgcagtcctccacaacccttcggacttgtttcaatcccttccaggaacccatagcagcaacagtgtttcccttttaatatagcaatagcaatcaaatcagttgatataaagagtaaaaaggaggttatcccacaatgaaaatttaaatgtagcacataaagtaagaagtattggaaaacctgaactaagatgtagcagccagtcaaaatctcgatggcctgcagttcataaaacagcatgagaacaaagggatgttttttctaaccttccaataatgagatgtatcaaaattgaacatattacaagcagtttaccttgagagtagataaattagggcccagaagacgttctctccttttaacgaatctttcctgcagatggcacattatgagcaggctgtagagtaagtaaaattcatcaagactgagtgaccgacaaacataggatgaagaggtgatgattgcattatttaccatatggcaagctgtaatcatgtaaaaaattacacaataagttaaatcagactaattaaagaaaccatatgttgtaggctgtagctcgttaaaccagtttgtctttttgtatttacaagacaatacagataacttagcacagaacccgtgaatatgtgatgcaggtgcttcagattacgtatttatgtacaacaagaaaatccataaacgtcagaatagctaaatcttggatcaaggaacagagtcctaatatgaaaatacaaagctgcaaactataaggtgaccatcttggcaataacatcatgggaaacattcagtaacagatgtagctatttggaaacaagaattgagttgagcctcatgaggaatgggcagaatgttttccaacatccttatgcgctcggtatcatgattatattacgtgactaacaaaagctggtatttaaacgtacatgagtggggatatttgcaactgatgacttactcaaagttaatattaggaggcaaattgatattaaaccatgatggaatagcctaccttgttccgtataatactaccaatcttgataatatcacagctcatctcatcgttgagtattttaatcgcctgcaaaattcatcagaggtttagcgacaaaacaagtcttacacaaagcaagcgtaggtcagcaacacaatattagcatcatgtggtaaggacatattatacctgaatactagaaatctaaattagctctcacattttcctataatctaaatgactcaatgcagtggatacaaagagagtgattaacacctgtggagcggggacgctcctcgacaacaattttatcagctccttggccttaacgataatgtagggatccctggtcttgcgcgtggtcgaaacggtcatggatccttccacctacacaaacatcaaaaaaggatatctcaaatctcacccgcagaataaactgaagaatatcaccaataatgtcttatcactcatcggctcatcgccgtaccagattgagctcgcaagcgaccccaaactccttcagcgcgcccttcacaatcggccacgcctcctgcaggtacttctctgcatccatccaatccggacaagcaaaacctcgtgaaattttcacatcatcttgggacttggggatttctatcaaatcgaatcgaaccgcgacttgcctcggtactgggggaagagggtggagaaggagctgacttcgagcatgccgccctcgttccacgaggggtcgaacttctcgatcttccagtggtcgatgttggggtcgtcgtcccacggcttcggcttgtcgtgcttccccttgtgccgcggcggcttcttcctccccacctcctccgccgacgacgcggcgttcgcttcttccccctcctccgacgccatggcggcgggaagtagtggaggtggcttcggccgaaggggtggtcggcgtcgagggggacggcggcggtggtcggatggtcggacggcggcggcgggggagaggagtgaagtctgggccttacagtgttacgaaattttagggttagggtagtgggtggtggtgataaagcgatgggccgaacgggcttttactgggctttctgctgaaatatggtcttgttgggcttttcggttaacagaggcatatgatcgaacaaatcgaaataagagaattgaggaaaatttgttggagatttatttcatatttattgtgatgtgaaattattctcactcaatctccaccgatccctctctatttacaaacaaattgtgctcatggggttaggggtagtgttttattttgagaacttgaggcttttgttagctttggctaggcttgaggcctaatccatgggagaaaaacaagtgactagcatgaagcaacattgtcaaatgacctttttatacctcaaacaaaaagcacaacgtgccatcattctcctagctctccatttccattcctcccagcaacttgaactagatccaagtaccatgccttcaaaattgcccaaacttaattggtgtagggacaggaaacaacaaaaagtggtcgcagtcttcatcaacagagtctcaaatgtggcatttctatcgatgaggcttatctcacgtgatgaggttatcaattgcaagacatcttcaatgatcgaattgccaaccaaatgaagaatttgactcaggtactctactactctagccttctctagtgtggcatagatggagtcgaccatcgcgtcgaagagacttttatgttagtccattctccggcactgtcatgcctagctagaaggtggcatagttgagctacatgttattctgaccactttcttagtcgtgtttgtaggtgaagtaggggtacacattggctagaagaggtgatcatgtgccggtggtcaccaagcacctcgcaattggcgtatgcaggcataagttggattgtgcatctatggtagtttacagttaaatctagttacgctcctgtttaatttggcacatcctaactcacattacgtcagtacatagttatatttcctttatttaactcgtagaaattaaatttaagcttgtatgattgttatttaactcgtagaaattaaatttaagcttgcatgattgtagagtatatatatcacatttaatctatcttgttatttttaaatttttttataactatttagcagatgacatgtacaatggatgttccccatagagattaaaagagagtttcccatgcttatggttgctgaagtgcttggactttgaaagatgagatacgcatttagagggaatattaactctacttcttcgcggctgttttgtaagagaatgattaacaacgttcagagatcagactggccgagaaagatcgaaaagggaaattaatcctctggtttggcgagaggatggatcatggatgacagtgacacagtggaaagaatgcagcaaaatatatatttgtctttttaggccaatttttttatttatagtaattaataatttacaaattaaatatgtggtaaataagagctcctatttagtaaaataggatggacgctaactctaatagcgtccaggagcggacgctgttcacctcgatgtccacctctggacgttgttcatctcagcgtccactgcctggcaccgcctcccaacctatatcccacaaaatacagaaagaaaaaactacgtatacccatatatctcgtcgctaacacaaacaactggagtatttggtaggcgacgctcgcctcccaggcaggatcggactaagcggcagcccttgaaattttccgtttgtcgcctgccgccctcggcatctcgctgtaatgaaggcatgaagctttcgtttccgccattcacctgtgccgccgatggcaggcccaggctgggaacaggcacaatgagttcttgtgcgttaatcgttattgaaaagctcacgcactgcctcgcaactcagatgaaatacagatgtaactatttttgtgggtattcacatgaagtagaagaaaaaaataaaaattatacatcacactcctaaataagtccattcatataattgagtatttcggatttcagaatacgtgcatgcttccaaacttcacactacagaagaatatcacaacagtaccaaacaatagatcatatgactataggcgtgtaagtaattcagtactagtacacatagaaccaatcaaacagaaaagagtcatagaaggtctgaactctcatgaatacacatacatatgcttctaaactaaaacacatctttgagctacaacagcaccattaactgcaaccccaagcaaaaattataacttagatttccactactaatcctaaaattacttgtcgtttccaaaagaactgatagatatggttcttgtgtccttggcggatatcgccatatcaggctcccgacaaggtggggacggcagcggcttcccacttcccagtctcctgttggatcggcggcagtaagccagtaactgccctaggccctagcctcgaatcctcgatgccgcaccagttctccctgcagggattcctcgcttctatttctcgtatatagaatggatatggctttgggatagttaggctgcacaacatagctggacgctgaggtgaacgacgtccagacctggacgctatggaaagcaacgtccttttttggacgctattagaattagcgtccatcctattttgctaaatagcaactcctatttaccataaatttaatctgtggattaataattactataaataaaaaaatcggctttttaggagttctatttcttccagtatagtgaggtgacgagatgcattaattgtttccactgtaccaaacctattattttttcgaaactaatcaagttgtagtataaaatacacagctataggtatttcaggtgatcctggttcacaatctatctagtcgtaaagcatgtggaggtagtcttaataaaagtggagatacaagtgcacaaatggaaagaagattcggagacaacatcatataaacctgatcacatatagcactcaaagatcactgtgacagcttttggcattcccttgaactctaaaagtgatacattaacttaactaattaaaattccttccaaaagagaaaaaagggtacaacaaactagaaatgatggagccctttattagttgctccctaatacatcaaaggataaaatcaaaacaaaacaaatactaccatatcaaggtgaatgaaattattaatgataacgtgggctccaatgtaactttggtcggcacatagaaatgaaaattttaagggttggcatcaccgtaaccagatccaccacccccaccgcttccgctcccaccgctttggccaccaccgttgccgttaccatcgccagttgcattggcatttgcatatggcggggaggatgtaggggaagcaccaccgtctgccgcagcagatccggttccgctgccagtgccagtcccataaccgccggatccatcaacacctccagcttgtccaccggcaacaccaccaccgcctcctccggcgctcgcactcccaccaccctggctcaccgagcccgagctcgagccttggcctgatccagaaccaaaaccagtaccattgtactgcgagccacctccaccccaaccccctcccccagcattcgcatgggttccgctcccgctctggctaactccataaccattcccgttccctacaccgccgccattcacgtacccaccaccactcccggtacccgagccttgaccttgagcattggctaatctagacacccttgcggcattggctaacccaatgctcatgaggacaacgaagctaagagctacaagctttgttgccgccatttttgagcttagctaagtatgcttagatgggatggatgataacccatggattgcttgggtatttatagggctggatggaggtgttcatagttatttttatgttagtggcatcactgcaatgcattgatggaagtgtctagaatatggcgagttggtgaaaatgtactaggtctaggagtgtagctagctgtagctagtgatacttatttttaattaaccggccggatccaatcttgtttgactgccacaaaacttattactataccccgtaattaaaatatgtgtgatgttgacttcgaatcgcttaaacctatagcttagtccaaattgagaggtgttgacgatgagcatctgaaattcatggagggtgttcggatcgtaaaggaaaagatctcatcggcacgaatgatctgatccgtaaaattcattcgatccgacggttcaattcactgacaactcttcgttagagcggtcggtgagccggccggcatccctgtacttctaatcagttgcacataagtgtgttaaatggttaaaccaacgaaaaccacttaactaaaataagttatgtatttacttattttgatctattagtgagtttgcgggttaaccagaatacattcttattgtacgttgtgcgagctgttcggtgcgctggtcgatccattgaacgctatctatatatcttggccgatgttatgtgccgtgccaccgctgacgctgccgacgatgccaattgataacatttttagtaccggttgataaacatcaataaggactaaagattcaccagcattagtcctgattggtgctaccaaccggtactaaagatgcatgtttagttccggttggtagcattaacatagactaaagatatttcctcggactttggcttttagaactggtactaaagagttttagtacttattcttaatacatctataatatttgtggtttgggacattggacaaaagatgagttctttggtagtgtgcgctagtgtgtgctcgcattcagttaagtgatcattttacgtacacttcatctgaccatcgagggaagagcaatttcgcttggcggatccggatacgtttgaagaggatttactgtgtaaatttgtatccactggcagctgtttttttttttaaagaggagaatgcgatgctgagacaatgggagactatgttttcacatacccgatcgactggctgaaataaatgagaaaaataccctggtttggcaattggacacaacgaaaacgcaaatggttttgctaaaaagaagtttcatattattatttttctcaaaacttttgaattttccaccatcagatatgctttaagatttgtgctactgagaggaaatatattagcgtgcgcgtgcttggaaggaatcaaatccagatacgttgcccgtgtggctgttgctatataatttacatgctaattttaatgtaattatgtttaaaagtttttcattaagaaactatcaaatataactcaaattaaggatggacaaggatatagtgaaaactatattgctagcatctggcctgaagctttgctaaaagagcacgtagtttagtagttgcagtgacccgagtagcacatcaagtttctaagtttaaatcttttttttttcgaggggactgagtttaaatcttcattaggagcgaatttcagattatattgtttgagggataatttaaaaagctggatatatatccgaatggatgtagagaccgggtaaaaaaaacccctttgaaaaaaaaaaggtcctaaggcgatgatgccaccatgagaccaacccactgcactttccaaccgaccaagttgctagctgtagtacaaaatcgagctagctagttgaccgtcgatctcattcttcaaacgaaaagtatcttcctggttcaatctagtcttaaggcatgtggagatagtcttaaagaagagggcgtgcatgtgtatacaaatctaaagatggtagcaacgtccggagacaacacacatgatccggatcattttagagcactactcaaaaagattgtcatttctcatagataatggatatttcattaagcaattactcagagatcatagtggcttatatagttttctcacttgtttgtgaactctaaagtgatacaataactaaaattcctcccaagaagaaaaagatacaacaactagaataatggagccctttttattaattagttgctctctgatacatcaaggataaaatctaaccaaatcaaatactacaatatcaggataaaaaaaaatcaaagatagtgtgggctccaatatatctttgattaactacataaaaagaaaaattttaagggtttgcgtcaccatatccagatccaccgccaccaccactaccactgccaccactttgaccaccaccgttcccattgccattgccacttgcatttgcatttgcataaggcggtggcgtgttaggggtaccattgtttgccacactagatccggatccattcccaccgccagtcccataaccaccggacccatcaactcctccagcttgtccaccgccattgccacctccacctccaccagcacttgcatgtcctccatagccagggtaataaccttcggccatctggccagagcttgagcccgccccggatccactgccaaatccagtaccattgtactgtgagccaccacctccccaacctcctcccccagcagttgcggtgactccgcttccgctctcactagacccataaccattaccatttcctacgccaccaccgttcacgtatccaccaccgttcccaccaccttgaccttgtccctctgcactagcgtatctaaccaccctggcagcattggctagcccaatgctcatgaggactacaaagctaagagctacaagctttgttgcagccattttgggctcaactagttaagaactttgatgggaatgggttgaatggcaaagcaaggattgcttaggtatttatagtgcccaatcgatagagtcttgcacttgcactgcagcacgcatgcatgatccaagtgtttggatggcgtgttggcgaaatataggtctatgagtgtagctagctatagctagtaaaacttgtgtttagtaagccggatccaatcttgtttgactgccacaaaacttacaaattaagtctgtgtgatgctcatcatctcgtatatcgcttaaggtatctatttctgcacctctttccaatggctagctaggcactgcacatcctgtacttccatatatactggctatatagtagcagggtgttactcaaaccaccggtaacctaaccgcgaggttaccgtagtaaccacgcttatcgtgcggtacggtaagggttatcggtggatggtaacgtaaagcctagctagtagttcgcatgcgagtatatatatatagtcctaatataagtctaaatttcattattagctgaatatagttttttcgagcaaaatataggcatataaactgattggccggcgaaaaaaggcatgtaataaagtgatctgatagcagatccagttttcaggaacaggaagttgtgaaccaaccaagggtgtgtttagttccacaccaaaaatgaaagtttgaagaaaattggaacaatatgacggaaaagttggaagtttgtgtgtgtagaaaagttcgatgtgatttttttgggttcaaactttgcaactaaaccgacccatttagctaaaccaaattctggaaaaaaaaatcaacatcacaattaatgtagcatcatatataacgttcctttaaaaatatataatgctaaagaaacaaatataatgctaaaggcacatcagttaacgaatagtaattcatcgggggttccgctttaaattaatctctgttgctacattgaacgatgagtagaggcgtggcttgattacttggatcatgtgtcttccggagattccccacgaaagatgagtcgatgccgcaatccctaccaatttgaccatccattcaccattatggagttacagctgaatgaaccgatttccgataggttccttcgtcagttaatccaatgcacaattaaaaactcatcactgatagagtttaccagatcagtaactaattaactgttaattgattaggtcgatcgatacgtacagtgtgtactccactggtgaaaactctgaacaattttgattaatatgcattacaaccttagacatactttcattaattgttcagcaggcgagaagacgtagatgtctgtaattaacttgcatatctactgttactgagttactgacacacatcatatatataccacaacgaagtaaaaactgccagatggttcctacttcatccgttttacaatgtaagacttttctaacatagcccatattcattttgatgttaataaatctagagatatatatgtatttagattcattaacatttatatgtatgtgggtaatgctagaaagtcttacactgtgaaacggaaggagtagaagaaattagctagtagtaaacctggccgatgcatgtggagattggaattaatctgaccattcaagtcatcgacaactgtagcaaaaattaagaattctacattcaataaatgtacatatgcaaattttatatatacaggtgattccagatcataagctagatcatgccgacgagatatgaatcggtgactggctgactgatgcaatgcaaaacctacgcgatcgacgtgcattcatgccggtcgacaggctagtgtacgcgtcaacttggatgactgattttattattatctgcaagtcaaggagattgcaggcgaggctagattctgctactcatcaagttatatctgtactgaggtctacaagtatatataatatatactacaagatataaacaattgataccaagcaaccatgcatataataatccaagggataatcactctgatttgaaatacatgtacgtgttagacttgtacacaaatcaattaagaaaaatcatcccaaatagcttagttgttgtccataattcactctagattggaagcatgaaaaaaatagtatgttagaccaatgcaaatataaaattttatagggtatttaaaagaggtccagattttcggagtaacttacacttaggtaagagctgagacggccaaacaacttatattggaattgaagggagtaaaaatgtttcacccttgcactaaaaccggccggttatatttcacattttcaccttcaaattttaaaactgaataaataataatataagctatattctatcattgttttgattgaaatatagtagtaatcttctatatatgaaggctaactattgttagccaagttttatagggtatgtaccaaattagatagtatatctacatcaacaaaatgagcattttattaagtgtttgcaccagtgaaaatcaccatcatactaataaaatcattatagatggtatgttttatctagcttttaaagttgtgagtaaaaagcaacattttttttgttcgtcaaggaaaattgacttcgagaagatcagttagagtgccaagaatagactttccatccatatgcctgaggtcaaaacgggctacccggatgccagcgctacctcctcaccattctgtcctcgtagtcaccgtcgtcggtcatgggaaatcatgcagccgtgaggatagcagtggcagggcctcctttttccatgccctcgaaaattttctcttggcatggcgaggttggcgtggcggatctcgccgttcgagatgggctagagacacagtggtggcacggctagatggagatgacggcatcgttacagcgggatagagacggcagtgtgcgtcggatggctagctcgcaatgaaggtagccatggcagaggcgaaaggcataggggatagctggagctgctttcnnnnnnnnnnnnnnnnnnnntccccaaacaaatctgatgatagtgaggctgtccacgattgcagaggtgacgatggcatagactgcgttggtgcaagtggtcattggccgacgaggcactggcgtatgtgccagcccagggtgcgttgtgtaggtgactttgtcacatattaggatgacggtggtcaggcggggctcaaggtagctagcagggaacatgcccgctagagaggtcgcaaggagaggctgcacagagaggtggggctttcgcctagaggagcgcttggagagaggcatctcggctatgtttcgaccgctaatgctactcgggtagccaagacaccacttgctagctcggatagcagggacacaatgagcaacagtgtggatggcggcctagacaacagcgagcgggtgtaacaccccagcccgtttgaagcctagtagtagtgtgtgtttggcccatgtggcccagaagtggatgtgtagtggtggtttagtaccacattggaagtttaggtgggtgagggcctgcttataagccttggtgctccaaccatggtatccctgggttaacccttttacacgaagcgaggataaaagtgtaagcaggataccatgcgaacgtgggtccgctcaacgtgtagagcgtactaatgcacattttggaggcagggtgttacagcgggtctcctatttccaggtggacctcttccctcccctaggagctaccctctctaatggctatggggatttagtttgatggaggatgggagaccttcgacatcatcagcgttttgagaaaacctatgtagaaggtgtaccgtttgttgaggtggtgtatgaggcttctgtggcacgactgcatgttggtttcttgggcagagtaagagctacttggcaccatgaccctcaacttcttacgtttttgcagcgctgagaaggtgtgataaatgtggcttatgcgatgtgactgcttgctggtgtgttggggcgaagatgagctagttgccggtggtggcaatcttggcaacgataaccgtcaactacttctgttctagtagtgctgcgatggttgtggaagtcgtggttggtaggtggtgagagcattgggcaaaagcctttgcgtggtctacccggttccgatgacgtcaacacctatgggtaccctttcccttcttgaaagcatcgttgtgttgtttcccactttttttttcaagtggaaacctagtttcggtgttcagacaagcgttgaaagcgttttagggtgcgttcgttcgtggtcaagattggattggatatgaccatccatatttgtagggatatgttgatctagttttttatttgattggatagatatggccatttagttttctgtttggttggatgaatgagaagaaatataatgcaaataaaaacatgctaattaataataaaatatgttaattatcaattatatagcgtaatctatactaattaacaacaaaatagactaatatctaattaacactaatgttgacaagctaattactaattaccaacaaaatatattaattattgccaatttactaatgattaatattagtaaagctggatatcctcatccggccaatttaacgaatacgctcatccaacattttagtggaatattctctccagaccgcccatgcacccttgtccaccaatcaaacacactcaaaaactggatcctcatcccctatttaagaatatattcttccaaccaaacacacacttagacattagttttctcatgcatggaaggtcctgttcctcattggtaactgaatttttctaataaattagattaactatcttattgttaatggaagcgcaggaactcctggtcttcttttcaggtttaccttttaaaaaatttgccctaatttgattaaataaatatataaaaatatcaaaatttttccataaacataaaaaatacatcaatttttcatagctttagctctcaaatatatagacaactagtatcttgtcacttgtcagagcttgcactagtgaaaaccctaggcatctaaaaaaaaccatcttagaaaaatgttgtttatctattactaatataaaaaggaggagttgccccctccaatcctactggtgaaatcacccggatcatccctaccgtccatccacatctatctactaatccggaccatccatcttcttctatcctaaaccgtttcgtcgtcctcctgatgagcggtggtcctcgcgcggctcttcctatcctactgccgactcccgcgatgaccgcgcgctgaccacgcctcgctcctcctcgctgattccaacagcgatagcgattccactgattccaccaattccgccgctgttggatctccactgattccatcaattccaccaatttcgccccgaagcggtcactccgccacacaaaacccagtcgcgatgactccgccgtgcgcatcctctctcgctcgaccagcgccgagccaccggcgcactgccacaacgccggatcagcgccgagccaccaccgcacaaccgcatccccttccgccggtgccacgcccgggactgcccccgacgacgacggacgcacgcccccattgctcctccgcaaatagctcctgagcttcacgcgaagcccgtgttggccccacgaaagcctctcctccgcgaatccctccccatggaagccctaagctcctctctcttcctcagggagcgtcgccgatccgtgggtcgctgctcaccctcccgtcatcggctgccaccctgcgtctatcgccgtcgctgttggatgcaggtcgttgtccggcgtttgactgctctcgctatcggatcaaggttgtcgcccatcgtcgggcatcatccactgccaccgccgctcgccggctcgccgtccgatcgagcaggccagcacccatctccagcgcccaccaggtgagttcccacccttgcactgcagccaccctagccaccatgtccaattaccatgaaacattctctttcttccctctttcatgttctttgtaggtgaaccaggtatagaggatgtggtggaggcgtgggggctaatcactatcagttagattttcgtggatcgagcttattacctgagttttctcctcttcggtgatggagccggttcaggtgcgctgcaaaggaaatagttgccacacccccaaaaatcaagtagtttaaatacttctctgttgaataaactagcataaacgacataacggtgattcagtagtttttgttgttatagttgctatcgttgttttcttgcaggtgaatgtgctcttatcctaatacggcatagtgaatcattgtggaatgactgaaatctgttttactatggaatgagcaaaaaatgtttacttgcgtcgatgtcgagaaggttatatatgtcgggagctgtttggaaagggttttatcggagcaacgttattgggaaagtattttgcggagcagtttggaaagggttttatcagagcaattctgggaattgtacttttattggatcaataatgattggaaaggattttatcagagaaatcttgattaggaaggtatatgtacgtgtggtcagaaatttatccctttgcaattcaatagatgcattctctattttgctaacaggaattaatttgcatttttttgtaagaaaacagatgatgtgcattgaaataattattgttctttgagatcttgataatatgtttcttgtccaggcattcccatgagttgcaaatccaaggaagttaataacacgacctgtctacaggattacaagctaatcgatttatcccattacgagctaaagctcactggtatgtttttgtttctctgccattcaccattgaaatatggaatgccatattcttttttccttcgatgcgctcttaattgtctgttctaatttcttcaaccactaataatttgcagtttgatattgctttatcccgctgcttttccattagaaccaacaaaaggagaaatgcctttagctgaagttctcagattcaataccaaagttgattgtttgattctaaacgtaattatcatggtttcttgtggtcctttaatggtgatattaagatttgggcaaaattggtacaaaagcaacatgcccaaaataccttggtagcttccccatttctattatctctccaatttactcttaaattgtatgatgcaacattgtcaagtttcatagtagttattttggactcacctcttcaaagtacctgtcatctgggttgggaggtaatttctaaatctcagctctactatttgatgatctgacattcatattttactatatacttcttgtcactagaattcctgctgcatacgtactagctaggtatttcctcttacaataatggttgtcagaattagcagcatatcagctcaactccatgcttgaacaatctgagtttttctttactccagaacacctgagagttgacatatatgatatatttaacagattgtgttgattgcgcataaagaagtagccgaacatatttctgctatgcacattaacatattggtacatatttacaattctatttttacgaggcactatgctactgatagtctattgatgggctacagctgaatttattttaaaaacaactactgttttttttttcacctacgttgccattcctccgttcctgcatgtccactttgttgcaaatctagaattgtggagaaactcttgatgttcatcatatgccagttcatacttttctaaattgccaaattgaaaagagggttacatatttattcagtcctatctgcaggttggaaattgtatgcagctagctagatcactttcttatcacaactcacaagattgccgctttattagctatagtttgaatctaggatggtctgccataaggtgctttaattacttctatgaattttgttaaatcaaaattgatccatttgtggcttttattgtttgagattgaaaaaaaaaatcaggttgctgctcaagagcaaaaggcaataacatggggcagtgataaaactatttttgggcacagttagtctgtgaccatgtcttcatgggcataaatgaaagggaaactcattgttaaaaaactgaaatggaaacaacttttccatggtaatccgattgaccatcgctcagatattggatatcaatactgtaattcataaagtgcagaatacatgatttagatggagaaaggcaatacatgaggaagatgttttgaacaaaatattatcttaggttaaactaatgtttgttttcttatctggtgttttgtacccttactaataataaatttgttactataaattctatctcattatatgcttggcaaaacatatatcttattttggttgtttgatttgtattactaaatatttccgtagcgttagcacgggtagattactagtttggttttaaaagttagagatgaaaaagcagttttcatggtgaaaaatagcctttgagaagaattcaagcccaaaatggacttctccttttctccataatgcaagtcgtcgttgcaggccggttgattaacgagagcacacacatatggtccaacacagactgacaggctgcagctttggcactggattaacgaatccactaattgggtcttacacgttgtgacaatagcctcatatatacgcttgatactattacctacgtgtaactaaagcaagctaagctggtctttaatttgcatcgggcctggacaactaccgtacttgatcagaaattttcagtaacgcaggattgtgggcttgatttattgatcctacctggcctgcttgggcattgtactcctttcaggctgtggaatcgattgaatccagccggttttgggtttgggctccctccggctgcagagtgcaacctgagccatcagtttacatggatattaccgcagagtgaaaccccgcgcattgctgcgggaatttagtatgataacaaaaaaaataccgtataagatagttagataacatcagattaagtaaattaatgtgatttatgataatttaaatttaaatagtatgtagaatggtgattcaaatgtaaaaagtaagctggtataactttatgaaagaagaaaagtagggagatagtttgggccgtagattaatcatctgaaggctaaagataatttgaaccatagattaatcatttaagtactaactaagtgagaattaactatataagtatataggttatcataaaatataataacgatgtacattgaaacattatgtgaattatgttagatgataaattaacatgtttgtatttaaaaagctcttaaattataataactataaagatttagcatgcttgcatgatgtttaaatgtgatgattgttagtggatgatgatgtggcatcttgttagtggatgatgatgtggcatctttgcatgtcaagcttaaggagttagtgggggataactttataggaagataggattacaggcttacgtgttgacagggggactgtgcggtgcatatgtgaaacaaaatccagtttgattccctcgaatataggtaagatcgatctaattcgtatgcaacagtcacttcgactcctccaacttttaaaattaatttaaaattagtgactctctgatattgaacatggtattggcttatgtggtgtccatgttacatgttaacccaatcttaatctgacgtggcactcacgtgttacaataaaaataagaaagaaaaaaaaaataacggagggcccaaatgtcagtgtccctctatcttcttctcattccctcactactcttgctctctgcctctcatctcttaggttcagcccgcaaggtgaggatcggaggagaagcaccgagacgaggacaaactgtcatagctcgagctagagcggcttcccggcgttggcattatctgcacgacgtcgtcattcatctccgcctttgcggatggtgatgacatggtggaagccgtccatggaggctgatagcctgtgcacggcgaccacctcaattgagaagaggcagaccggcggctgcgatgaccaacgagctccgttgagctcgagttcgctcgctgatctacgagagaaaggagtcaaccgcggaaaggaggctgcggtagcggaggcaagctttggtggcttgacggaggattggcatcgatatgtagagaagatgttgacatcaattgcagcatcttgtttgttttcccctccccctcctaacctaggcggcgatggcatattttgaacatggcctaactcgagctcgagtgccaagccgcgctggcgccacccatcgagtttgatcaaagtggggtgtcggccggtgaggccgctcgaggttgagctcactcgcctatatgtaggaagagaggcaatggttcaggttgtctctgttgcctatctctactgtcgtcgcctatagggtgaccgatgcttgttctaccaccacccctctaccatcgatgtgtgcacaactctactgcaaccccgtcgccgccctgctgcctctcctgaacctcccaccaccggctgccgtcctacatccttgcggccgagaggaaatacagcggagagagaagcagtagggaaggaaggagagagaagggataatacgtgggcttcactctattttttaatttttatgatgactggactgccatgccagctaatctctaagagttattttatatcgttagaacgattgaggagtgcgaatcagattctaaccatatttagcgaagtaaagtggacttttttccatgacgtgtgatggagaggaacttggcccatgctgcctccggcgtgctccatccatccatgccactgccgccagcccgccaaccatcttgccagcctaacggcctcatttgtttgggggcctaaattaatctggcccatatatatgcttgaaagttaaactaaagtcatattctagcctatctatcgacctaacggctacatgttaccctggctagtttcgtcatcctcttgtttcagtgccctgtcagatttcaaccggattgcgcatcctacgcgtctcccccaagacggcaaaaagtttgatgggagtaacagaaagatgttcatgcgagagtcatcagtgttcatcactcatcacaccccaactcatctcgtgatcaaccttcattacagatttttacagagcccaattatttgtatatatgaatttcacgcctaaatgactgaatcgggagatataaaacaagagtaatttttgtgacactaagaaaaacagaacaattaatataggtcgggctctagctagttttatatcgtttggtactttgaagcgattgataagagacaactttcatggctctccgttgccatacgcagatccgctgcctttgccgctaccgctcccaccgttctgactatacccgtttcctcctccacggccaaaagcattagcattggagaaaacaccccccgggaagtcaccgttcatagatgcactagagccaacaccggtgccacttccagacccataaccactagatccatagtagccatccgctcgcccaccgccttcaccgccacctgtaccaccagcattagaagacccacggtatgggtctggaccgacctggcttgagcttgagcctcgaccagacccagaaccatgcccagatccactgtaccgtccaccaccattgccgcctccaccaccaccaccaccacttccgtggacagagcctccctcatttacgatactcacactagatccagtaccactcccggaccctccaccggccccgtcaatagatccaccaccctctccccatccggtgccatttccattagaagtactcgaagcattggctaacccaatgcccaacatcacaatgaagctaagagctacaaatttattgtccaccattgttagctttactagtgcgcgattcaagatgtcgaatactatgtatgtatttatagtggtgtttatggactacccccatgcagtccctctgtctttgtagtagacactgctacgttacaatgtggagctagctagctagatctccctaatcaagcgatcaggggatacaagtggaggcttggaaacagcaagtggtattatattcacgagtagtaattatatactataacttgtgttgtacttgaggctatataagcaaaaagtctaatatatagtaatgctcttgctgtagctacatatgcatgtatttcttttgttcaaatgccgttcaaatcaccaaattaaaagcttgaacgtgttttgtatcatatcgatatgttatttcatagctggattacgcatgcaccgacgttttctttccctcggaattgacgcatggtttgacatttacaacaagttggcactgcagtcttgcagatgcgacgaccttggagtccgtagtgttggttgacatgaatatcagtacgcgagcaactgaagatataggtactgttggtcttactactcatccgtcctaaaatatagtgttctaaaatatagtggattttagacgaataataggatactttcgagtacaacaaatttggatagggagcctgtctagattcatagtgctagaaaatataccatccatccaaaatcctttatattttaggatggagggagtacggtgcttatatttttatgattttttagttcgtatatatagtattggttctatttacagttataatcacgcacacaactacactctctccattttatatcataagttgttttggctctttttaaacttctcaaaacttttatcaagttaatttgtagaaaaatataccaacatctatagcactaaattagttttattacatctaacattgaacatattttaatattttatttgttttgttttgaaatattaatatatttttctataaagttcataaaatctaagtaagtataacttaaaagggttaattggatatatgccattataaatttgatggttttgaaaaaaacgccattacaattcacgtatttggtctagtgccattaccattcgcatatattttgaaacatgccactagcctacgttttttactcgtattggacaaaattgccctcacgtcaacctcccgtcttctacctcacgcacctccagcttcctattctctctcaccccagaggaggagctctcctcgggagctcggcgaacctctccctggcattgtcgttgctttgggactcggctagtgttcatcgacaaattggcattggaccggtgacgaagggtcaacaattccaccggatcaggtggtgacgatggtcaggcatggtggatctcagcctcgtccaatcgagggggcagcggcgcggatccggtgacgacggagatggggagaagtagaaccagcggcgacgagcaagaagggaacgggtatgtcctcatctttctcttcctcgttgcccttccccgccggttgccaccacccgccatcttgtgagtcaccgctctggaccgccaccgcattcacgccgctgtagacgcaccggaggacaaggcactacagcgaggagagctagccctctcacccacggcgggtggatcccctctcctccggagcggtgaatgcagtggtggtggtcagatccgtgtcctctgcatcggcgtccacctccacgactcgcaatcgacggcgtcgggaggacaacctactgtgggaggtcggctgggcggtgagggcggtcaggccaggaatggtgctgcctcagggctagggcgcgacgccggctatagaatggagaggggagaggttgatggaagacaaggacatttcatccaatatgagtaaaaacgtaccctagtggcatgtttcaaactgtatgtaaattataattgcactattccaaatacacaaattgtaacggtatccgtttaacccaaaatagtcaaaatgacttataatatgaaacagaggtaggaaaaacattatgttgtttaggcagcttcttctggtcgtgttcaaaataagattaagttaattttttttcgaaactttgactaccaataacttatcaaataatcagttcgagaaaattggatgcttagatttgatttaaaattactgtcatgatatcatgtcatacgctaattgatgttcaaagttttaaatgttttagcaaatcccactacgccacaaccctacatctgtgatggcacaccagtgacgggcctaaagattggtcacatatgatcgtcacctttgacgggtcgttaggtttgccatcatcagtgaagcatcagtcgtggcccgtcacaggtatcacctcacctgtgacaggccataattttaagctgtcacaggtgaggtagtgatgggtttgctctccaacccgttattggtttgacctcacctgtgacgggtgttaaatttgcaacccgtcaaagattagatatctcatctcaaacgagttaaaaaattatagccatcagagatgacttacaaaaaaatcccccactccacccccctgcgaccctattcctcccctcggtttcccccttccctcctcatcttcccttctcatcttctttctctccctcccttactctctctccctcatcttccttctctccatcatcactctctccctcacagatcaggctgtggcccccctcccaagcgccggccgctgacgcctccccgcctcccgatcgttggccgcaggatctggcctacgaggcgtggatccggccaccgcggcctctcccccgatcgttggccgcttcctcctccaccaccaccacatcgccaaccgccggatccggccatcgtagcctctcccccgaccgccggccgcttcctcctccgccaccgcaccgtcaaccgcggatcccgccaccgcgacctctcccccgactgacggccgcttcctcctccaccacggcaccgccaaccgccggatccggcctcgacaagattgtggggcacggatccggccactgcggcctctcccttgaccgtcgaccacttcctcctccgccaccgcatcgccaaccaccggatccggcctcgacaagtttgtggggggggggggggggagggtgaggatccggccatagcctccctcctgaccacaggccgctacctccgccaccgcaccgccgccagatggagttatcctttttgttattttcccagatgaatatgattgtgatgacttttgtgattttgttttgtgcccaaatgattgtgaatgtgaagtgattttgttctttggctagatgaatgtgattgcgttgatttttgtgattctgtcttgtgtcaaaatggctatgaatgtgattatttttgtgatttgtgatgcctaatggtctgcgaatagctaggcttataatattatatttttttgccctatttttgaggtttgtgacgggtcccaattcagacccctccgtccgaggtgaaggttacctgtgacagattttagtttgcagtccatcaaaggtaactcttacacctctgacgggtctttacccgttacaggtgactccgagtcatcagtgatcactgatctgtgactagcgcttaacccgtcacaggtaagggtatgagcccgtcagtagggttgaaactggtttggatagttttcgtccgtccggacctttttttgggatttggatagttttagtcggaactatccgaaaattctcggattcggaaacgaatttggattttttttctcggaaacaaaaacgaatacagtaagggtactatccatcggaatcggaaaacggtcaaaaactatccagatttttttcggatatccgcacacattgagcaaattttagaaaaatacgtgtgtgtgtgtgtgtgtgtatatatatatatatatatatatatatatatatatatatataactttttcatacggaatcagatgaagagaaactttatatcaacattgtagagctcgatgagatctacaactttcttactgactattttattatttgaggtcatttaagggtataaatattcattataatataccatattaatttttacgaaatctcagatctacaatttagaacgatatctgatggagatgtgttcttccatatcaaagttgtagagctcaacgggatctaccactttgtagtttataatatttgtatttgaaagcatttaaagtataaaacaaacattacaatttttgaagatgtgaagtaaaataaataacatcttcaatttatacaagggtaagtaagttatacatatagtaaagggtcttggggaatagaaaatgataatcatatttgcaaaaggatctcttagagaaatagccatgaaaatcgattttctcatacagttgtgagaccatctacaaaattgacgatataaatgttggagatgttgaactaaaataataagcggtatctcttccttgatcaagaaactcaatttgtggggtttttttatatacggtaaatattcgctaccgtattcgttccgtctcgtattcgctccgtatctgtattcgataatattcgatttcatttccgaatccgagttttcgattccgattccgattccgaaaaaaaaaatgaaaacaaatatgataaagctagtttccgtccgtttccgatccgttttcatccctacccgtcagagataatctgatccagcgaagtgtccagccatgaaatcaaatatttataattggagaaagtagtataggaatcttagcagagggcaacaaatcaataagcaattaagcgagcagagctagctcaacaggttagtaattggtcaggcaaatatagctgattatgtgatagcctgattggtcgagtacatgtaagtagaccatccaagtgtcgcctaattaatcacgccctacttacaactaaataactatagcatacctgaacggctactgatgaggcatatctaacaaaatcgaggacagagagataaagagtttgtacgggagtagcacccaatcgtacttttgaagtgttgacttgtattatattatcgccaagttgatttctctgatctagaatataagagatttagtaattattaaatcgatgttactacgtatgcagttttatgatatactccatccatttcataatataagacacaaccattttttaatgtgccataatataagacatgcatgcatgtaggcaattaactatggcccattctccattaaattattatatttttaaatcctccactcttatgttctctaattctattggatgcatgcattatatttattaggatgatccaaactacaagatgataataattatttcttgttctttgggttaggggtggttatgctttagagcaggtataatagcaggctataagccagctataaacatattttaaggagataaaagaggagagagtagagcagcgggctacagatttgtagccagttgtagtacggactccaagacgcagtgtgtgtataacaggtgggatcagatattaatagtgtagtatggaactattgtatgaattggctattaagtcgactataggtgatttggagttactagttggctgtactattaaacttgctcttatattttggaatggagtatctttcattgctttaaaaatgggcatcgattatccaagctcaaaagtcagcaaaattgtagtgacaaaagttgttctaccacacaacataattctatgcatagtaatagtgcctacaaattggagtatctacactcatcatgatgtccaaaaccattgaagtactaatcaatttccatttgatggcaaactcttgagtagtacaacagtatattaaaatttccagtgacacacataaagcacttacaatcttctaggtcgtcgctgcattgtcaactccagcctcttttcgttgatctatcatccatgcgtgcgtgcttacaaattaagctactttactacttcaggtgcagagataatttgttaatccacaagttgagcttaattacttagttaaaggtttagaagcatcctggctaaggcctcggccacactataagtacccatgcaatctttcgctcccaatttcaactgaactactataactgttgcattcactcacaatggctaacactaaaattgtggcacttgggatttttctagtcttatgcataaatggactatcccatgctgcaagagtaattagatattctagtgctaaaggtgaaggagaaggtggaggagagggctctggatctgtaagtggtgctgggtcgggttctgggggtggctttggtgctagcaacactagtagttccgggggctattttgggacaagtaatgcacatgctaatgctggaggtggagggagtggtgatggtggtggaccattaggaagtgttgggtctggttctgggtctggttctggctctagctcaagtaacagctcaagcgtaatgagagcatggtatggtggtggagaagctaatgcgggtggtgttggtggtggcaatggtgatggatatggcggtggttactcagggtcctctggttatgggtcagggtttggaaccggtggaggctctagcgcagtggctatggatggcttttacggggcacatgcaaatgccgatggtggtggtgatggtactggagtgggacatggcgaagctggtgggtacggcaatggtggagggagtggatctgggtatggtaatggcaaatacccatagttccttattggatttgctagtagtaacactcctttattcgatcagttggcttagttgaagcccattttggttgtttacactgtgtcacagaatgaattaatgttatggttcctaagtaagcatgtgtcgatgagctagcatgaaattaataaagggcttcgttaacctttaggttgtcaaattgttttaacatttaagcatgtggcctagatcagatgctagactacgtgtgcatgtatgtgataactgataaggtgtaatttttatatgtgttgttccatgcgaatgtgttgtttgtcattctaatatggcatattctcaatgtagtatcatgattcatgcatgatacttacatggaaaaacaacaactcccaaatataaacacaggcctactttaaaaagttaaaatttaggatgactagattatacactaagtgtcaatattccccaaactaattagtaattactagagcgggcaagcaatttatatgcacaaggccagttcactagagaagcaagtaattagtacagtctttatggcaattaatactcttgccacataggattttagatgatgtggcacataattaaataaggaagagagcgagatagcaccttgcatgagacatagtttgaacacaaaatctaataaaaaaagacactgtattgggaatgagaaatgtcttcaacaatatgaccaattgtgagcagtaagagaaaaaaaaagaacgatatcatatttattgttgtctacttacatacacaccagtgatatttacaagttacaatgaccctttacataatatcttatcgaccacttctctcgtcacttgcgcaccacaactatatttattaattgactaggcccatctcggaagtgtctccctccacctccacgaattagcacttaaccctagctttattttcctctataaatagctttgtacattctcaaaaacatttgggttttgtttagttgaattttgccaagtgccattcaccttgtctctagtcctcgctcgattagtcggcgactattgattcagagcccccaatagttggtgtattgatttgccgggtcgattagatctaccacttcaatcgcaactatttctttgtgcttaatcacctattcgcaatatttagattgcatcttatcttgttcttgcagtgttctctcgtttgcattgcatgaatcatcaaccgcgcgtcacggttggtacgacatcgtttgtggtgtagcgattgcacggcgttctggacttgttctggttggtagccacgtcgcaaacgtcgcactcgatcaaagcgagagttatcccctcaccagaagatcgggccacgagagagagcatcatcagttggtatcagagcttcagttgcctggtgaggattttagttttgtaattttttcccatcatccactatacagccgcaccactttttcctttaccaaacattagttttgagccttgtaattttcattcaattttgctttattgagttttggtccgctgtcgtgtcagtgctggtttttgttctagcttcgtctggtttgagttttgcatcttggttgctcactgcctgtacgttcggttgaaggagaagaaaacattagatctgatctttttttcatcctcctgtgttagtgcatgcatgccgtggaattctggtacgttaccaagtaaatagcgcgtgaaattaggaagctaatcgtgtttcaatatatccgaagtgcatgtgccaaaaaaatagcaattcccagtttttcttccttttgagctgccacgcgcaaatagaaagtatataaatcaagatcggttcccatattccttgcgccacaaaaataggaggtatccatcgttttctcttgtgaccgaggtatgcatgcaacacaatcgtgcatatgtgcttgagttaattacttgaaaaagaaaaaaagaggaagaaatacaaaaaaaaaaggcagacggtgcaaaaaaaaaaaagaaaaaaaaaagagccgcaccaaaaataataataataaggagaaaaaaaaagtgtggaaattttttttaggctattggtgtggagattatggataccccatatctacacggcaatgatatttgggctgaatacaggataccgaatatacatagaatatcttatttgtatctcgggtttgtttcttaacttgtacatcaaggaaacaccttgagacttagtcggttacgactgtattttatctgtatttgcatattccgttagggatatggattatcttttgtaacacggactccttcccatatataaggggggtccgggtgcctctaggggcagatgttgattttctctaaatcatacaatcaatagtacactcggcggattcatccccggacaggagtagggtattacttcttgaataagaaggcctgaacctgtataaatcctttgtctccaaacccatacactttttgtcacgtcctgataaattcatcccaaaataaaaatcatcttctaaaaggaataatagaattaattaaaattcgaaaagaaattggcaaacactaaaatacgtacaagaaaaattcaaatgtggcccggagaatttttgttaaattctccttggtctaaaaggagccctcaaattttagtggaattttcagagcacaaataataattgaaaagaaataaacaaagttaaaaaggtttataaaaagaaaatcctaaaagaagttcttttcccccccccctttttccctcttgggccggctcggcccatttccctctccctctctctctcctctcccgcggcccatcggctccccgcgcgcgcgcacgccgctgacaggcgggcccgcccgccactctcgctgacaggtggggcccacctgtcatcgccctcctcccgccgcgcccgccgccgcgcccgtgccctagcgccgccgccgccgcgaatctcgccgtttcccgccgtccccgcgcgccttaatgaggggggaatcactccccgcgtttccctctcccgattccccctcttttccctctctctctccctcggattcgtccggattcatcccgcgaagttcgccggcgtcttcaatggcgcccgagatctccgcgcgcgttttccttcctccccggccgccctctctccctctcggcgctataaaatcgtcccccgtgctcttctcctccgtttccgccgctcgccgctcgctctcgccgtcggattcgtgcccgcgccgtgctcctctctctccgccgtcgccgccgacctccggtacgccgccgacgccgctccggtcttcctcccggcttggcgccacctccctcggcatcgccgcatcgccgtcgacctcgtccgcgcctccgtttcgctcgccgaccgtcggagcgccgccgtcatcgtcatcccgaaccgtgccgccgctttcctccgctccggccgccgttatcgtcgtcgtcgttgtcccggggtgagccgaggaccgccgttcgccttccccctcccctcctctctctcgggcgccgctccgccgcgccggtggtcgccggcggtgaccatcggggcgcgggcgcgccgctcccgtcggccgtgccggcgaggccgccctcgggcgcgccctcgcggctgccaagtgggcccggccgtcagccgcccgcgcccgcgggtgcggctgacgcgcgggacccacggcgccgaccgccgccagccgcgtgctctcggtccaccgtggaccgaggggctgacgcgtgggccccacttcccgtggacccggtccgcgcgcccgccccctcggctgacgcaataaatgggattttaattaaaatttaaatgaagaaattcgtaaatatccatttaaagagcatataaacttcaaagggccatatcttggccgtttgaactcggaattggaccgttcaagtctctaatttttccttaagaagtaaagaacccatttttgtgctttgtttctgcttgttatgtggagtttattagtgttaaagcctttttcttttccgttggtcgtgtagacgctgcagcttcggaagatccgctcttcgtggaagtcgaagccgtcgattgggaaaacgagcaaggcaagacacatcatcttgatcatattgaatcccagtttataaaattatgttgatttaaattattgcattatcgctttatttaaattcccgcgttatcactgttttatttagccatgcctgtttatctttgttatgaccatattattattgttattgttattattatcaccttgttcaccctagatcaaacaaaaccccaactagtggactctctactcatagtaccactagtataattttaggtagatgcttcgcaagttaactaggcaacattaggtggttttataactctagacttgggaaattctcatatcacctggacactttggaattgttggtttttggtggaattggacatacacctctcttcccctttcaaaacccctaaaacctgttttcggtggggtttgggtgcatgccagttgtgggaagtagcaccccggccactataaggattaagctcgggcctctgttgcaaagcactaccgtacttccacatgtctaatgggtaaggcttagtttgtggctcagtctagtcataaacaaaagtacacggattggagatggatgaagtcgggcgtcgatggacattctccagggcaaatgaaggctacacgagctgcggcccggtagtcgagatgtcatacggcggagggttggtgcccaatgctaggggctcagttctgcctgcctgtcccgggtatcccggccgtaggtaggattgggtcggtactcttgtctaaggctaggatgggttggaaactatgtcacgtcttccgtccgtataccgtggtggtatgtggcacgtggcaacacgtgaggaagatgtgtcttgtgggtaaagatgtacacctctgatcagagtaaatctattcgaatagccgagccctcggatatgggcaagcctagcaatgtacccaagtcagtgttttaattcttaaaatttgctcaacaactaaaatatggaatggttggcctgggttggcttgggacgagctgggacccaggtcgggttgccagttcggtccaaatcatcgtaggccttgggttaaggcaggttcgtgagggttcacggccttgtttaataatactgtgtagctctaggatcgtctttacaaaatggctttgggcaactaagtgacttttaaatgctgtttactgcaaaacttaatccctatattattatccccttgtactcccttgcattaattatgcatctccggtgtggcttgctgagtactgtggttgtactcattcttgctcaatctttcccctcttcagtaagagaagctttggagaagatgtcttaggtggagtcctggcttataccccagttgagcgcctgtgaagatggagccgtaggcccgctagtccgctgctgtttatttttgattgtcaggcctgaagcgcctttgtaataatgtaaatattatcgatataataaagatgtgtcttttatatcatgtttgtatggtgtaccccggcttttcctgggacggggattaatacactagcgttcgggaaaaggcaattttcccggtctcgacacttttccagcttgatagccacccccttttattattgccgaaatctagtttcgacagttggcgcgccaggtaggggtagcgtcaagcttttcgccgatcagtgcaatgggttccgtctccggcatcgacgacctcgtcttcccgcccgggcagatgtttcggttcggcagcctcgacttcgtcaccaacaacttcggcaagatctctctccttgactcggagtcggaccagtcgggagagaactggatctcagtcccgtttggactcccaaacgcggctgaaagttactccaagaccatctcaatcgagtcggcttcaaaccactcggctgagattgcatcttctccaacgtcaccagatcaagatgatggggcttacccaccgatcctgatgaagctccccgacgatttggcggccatctccatcacgacagcgtctccatcccgtaggcctaggcggaagtcggcttcaacaccgatttcacctagcttcagggaagtcggtgtcatcctccaaccactcggcacggtttcgacggatcagctggatagccactacagctctcccaccgtcgactcgcgtcccaccgacgtcgtggagtacgacgagttttgctctcgctaccacgacccggatctcgacgacttcgacggaagcctagatgacaactacaccccactctactttggcgtcttcatggccaataacgagacggaggagcaacgccaagcccgggagaccgaagcgcgtcgcgagactgagcgtcgccgactggaggaggagcatcaagcacaagaacaagaacggctacggcgtgagcagcaggagcgtgagcggaccgcgaaggaggctgaggatcgacggcagcgagctttggaagcagggcgccgagcgcgtgagctcatcggccaacaagatgttgaagggacaccagttttccgcacccctcaacagaatgcggttgccgcgatcaccctcctcgacaccctcctcaaggaaaacgagctcaatcaatccaatcacgtcgtcaacatcttgaaccagacgaagaccatgattgcggcttcggtcccagttaactccgaaagcgtccacacgccgactggtagccgagtcccccacttccgatctcatgactaccgtcatccaagcctcagcatcaccggcgcaggatctaatcgcaggagcaggggtcacgacgagcggtctgttcactcacctcccgaccatcatagggagcgccgagtggaacggcctcgctcaccgcctcgtcgccgccccgtcgatcttcgcgatacaatcatacagcgccgagcagctcgaggccttcatcattcgccggaccgccacgacgacgaccttgacggagtagcagccttcaccgacgacctgcgtcgagcggattggccagccggcttcaagccgactggaatagagaagtacgacggtactactaaccctgaatcgtggcttactgtctacggtctcgcaatccgcgcagcaggaggagacagcaaggccatggcgaactatttaccagtggctttagcggattccgcccgatcttggctccatggattgccccgtggtacaattggatcttgggccgaattacgcgaccacttcatcgccaacttccaaggcacctttgagcgtcccggcacacaatacgacctctacaacgttattcagaagtccggagaatcccttcgagattacatccggagattttctgaacaacgtaacaagatttccgacatcaccgacgacgttatcatcgccgcattcaccaaagggattcgccacgaagaattggtcggcaagttcggacgtaagcctcccaggacagtcaagctcatgtttgaaaaagtcaacgagtacgccaaagctgaagacgccgtcaccgcatcaaagcagtcgggtcccggttggaagccaaacaagggtacgccggctacgggaggaggtggaagtaacaatcataaggaccgcaagcgtaagcctgaggaacttgttgcaaccgccactcactcatctcgacagcgtccgcgcgtcaacacgttcgacaagatcatgaactcccaatgcccgcattatcctaactccaaccacgtggccaaagattgtttcgtctacaagcagttcgcggagcaatacaccaagtctacacggaagaactccgacgaagaacaaagcacgtcaaggaagaaggacgacggcgacaccccggcaggatttcaagaccaccgcaaggagctcaaccatatctttggcggccccctggcttatgagtccaaacggaagcagaagttgactgaacgggagatcaacgctgttcagcccgacacgccccagtatcttcgatggtcagagattgcaatcaagtttgaccgctcggatcatcccgaccgagtggtccacccggggcggtaccccctggtactagacccagtggtccgtaacgtcaagcttcgcagaaccctcatcgacggcggcagtgcactcaatatcctcttcgccaagaccttggatgatatgcagattcctcgctccgagctaaaaccaagcaatgcgccttttcacggagtaattccaggattatccgcaactccactcggccagatcactctcccggtcacttttggcactcgggaaaacttccgcacagagaatatcagctttgaagtcgccgacttcgagacagcatatcatgccatactcggacgcccggcgttagccaagtttatggccgtcccgcactacacttacatgatgatgaagatgcctggtccccgaggagttctatccttacggagcgacatcaagcaagccgtcacatgcgacaaggagagttgcgacatggcccaaacccgcgagatggcgtctgcccgagaggacatccgactggctgcagccacggcgagcgaaggagaagtacccgctaccaagacttcaaaaagtggagaaagcgaagccaagaccaagaagattcccctagatccttctgatcctactaaaactgctgtaataggcgccgagttagattgtaaataggaaagcgcgctcatcacctttcttcagaacaataaagatatctttgcgtggaaaccatctgatatgcccggtattcctagagaggtgattgagcactccttacatgtccaagaagatgccaagcctatcaaacaacgactccgccgattcgcacaagacaggaaggacgcgatcaaggaggaattaaccaagctgttagcagcaggcttcatcaaagaagtccttcatcccgactggctggcaaacccggttctagttcgaaagaaaacagggcaatggcgcatgtgtgttgattatactgacctcaacaaatcctgccctaaagatccttttggattgcctcgcattgaccaggtagtcgactcgaccgccggctgtgagcttctcagttttttggattgctactcggggtatcatcagatccgactgaaggaatccgactgcttgaagacttcattcatcacgccctttggagcatactgctacgtcactatgccattcggactgaaaaatgcaggagcaacttatcaacgaatgatccagagatgcttctcaacgcagatcggccgcaacgttgaagcctatgtggatgatgtagttgtcaagaccaagcaaaaggatgatttgatctcggatctagaagaaaccttcacgagcatccgcgctttcaggatgaaattaaaccctgaaaagtgcaccttcggagtaccgtcagggaagctgcttggttttatggtgtctcataggggcatccaagccaacccggagaaagttacagctatcctcaacatgaaaccgccaagtacccagaaagatgttcagaagctgactggatgcatggcggcgctcagccgatttgtttcaagacttggcgagcgggggatgcccttctttaagctactaaagaaaacagatgatttccagtggggacccgaagcacagaaggccttcgaagatttcaagaaactcctcaccgagccaccagtcttagcttcaccacatccgcaggagccgttgttgctgtatgtatcagccacctcccaggttgtgagcacagtcttggtcgttgagcgcgaggaagaaggccatgtccagaaagtccagcgaccgatttattttgtcagcgaagtcctagccgactccaaaacgaggtaccctcaggttcagaagctgttatatggtattctaattactaccaggaagctatctcattactttcaaggtcactcggtaacggtggtcacatcatttccactcggtgatatactgcacaatcgcgaagcaaacggacggattgcaaagtgggctttggagttgatgtctttggacatatcattcaagccccgaatctcaatcaagtcccaagcgttagctgattttgtcgccgaatggaccgagtgccaggaggatacccccgcggagaagatggagcactggaccatgcattttgacgggtcaaaacgactttcgggcactggagcaggagtggttttgatttccccgactggagaaagattaagctatgtgctttggatacatttttcggcgtcccacaacgtcgccgagtatgaggccctccttcatgggctgcggattgcaatttccctcgggataaagcgtttaatagttcgaggcgattcacagctggtcgttaaccaagttatgaaagagtggtcctgccttgacgacaacatgatggcatatcgacaagaggtacgcaaattggaagacaagttcgatggactcgagctcagtcatgttcttcgacacaataatgaagccgccgacagacttgtcaactttggatccaagcgcgaggtggcaccttctgatgttttcgtcgaacacctttatacgccgacagtacctcacaaagatactactcaagctgcgggcactcatgatgtagctatggttgaagccgactggcgagagcccctcatacgatttttgacttctcaagaactccctcaagacaaagatgaggccgagcggatttcaaggaggagcaaactttatgttatgcatgaagctgagttatacaagaaaagcccttcaggaattctgcaacgctgcgtatctttagaggaagggagacaattgctgaaagacatacattctgggatatgcggaaaccatgctgctgcacgcaccattgtcggcaaagcttaccggcagggttttttctggcctactgcagtgtccgacgctgacaaaattgtgcgcacatgtgaaggttgccaatttttcgccagacaaattcatctaccagctcaagagttgcagactatcccgctgtcttggccgtttgcggtttgggggctcgacatggttggcccgtttaaaaaggcagtcggcggttacacgcatctctttgtggccattgataaattttccaagtggattgaagctaaaccggttgtcacaatcacagcagataacgctcgagacttcttcatcaacattgtgcatagatttggagtgcccaatcggatcatcactgataatggcacacaattcactggcggagtttttaaagacttttgtgaagactttggaattaagatttgctatgcctcagtggcgcatcctatgagcaatggacaggtggagcgagccaatggcatgatacttcaagggattaaagcgcgtgtttttgaccggctaaaaccctatgccggcaaatgggtgcaacagctgccatcagtactttggtctttgcgaactacacccagtcgggccacaggccagtcaccttttttccttgtctatggggcagaagcaatgttgccaagtgaagttgaattcgagtctttgcgctttcgaaatttccatgaagatcgctacgaagaggaccgagtggatgacttgcaccgattggaagaagtccgcgaagcagctttgattcggtcggctcgatacttacaagggttgcgacgttatcataatcgcaatgttcgatcccgtgcctttctagtcggcgacctggttttgaggaaaattcaaactacacgagatcggcacaagttatctcctttatgggaagggccatttatcatctctgaagtcacccggccaggttcctatcgactcaagcgcgaagacggtactctcgttgacaactcttggaacattgaacatcttcgtcgtttctacgcttaagcttatcattgtacttccctatcttgactgtcaacatcaagttctcttcttgaagttgtcagtcgggggctatcatcataataatggagtgtgattttttatcaatttaatttgcttacttggtctatcattgccttgtttggttttttctacttagtctgcgaggactgaaagtttttaatagcttctttgggttttaggctcaacaaagcttgataaaaacttttaagaaatcaaagacttggctagaactatcaagcacagcataaatataccagtattgtacaaattgagcctccatttgttacattcatactcagtcagaatcagtcctttcatcatcagagttattgttgcttggctgaaggtcgttgttgcggaattgctctacaacgtcacttgcaatcttgtcagccgcattttgagcactactgataagatcaagagcagcttcttcgcttgtcccgtctgcaaagccatcaatggtgtcaatttcaattctcgggtacaaggatttggtcatcgccaatgccatgctagctcccatacttccagctttcttgatattcttgaagtatacatccggtgcaactctcagcttgtcaaagatttcggttgcgtcaagtgcactcggaccactgttattaaggaacatagcttggacgagtggtgtagcgacattggcgacttcatctcttgctccttcaagcctcttgatcttaccaaccaggacgtcaaactgagcttgagatttgattttacggtctacaaaacacatttatgataagaatctgctgcatttaaaagagagaagtccagattgttagctggcggtaccttcaacctccttcaaggccgagtccctttgtgcagccagttctattttgtcttttttcaaggcttcaatttgtttctccatttgagccatcctggcggcttgcgctgtttgaaatccaaatggttgaggacacagttacgacagcgtaaataaatgggacagatctagagattaccttttgatgaaccactcagctcgaaatttgaatcctggagttgagcaattcgctcccttaattctttttccgtctttttggcgtgctccttggcctcatgtagctggtccctaactgcttcaagggttcccaaatgaggaaccagcttttccaaagttgtagtcttggcctcattgcgaagatggattctctgcatgatggttcatggtttagttctgctaaagagagaacaaagttatcaaaggcagtcacccggaagatttacattcacgatgcgagtggcttctccaagtactttcttcagctggcacacttcttcatcttctttttgacgatttatgacgataccggcaacttgtgagttctcgtcccaccatttgagcaagataggaggacgagagtcatcagccgcctttatgcgaggaattgcttcttcgtcatcgcctggtgcccctgatgtgtttccaagacattagacgaataagttgaagttatttaaatcggcatcacttgagaagatgggttacctgaggatgttcctagctgagcgtgaggtgatctttgttctttatttggagacccaattatcgggtcgttaccagcctctggtccttgagaagttgtcgtctgcgtttcaacttcggggatttcttggtcgggacctgcatccgactggtttccagtcgggggctcttgtgttgttgcagtttcagctgctgccgactggtttccagtcggcggctggtcactcggatcgtccttgtcacctgaagcatgggcgtcagtcggctggctttcggtagtcggctcgggatccttggataaatttggctctgttgcagcttgatcaggatcttttccagttggatctatgtcggatggtttcctgcaaggtgttctttcaatattcagtattatttctattagagaagcatgtcgaagggaaatggtaccaagaggtttatacctggaagatgttctgatctttggcattggacggccagccagtttttttctgggcatggtacgctttgggggtttattaggcgagcccttgtcctcagatttgttgtcatcgccttcatcgttgtcaagcaccagttttctcttgcgagaacctgtctgtccagttggattggagatttgagggtgtggatctaatctgattgttggtcctccacctccctgaacagtgtgttggcgaggagaccggtgctgagcgattgggggatcagatttcatcaatacatattcctgaatgagatgccttcacggttagttaactcaacatgaagataagattatgttttgatcatgggttgaagatttccgatacacacctgtggaggcggattgaatgcgttatatggcacaaccggcagctgatgtgagtagctgacgacaatagcatttgagaagattttatacatcctctccttcatgattttaaagtccagagagtctggttcttcacgattgggatcatgcttgccgtcaaactcgaatgctgtacgggatctctctttgattggtgccaatcggcattttatgaagtgccgagtgatctgctctccttgtaagccttgttctttgagttttaacatgcgatccatcaattcc

SEQ ID NO: 9018 - DNA, 2505 bp, Oryza sativa
ccaacctttgagcaccgcatcaatcgcttttgttattccagcgagtttttgggttctttgtgtgatttggatggaaggtgatcggaacctctatctctctctctctctcatcttgtttgttttgtgggcgactgttcttgccttcttggttggggatgatcagacattcagaccatcagatgaatcgatttctttgtagagcagttcttgatttatttatttattttgcgctaggtagtagatcggaggggttcatatgattcttggatcttttggttgatttgatttgatctttgttcttcacatggatgaagcgagttttgtgtgtgtttgagcctttgccctttgcttctctgtctgcggaagaaaatactcgtcttttccccttcacttgttcaattttttctcagttttggtggttagaaagaaaatctttgtttgcaaacttgattttctttttggaatgctcatctgcaacgagttgcggatttttttgttttcttgctgctctctgaagagcaagtgcggatcttgcattctcggtcggatctctgcgtttctttgcaaccatcgattccactgctttgcttcttgtaggtttctttggttcgatggaactcgctttatgcatgttctttcacttctgttcttgtgaatccttcgatgtgactcctgcggtttttttcaactatattattttgttttatgtgctgttgatttcccttccagtttactaattcctactgcattgtttaatctttacaggtgggcttcaggactggtggtgataactggctgttggtaaggtgagggttttactttttaatgtcatctgcaacaatttcatgttgctcaccaattttgttggactgtgtgtgggctgtttcttggtgcttatggttgtgggattgagtctcctgggtttgcttccacttagacactagcagtataatgcacataaagttgggcaaataagtttaatcatgcacataagttgaatttgatgcacatttttcattactttgatgcacataagttgggcaaaattcaagtgactgtcaagtcatattctgttgcctattgaacctgcaggaaacatggcagagaccagaggcgtgggtgggcgccttgcggcattggcttctaaggtggactcgaagatatattatctcaaggatgtgttggttgagtacatggacatgaaaaatgtggttgctgaaatagcagaggagagggagaggttccagcttgaacagcgtggttcgtggccttctcacgaataatgttgtgcttcgtcgattccaatgttgaactattatttagtaaaggtgtcatatgtaacttgaaatggttatggcaggaaatgacgcacttctggaagcaatgaaggaggagcttgtggcagcaaacaacgagctcgaagcagcaaaagaggaaatctctcgaaagaacaatgagctagagtctgtaaagaaacagcttcaagagagtgaagcgagaaatattcaggctgagcagcagagcggcattgtggttgagcttatgcaaccaagaggggtaataatctatagttcctgcccccaaattattcataatttcttcatggcattgactaaccacattatgttttcaacttattttaattcttcctatttagccatgtaacttaacacctcacaaatgtctatatttttcacatcatgccttagcatactttttgtactaataaagtaataactagcattttttttttgcttggagcaggtgcaaacaagatcgatgcaaaaacgcaaaaggccattgcaaggaccttcgggctgtgaggctgatgaccaagagtatacgagtcaaatcaatgtccaatctccacgttgcttggaatcgatgagaactcctgatgtatggaacattttgtttagaatatggattctcaattcttgatattttcattatgtgcctaccaaatctataagctaattatttgtcattgcagtcagtttatgttcattgtttttttcttgctgggctactatattgcttatagaagtatcgatatgaaagcaggtcaagaaaagatcggtgcagaaacaaaaacatttatctcaaggacttccaggtgatcctggtgagcttcagttaatggaagggcatctgagtgacccgaatgctggggaagcctcaggtgctctggtgagcaaagatgatgacctggaggcagttagagaagagttgatcaaggttgattcatactcctagaatttctctgatgatacttatagatactgcctaaattcttgtatggtcaaattaaagtgtggcattagaggtgatgctatatgcatgttggtgtttcagggattccttgacattgataacggtggacggaaacttgggataaaggaaatgggacagttgaatgagaaggtgttccagattgcatgtcttgctaagctacctccagaaccagttggtgaggcatcgtatgaactatactcatcgtggcgg

SEQ ID NO: 9019 - DNA, 2131 bp, Oryza sativa
acccagatgaaaaagtacggccgcaagctctttatgggcggccaaaattgcaattagccccttgccgccctctgtacgggcggcaagggcctaatcgcaattttggccgacggcggcagacggcgcggtcgacccaccgtctgccacgtcagcttgccgcccaccattagggcggcaggggctatttctgcaatttttttggtcgatagattatttctgtaaatattaaaaaaaaatctaaaaacgaaaaaaattcttcctgttctcccttgtggcctggacttatggaccgtggagtaaagttgctgtaactagataggccaactttttttttagataatggaatataatatcccggcctttgctcaaaaagaactacagccaattattacaaagatccactccagaagagagtgtagttcaagacaagttgaacacaccaaacaagagaagagaggacccaaactgagaaaagcaaaataaaatgtggagctagaaggcctcgtcaaggcctaggactgaagttcgaagccaatgcatagaccaatgacaatatccttgcacgaagaggtttctccaaagcggtgcccccaaggaggatgcgacgtggatcgccgccaccactcgttcggaaccgaagcaaggttttcacccagagaatatggtagggaaaggaaaggggtatgctaaaacaacgcctccaaggaggggaacgacgccaaacggcgtcgccgttgtcagccagccaaatggctcggcaaggctttcgcccgcgattccctgtccaaacccacaccaccaatccgcacaagaaggatcgtcgtcggtcaacaacattgtcccttcagcgattcggccaaggccaccgcccacagttgttcccgccgtcgacagcgcgcccgctcccggactcctcctgccccgcctccacatatcgccgccgccgacgacgcaccgtcagccggatgatggccttcaaccatcgccgccataggtaccatcgtcgacagccgccatcgccactgccacagccaccaccatcgccagccgccaccgtcagccaccatcaccaccgccaccgccacggacacccctgtccaaccaccaccgtccagccgccaccgtcgctagccaacgctgccagacgccaaccgtccagatccggccggggtggcgcggatcggaggtgcagcgtgaagcacgggtcgccggcatcatggaggaaggcgtcacgggtacggcgttcacagccggagcattgacgagggcgccgcgccttcctcgtggcggcgaggttcttgatgagggccggcgtcgcggcacgcgccacagtccgccgccgtcgtcgccaacttcgtcgccgccacatccgccaccatcgccgccgctagccacccccctgccaggtccgcggagtggcgccagcgacgaccgagcccgtcgccggtcaccccggccaagcggggagaccagatctggcgacgccgtcgctggagccgcggagagccgacaccgtgaccgccgcgcccaactccgcgccgtcgccgcgccgtccctgtcgccacgaccttgccgtcccgccgccatcgtcgccacgcccgcgccggggcgaggtggagccgaggaggatggccccaccgccgccatcccaacgtgtcgcccggctttgccggcgacgagctccggcggcggcgaagcacggaggagggaggaggaggggcggcggcggcggctaggatttcgccctgaactccctgataggccaacttagaaggaataattccactttgactctcaaaaatattgatccaatctacccttgtttgcaacaccagatatcttggttctccaactatcaaaaccggcccaatttaacgctcaggcagtattaatagtggtatttgctgacgtgccatgtagcatcccaatcattaaaaaagtagagcccacatgtcatactcccctcaccctctctccttctctcccccatgatttctcgacagcagctggggggagcgcatgcaccgtacgtggtgggtggcggcagggcgacggaagcaagggagcagggacgaggagcgacagcgtggagcaatggcgacgaggaacgggcgcgggaggcgggaggatg

SEQ ID NO: 9020 - DNA, 6958 bp, Oryza sativa
taatgattttaaattttaattattgcacatgttttaagaatcaattattttaagaatggatattattaataaaaaagaacgggtcaagttctactaatttaatttaacaattatatctaatcttatataaccttatactaccattttgcaaggtttggactatgagcattgtctttagggtttgttgaaaccatgccaccctatatttgtaaaatttgagatatatcacccgtatctcaatgacatgtaggatccacatgagtcaatgacatgtgggtcagtgaccaggttcttgttccaatttcaacaacatatatgtgcttaatagtatcttcgttttttaatatatgacacgttgatttttaacacatatttgattattctggtcttatttaaaaaaatcacgcaattattatttattttattgtgagttgttttatcacttacaaatattttaagtatgatttatatcttatacatttaaatttttttttaaataagataaatgattaaacgtgtgttcaaaagtaaatgatgttatatattaaaatatagagagggtaaccactcctatgttgcactgtactctatatttttttccttggcacagttttcaactaacaataatacttcaactgtaccgtacaagccttccacagcaaatactagtcaagtactgatcactccaaacactatatgtctctgttgagagagaagtgaggaaatttagcgcagttaatgatactccctcaattctaaaatatactccatctgttctatattaattgacgttttgaacatagttgagattaaacttttataactttgactatcaataactttaaaaatatttagtttaaagaaactagaaaaacatatatagatttgtctttcaaaacactataataaaagtaaacatgtatttatttattgtatatattataatagaaaaataaggttaaaggtatatcttgtagagctagcgtatcattgtctaaagcgtcaattaaaacgaaaccggagggagtaaggcacaatcacccttaactagctattatataacaaagaaaattggttgtgccttatattatagaatgaatggagtaacatttaaaaattaaatagtttctggatactaatgtagtagttcattttctacattttataactattgagccttacaatctagagcgagaatataatatagtactagattatttgatgggggctagttggagattcttaaaagtggacacagttactagaaacttcttaagaagagcctatattatatttgaaaccttcaaccagtaatacgttgtgtatatagcatatgtttaaactagacgtacagtgagtttctccgtagcaaaagaaattctaccaagctaataactcaaaaatacaattagtataaagttttaattgttactacctccgtctcaaaataagtgcagccataagtttccgcgcttaactttgatcgtctgtcttatttaaattttttttataattaccatttttattgttataagatgataaaatatgaataggactttactcatgacttatgttttaattatttttaaaaaaattttcatataagaagaatggtcaaaattgaacgtggaaaactattgttaggaagtacagctagtagcttttagatcgaacaaacggtcatcgcaccggtcgagccagtgaactcatcacgttgacccggtcgccatgcacccgcaagctcatccacctagcccaagcccagcccagcccagcccaaaccatccatccccggcccaccccgccgctgacggctggctcccacttccggaatattccgtccatcgccgtcaccccacctcctccctctctatcctcttctcctccatttccctctcctctcccctctcttcgctggtcaatccccctccttcctcgaatcttcgcttccccccccccccacccttctcgccgcgccaccgcctctacaaatccactaaaccccctcctccgcctcgccgccgccatgggctcgtcggcggccgactcgttccccgcttgtggagatgatgcaatccgagacgtgtacggcatcggtggtggtggggaggaggacgatccgtccctcttcctctacctctccgacctcgcccccgtctccccctccgcctacctcgacctccccccctcgccgccgccgccgacgacgacggcgacgacgatggtgaaggagggggaggaggcgccggaggacctggtgctgccgttcatctcgaggatgctgatggaggaggacatcgacgacaagttcttctacgactaccccgacaacccggcgctgctccaggcgcagcagcccttcctcgagatcctctccgatccctcctccaactcccgctcctccaactccgacgacccccgcctctccccgacctcctcctccgacacctccgccgccatcaactcctacgacgccgccgccaccgccaccgccgttgccgccgccgcggtgcccgtgccgcagtacgagagcatcgagctcgatcccgccgcgttcttcgccgcggccaactccgacctcatgagctccgccttcctcaaggggatggaggaggcgaacaagttcctccccaccgagaacaagctcatcatcgacctcgaggcctcgtcggagaataattacctcaggggtctcgaggaggccaagaggttcctgcccagcgacgacaagcttcaggttggattcgctgcggcggcggcgcctgtggtgagcgtgaagaaggaggcggtggatgtggtggtggcaaccgcctcgggcggcggcggacgagggcggaaaaacccgtacgacgacgaggagctggagctggagggagggaggagcagcaagcagaccgcggttcagggggacgatgtcgcggcgcgcgccatgttcgacaaggtgatgatgccctcccatgagaattgcaccgagatgatggagaagctgaggattgccatgaaggaggaggcggccaagaacgaggccagcgccggcgggaagggtgggaacgggaaggtgaagggagggcggcggggcgggagggacgtggtggacctgcgcacgctgctcatccactgcgcgcaggccgtggccaccgacgaccgccggagcgccaccgagctgcttaagcagatcaagcagcacgcgaaaccgaccggcgacgcgacgcagcgccttgctcattgctttgctgagggcttgcaggcgcggatcgctggcacgggcagcctggtgcaccagtcgctcgtggctaagcgcacctcagccgtggacatcctccaagcgtaccagctgtacatggctgccatctgcttcaagaaggtgtccttcattttctccaatcaaaccatctacaatgcttccttgggtaagaagaagatacacatcgttgattacggtatacagtatgggttccagtggccgtgcttcctgcggcggatatcacaaagggagggtgggccaccggaggtaaggatgactggcattgacctcccccagcctggtttccggccaactgagcgtattgaggagacagggcaccggctcagtaaatacgcccaggagtttggggtgccattcaagtacaatgccattgcagcggttaagatggagtcagtccgcaaagaggatctgaacattgatcctgatgaggtgctcattgtgaattgccagtatcaatttaagaacttgatggatgagagtgttgtgatcgacagcccaagggatattgtgctcagcaacatccggaagatgcagcctcatgtgttcatccatgcaatagtgaatggctcattcagtgcaccattctttgtgacacggttccgggaggctttgttcttttactcggccttgttcgatgttctggatgcaactaccccaagggaaagcgaacagcggctgctgattgagcaaaacatctttggacgagctgctctgaatgtcattgcgtgtgagggcatagatcgggtggagcgccctgagacatacaagcaatggcaggtgcggaatcaacgggctggcttcaagcaactgccattgaatccagaaattgttcaggtagtgcggaacaaggtcaaggactgctaccacaaggacttcgtgatagatatagatcaccaatggctcttgcaaggatggaagggacgaatactctatgccatctcaacatggacgccaaatgatgctctctcttatttttagttgtttttttttttggcatcgcgacaaatataagatctaggtatttcaataagatggctagtggcagtatgtcatgtatgaagatcgatggtgttggtgttggtttgatggacccaatgacttgaggtatgcctatctagaatttggagtgcacttgtgattccaatgggttggttcttcttctgattcaaaccaattcatgcaatgcaggctatgagggagaattggtagcccaagttgttgaagccataagataaccaagcatgcatgtagatatccatgtttttatgtgatgttaattagttgcttctgttgtcatgttgcagcttagtgccacactaccacttagaaaatagacttaggtcctggtccggatgatgttcgctgcagcgtcaccggttcttgcgatcaatccagtcagttgatccggttgtaattgacaccagttactctgtttttactaggtgcttactgcactgtggcagacagtaacattgtaatatgctcaaaatgttgaactgggttttggctagtcttgtgctgttgtcaacctgagaactatcttttcggccaacttatttggtctattcatgatccatgttgcaacagagggtcaaacatttttgcccattgatgtgtgtgatattgtttttttaattattatttgcattgatgtgatattgtgattccatacattgacataccttggctgtgtttaaaccttagttctttttcatcacatcaacatgtcatcacatcaaacttattttgctgtggaggctagaaattcccacattaatcgaagaaaaagataaaatctacaccgctagatcgtgatagtcctaaattataacggttgatatttaataaggctacaaataagttttgggaactaacttaaatgcaataggaaactaaaaggctacattggactgatctgtctacatatactagaaacataaattgattaggagtaggattctgacgtataggtgttggtcctgttgaagcctgtaatcggattaggacttggcaatacatatttgaatgcatatggcgctagagcctgaagtctgtaattagagtcatttaaattcaccatatatatacggccatgcattgctaggagaataggaacaactaaacagtacatacatatagcataccatatgctgtatgcacaagcctagcagtaaaggccatatacatgtggctgcactggcttacgattaattaggcagtataaatgcaaaacgccagtggttaaaggcatgtgcgtaattcaatatatacttaattaataatttcataaaaaatgagttgtcgcaggaaaaaaaattttatgtcataagaccttcaccttcatagcagcttcatcagtcagaagtgcaatttgatatatgtgtgcacttttgggtaaaagaaaaaaataattgtaattcgataaaaagaatattaaaagaacagtctatctggaaaacaagacaagattaattaaaattcgaaaataataaaataaatttcaacattagaaaaatagtagtagtttatgtaggaatacaatttagaaatagctaaaattcataattaaaaataagaaatgttgcaagaagagaccatcttaaacgaaacatgagatcaattaattgaaatttggagtaaaaataaaataaattctgaaattataaaataaaattgagagtttagataggaatacaacttataaataaccaaaattttcgaacggaaattctcacattaatataagaaaaaaagaagagttagagttctagttatattattaaaacagccttgaaagaaggcaccacgttcgctgtggaggctggaaattcccacattaatcggagaaaaagaaaaaaaagaagagtccaagtagaaatacaatttaaaataactgaaattcgaaattaaaagtaagaaatattgaaagaaatttccatatagaaacccaatacgacattaatcaaaattcaaaataaaaataaaataaaatccgaaattaccaaaaaaaagagtctaagtagaaatacaatttaaaaatagctaaaattcggaattaaaaataagaaatatcgaaagaagagtccatatagtaacccaatacgagattaattaaaattcagaataaaaataaaataaaatctgaaattagcaaaaaaaagatgagtccaagtagaaatacaatttaaaaataaattaaattcggaattaaaaataaggaatattgaaagaagaatccatacaagaatccaatacgagattaattaaaattcggaataaaaaaaataaaaaatcaaaattagaaaaaagaaacgaaaagaagagttcaagtaggaatataatttaaaattaactaaaaatcggaattaaatataagcaatattgaaataagagtgcatataagaacccaatagtagattaactaaaattcgaaataaaaaaataaaatataatatgaaattaggcaaattaaaaagagagttaaaataggaatataattttaaaacaactgagttgaaaataaaaataaaaatatcaaaagaacacaatacgaaaaataaaataaattctgaaatgagaaaaagaaaaataagatatcaactaggaatacaatttataaataactaaaattggtgagaaaaaaataaagattactaaaagaaaaaaccatctgaaacacatgacttgattaat

SEQ ID NO: 9021 - DNA, 2904 bp, Oryza sativa
tactccctccgtttcaaaatgtttgacaccgttgactttttagtacgtgtttgaccatttgtcttattaaaaaatttaagtaattatttattcttttcatatcatttgattcattgttaaatatactttcatgcacacatatagttttacatatttcacgattttttttaataagacgaacggtcaaacatgtgctaaaaagtcaacggtgtcaaatattttgaaacggagggagtactatcgaggtgatttaccactgctcgtgtgactattatatggaaattgtatactgcatatgcttttgtgatcaaagttatgttttcttgaagtagtaaagacttaagcaaaactattcatagatattttggttggctaaagttattcatagacacagattgtgagttcctgttcatatttatagtaggattaatttgcactaaaccatagaaaggatatgacttaacaaagaagaaaaaaaaaacaaagatgagaatttgttatgaagggtaaattttccatttatcaacttgagatatgaagatttgcatgttctcattttggcattttaactgatatgcaacggttttgttattaataacattataatccattttttaaatatagtgcaaatgataacaaggtcccaaagattacaaggcttggagcttttggagaatggagtacaaaatcaagaattggtcccaaatgatcattatgttgaaaaacagaacataacaaacgcagattggcgcacaaattgctatgagtattgtaagatgtatttgtttattcgcttcaaaacttgtgcttacagactaacttttaaaattttacagatcctgatggccgcattaaaagatgtcgaggaccaactaaattggcaaatattgaaaatcttccagagggtgttaagattattgtcaaactggatcgtttcaatataccttgctcccaatctgctatagttcttggatcctatttaggaacacttgtcaggaagccacatctagctccactgaacattcttcaatggaatcataaactttataagagagcatatcatccaaaaatgatttctgaagtagaggtattgctctttaattttcacagctttttaaatcatattcttatggtgattccaatataattccattcactctttatttttcatatgcactagagaaagcttgcaattgatagaagagctaataattggattctccactagttagatggcaaatggaggcagtacaagtcaaaactgaaaaggggctattacaagcctaacttacctatggaacgagtattgcaaaccgtgcccaaaattgttgctaaatctcaatgggccaccctagtttcttactggtacttagaggactctaaggtaaatatatgttgggactttttagtgactgaatgaccatcattttgatttatatcagctcattgatgctatatgttgtatcattagaaaatcagtgacaaaacaacgagaatgcacagaatattaagcatccacacatattaggaagaaagagttttgcaataaagaggaaagagctggtaagattttaagcaattttcatatattaattcactattgcttcaattcctcatgcactaaagatgtataatctgcaggaagttaatggagtggaggtggactgagcaaccttctttgatgaatgccataagacgaaagatggcagatatgttaacgatgctactgaagaaaaaatggtatgccatattgcttttcttatataaactctttgtaaaacaaaatacactacattaagagtctacaatcttttccaacgtagaatgaagtatatatgaaattggctgagaaaagagtggattgccaagaactcagtgaagctgattttgaacaagctatgttagaagtgcttggaaaggatcataggggtagagttagaggcatgggtccaaccattactccaacaaactattatggtagaagatttttgaatatatcaggaagcaatgaagggaatggctccagtaatgtaaatggtttcattagttttatagtatcatatttgactgagaaatatccagaggataatttgatttctaggttgccaccatcagttgctagggtcattccaagacaagaggtatggccacaaaattactaattttaaatgttgtaacttatatagccataagcttccagaataacaaattcatgcatgtatcttcaggttgatcagaatgaaggaagtcagccaccaaatactgctacatcctctcttccatttgatcagaaccatgaaaatcagctaccaaatactactccatcctctagtgctagagcatcatctcagtcttgcagtgaagaagagtgatttacaatggcaattgtaccattccgtactacttgctgcattagaatataattattttttgtgttaatttgtttgaacctattgtttcattgttatatcagaaaagatgttgaagtattttcattgtgaacaatgtatagatattgcttttgattttaatgacaagctactggcgttaaaagtcttgttaatgtggtctgatggtaattcaatctgttggtattgttttgtttatgggttttctgaatgaaagatgtattgattgttggcatgtggccaatagcggggttataaataataagtgtagatacaggcacaaccgtgtctatagaagcagaaattgtctctaggaaagaaataagtaataaattcattatgaatagagacggttgtgaccgtttctagagaaaacgtagatgtatctactataagctagacatggaaacaaccgtggctaagatcatcaagtgtctctacatgatcaatccaaaaatttgtatttcaaatttgacacggtcataatttaaattag

SEQ ID NO: 9022 - DNA, 9267 bp, Oryza sativa
tatacctcgaactattaaaagtgcttccccatattgtctaacagtatttctttttttttcatatctctacatacaagtcatatatgtttgtttaactaccaatcttcgttgttaactttctcgatatttgtgccgtgcgctgttgtgccaatgccgtgaaccagtgactatggtttgtgtgcgttgtaccaacacctaattaaggctagctctgccgccccatctgtattttaaacccgcgtccgccactgataccatgagaatttggctttatattagtagcaatccaaatgctagctaaatactccctctatttctaaatgtttaacaccgttgactttttagcacatgtttaaccgttcgtcttattcaaaaacttttgtgaaataagtaaaactatatgtatacatataagtatatttaacaatgaatcaaataataggaaaataattaataattacttaaaatttttaaataagacgaacgattaaacatatttaaaaaagtcaatggcatcaaatatttagaaacggagtgagtaattattagggatgcaagtgggtagtcccgctacccgcataaaaacatacttggtagttcattttccacgtggtagtacaaaatttagaagaaaaaatgaactagaaatgagataggcagactaaaaaaacccacttgcatctctaataaccaaacaagcactaaatctagaactgaatgtgacacattctaatacaacgaatctagataaatatatatttatatgtctagattcattgtatttagaatgtgtcacatctagtactttatttttttataggacggaggaagtactccagttgagagagagagaggggggggggagagtactccctccgtcctaaaagacctaacctagaaggagatataacccctcctagctataacaataaatttgaacatcccgaaccattgtactgggagggtcttatcccattatagaaaatagatcttctgattttgagagactgacacaagaattttatatcttgggaatccacgtatattaacaacccatattagaagatactactagcagtactatgttagagaagtctacagcatctgctatacgaagattaagtaccgggacgcaatacggaaaagccactaatgtatgattaattgagttttgattatttcaattgagttttaaagcaccttttacatagtactcaaatttgaaagatgtgctaacagataaatttgagataagagctgtgtctaaatcaaaaaataacggacatggatcctctgcggaactgtatttgtagtagcagtagctgatagttggacccgatcctacatgtcagctgctgctactacaccggtactactgcaaacaatctccaatgaaaaaaaaaagaaaaactgatcatatgcagtggtcagtggagtggccctagagagagagagagagagagagagggagagacgagcagaggggtgatggaccgatggtgcggtggtcagtcgctcaccggtcagtcgcatcgcatcgcatcgcatgcatggacgtggagtaggctggcccgggcggcctgccacatcgtgccgccaaacacggagtacacaccgaccgcagcccgtaggcgtaggcaatggcagtgccagcgacgtcctcgatcggttgcgtgccatgccacgccacgccatgcagaaatgcagatgcagccatcggaccagtactctccctccccagtccccagttgcataaaaaaaacaaaaaagaaagttaacatgagatggaacgtagggtgtgtttagttcacactaaaattgaaaagttggaagtttgtgtatagaaaagtttcgatgtgatggaaaatttggaagtttgaagaaaaagtttggaactaaactcggccgtaatagaaatatattaaggggatatttagataagggttttggcgtgtcacataagatattatagatattatatagggtgttagggcactaataaaaaactaattacagaacccgtaaataaaccgtgagacaaatatattaatcctaattaatccgttactagcaaatgttcactgtagcaccacatgttaaatcatggagcaattaggcttaaaatattcgtctagtaaattagtcgcaatatgtaaaattagttatttttagcctatatttaatattttgcaggtgtttaaacgttcgatgtgataggatgcaaaattttagggtgggatataaacatgccctaaaatttaaattataactagaaaggtagtagtacgtttatttagaaatataagagtatatattctagtaattcaatcttattttaggtttggtttttctgagagaatgcgagtacgtgccactacggatcgagttggcctgctagcagcagcaaagcatgcaggccagccagtggccctgtgcgttgcgtacgtgtaggtcagtacggtgtgacccgcccgatactactactgcactgcacacactccctccgtccgtgtagtactcctacttgcttcctcctatggaaaaaaaattctaaccttgctacccgtcctaaaataagtgcagccgtggatatccatacccaacgtttgactgcccgttttatttaaaaaaattgtgaaaaatttaaaaatatttagtcacacataaagtaatattcatgttttatcatctaataacaataaaaatactaatcataaaaaattttcaaataagacgaacggtcaaacgttaaacgtgaatagtgcaaaactgtacttattttgggacggatggagtatatcataagtactataaatttaaacatgtagtagtaggagtaactgttcagattcgtagtattagaatatgacacatctgatattaggttgattgagaaatatctaggggttttccgactatctccacaagttgatgggctaggcaatataggttcgaagcttcactcctactaattatttaatattaggtcattctctaatatttgcgtctttgacaaggttcacaattccgacgaaaaccgatcgaattccgcgaaattttgaggtttcgacgaggctcgaaagtagaagccatctgaaatttcgatgagtttcattcaaattcaaatttaaattgataaaaaaggaaaaaaatatttaaaaaaatcttataaatagaatgatattcatataacctattgggatataaatttttgaagaaattgatgtattccgtgtatttgctgaaatttaccgtaggaaagaaaagaataaaaattaataaaaggaaaaaaatcatttgatcactttttctaataaccgattgaaatttcgataatttcgctcggaattttatcaaagccaatcggttttcgcgagcttatcggtaaactcagggaatttgtatttaaattttggtttataaaatttgttcagaatctatcagctttccaccaaattttataaataccgtcgttccaccaaaccctgaaatggaaggccatcttgaaatcgtaaaccctgatctttgatactcctactacgtggtactcactatactagtatatctctgacccaggtgggccccatccaacccctccctcagtccctccctctagagcctggaccctgtttatcttcttctctctagctaccactaatctctcttcagtttttgtttggtttggtctgttctggtcaccgtctgcatgcatatggctcattcgatcgatcgaccggcgcggcgccaaagattcacccacgacgctctacctaccctgtctgctactgtcccatatatgctccctccgttttataatgtaagactttctagcattgcccatatacatataaatgttaatgaatctaaatacatacatatgtctagatgaatatggacaatgctagacaggggcgtactagctaggtggcaccgtggtccatggaccacctaaaaatttgaaattatagtatatgtgctagttaatatagtaaaaattatatagtggaccacccttttaattgacatattacatatagatgaaacacttttactttaaatcctagttacgccactgatgttagaaagtcttatattgtgaaacagaggaagtacatactacgtgtatcaacaccatgatgcacaccatgtcgatctgaacctttgaccatgtcggtcgagatgacatgacaaaacaatcctgtcacgctggtttgaatagtgtggcaatgttatttggtactatcatcgcgcatgtgtgtgagtcatagtatcataatgtcaaattcatagttactaggaatatcctaatacctatgtcagatttattatattaggatgttaaatttatagtgctcctagaatatgtacttatcagatttataatgttgaattaacttggtgtgtatttagttctttgggtgtaaagttttaagtatatgaatgcacatttgaagtattaaacgtagactaataacaaaacaaattacatattccgcctgtaaactgcgagacgaatttattaagcctaattaatccgcaaatgtttaatgtagcatcatattgtcaaatcatagcgtaattaggctcaaaagatccgtctcgcaatttacatataaactgtgcaattggttttttctcacatttaaattaatgccctatacatgtgtccaaatatttgatgtgacgtttttgactaaaatttaggccttgattccgaaatggagttactatttgatgcgttggtcccaaatacgctaaaccatgtttcttttttttttcgactggccatgggcaacgagtttcgatgattggcgtttccgtttagaaataaacacttttttgtgcttgcttgcgagcattggaatggcttgaatgaaatgaatattaagataaataaaagaaagaaaataaaccattgagaaagttatttatttttatattagtttcctatacttgactgaacaacttccaattccgttatttcaactacaccaaatgatcttttgaattagtcaagactcatatttatggccccttttatatggttattgttttattgaatttgcttcaggcttgcgattcgactttgatcgtaatggattggtaccaaaccaagatcaaatcctaggcaagtggatctaattttaacagccggcacgataacaatgaaaattgctccttctttagtgagattaattatatgagaagattaattatatgagtgaccaacgaggatggattagctaggctaggcaagcagtaattgctacaggtgtaatgtgacccagcacatgacacgaccgctgtgtaaaggccgtcaaaagtcaaccatactgtactggatataccgcccggcccgttgtacgtactgtacgtacgtagacagacatggcgatgtcaaatcaaatcaaatcaagtccagtacaatactccctccgtctttaaaaaaaaagacaaatcctagattttcgtatccaacgtttaactatccgtcttatatgaatttttttataattattatttttattgttagatgataaatcatgattaatactttatgcgtgacttatccttttaatttttttataatttttttaaataagatgaacggtcaaacattgaacatagaaatccagagtttatttttttttgaacggagggagtaatccatatgcaatcaatctcacatacattatcgtaaaaggggacgcatcgactcctcctaagttgatttttttccgaagggagtaggtctctctagcataaataccctgtatatctagctcagctacagcctctgatcattcactccatctttattccgccttcatcaattcgatccctgcatttcgctaagctattgtggtgtttgtttctatcgaaaatagataaagtttagatgtgaaattaagacacggaagacaataagatcgttaacgcatggttaactaagttttaattacttattgagaacctttaaatgaatagatttaagcaacttctacataaaaagttttgtacaaattacatcgttcgatagtttgaaaagtgtgctaacggaaatcgaaataaaatatgtatcttagtcagaaaagaacagggtaacctcatcttcagccgaatccacctccacctcagcttcaatcgtgcccatagaacttacgctctctgcaaggtccaccatctcagcaccagaggtggcatcgagcaactagagctcgcactagtgaagtggctgctcgccaaggagaccgaaaccgagctccggccatgtcagctggctacatggcaggggtgccacgggaggagggggttagtgctaatgtctttggtgtcgatccattggaccttggcgccaatgatgcttgcgctgagctaaggttctattcctgaataatattttttataggcttatttgtaaaaacaagttttctataagggccaaatatacacattttaggcaaatcaaacctgaagtggatgctttctcaaatttcagaaattcattccccaaatttagcaaaatttactcaaaattagtcaaaatatgtttacaaattattttcttttgggccaaaatattctgaaatattagatctatcggccctctcaaatttgtttagctttcaccaatatagaatcctgctcactagctatgtgatgcgattctagctgacctggcccatgccctacccactccgtataaattagtgtacgtacgtacatacgtgcaccgttcatgcttgtaacctaaagtaaatacatgtacaccaccctctgtataaacgtataagagaccacaccctgcagcaatgcttgcccaattctagcaacacctctagcccgtgtcaccttcctttcatagctaaacaaaccaacaaaaaaaaagtactagtatactagtagtatacagctagacggtaaaagaaaacaagtttatacgtactccaatggaatactccagtaatttaaaatttactccgtattatagcatagtatcagttagtactagtatactccctcggtaaaaaaacgaatctaattagatgtgacacattttaatacaacgaatctgaatagagatatgtctagatttacggtactaagggggtgtttagatccaggggtataaagttttggcgtgtcacatcgggcattatataatgtgtcgtatagggtgtttggacagtaataaaaaaaactaattacagtatccgtaagtaaaccacgagacaaatttattaagtgatccaattaatccgtcattagtaaatgtttactgtagcaacacattgtcaaatcatggagcaattaggcttaaaagattcgtctcgcaaattagttgtaatctgtgcaattagttattttttagcttatatttaatacttcatacatgtgttcaaacgttcgatgtgacagggtgtaaaattttgagatgggatctaaacagacgggacaagatattaattgtatagtaagcgactattatataaattagctagtattaaattggctatagatattttaaagctagtagttggctatactattaaacttgatacgagagagggagctagtaattagctactccattaaacttgctctgagagtgaggtgtgaggaggggaaaaaataaaaaaaattggagagacaagacaatggatggagatatcacgtcacatcaccgacacgctgcactgtatacgtacgctgtacagtacagtacagtaggagaacgtactccctccgaaaaaacaaaccctagatttacgtgccaacatttgactgttcgttttatataaaaaaaatttataattagtattttcattgttgtcagatgataaaacatgattaatactttatgcgtgacttatttttttaatttttttcataattttttcaaataagatggacggtctggacacggaaatcaaggtttgtcttttttttataaggagtagctccctagggcgtattcgtacaggcctcaagcagcgcgcccagccaatgggaacccgccacgtttccgtctcccatcttcatttcttcctgatcctctgccactttgatggcggagtagtaaaatacgaagtctctagctttccgctgcgacgtctactcgagctctgggcaacttgtgatctcatctcctgaatgctgccatctttggttaattgatttctcttatctcttttgttcttcttcctctctctctctattcaatataaataccccgttcctaaaaaaaatcaattttgtgttcagattcaatactaggattgtactctctccgtaaaaaaaaacaaacattgggtttaaatctggacatgatgcatgtccagattcaaacccaaggtttatctttcttttgggctggagggagtattttttttgacggagtagtataatctaatatagagtctcattggttacctatattttctaatatataagtcaaaacggtatattagggaatacaaattaatttatataagtaaaagttttatatatttttatagcgatttaaaagctaacgcaaaaagaattacgttgaatatatcttaaaatcaactctaaatataggttctagaatttaaattttacatattgctttggcttattaggtcaactgataaggccacagatataacatattctacaactacatatatgttgcacttattttgagatggagggatataatctctagcaagctaaggtcccgttcttttctctaataagagtcggataaagattaaaattttcatggcacgcttttcaaacggttaaacaatacgtttcgtgcgaaaactttctatataaaaattgctctaaaatatcatattaatctatttttcaagtttgtaataattaaaactcaatcaataatacgttaataccatatcgttttgcataaaaaacttaatctccatctttaccttcagaagaaaagaacaccacctaagatttcgcgtttgagcaagggagagagattggagatctttttcgagcaaggctgtgtttagttcctgaaattggggagaagtttggggaaagtttgtgctttggaaaaaaagttaggactttatgtgagtaggaaagttttggatgtgatgtgatggaaagttgggagtttgggagaagttccgtgtgaactgaacagtgcgcaagagaaggatccgatcaaacaagaagaagcagcagcagcagaggttgtagaccagtgacggatgtagaatatacaatttttagagtgaacgcctccat

SEQ ID NO: 9023 - DNA, 14623 bp, Oryza sativa
ccagatgaaaaaagtacggccaaaagatttttctatgttatgttaataataaataaagaagtatttattggtaaaacttgttaatattgttataaaaatgtattgaagttggttgttgcgcaatttcatatgttaagtgaggtattattttgtaccttattcgacgtattagtactcggataatttatatatgcctatcgcagtctgggtcatagaaacattatatggacttaaacaaggagaattatgtaacatgaagaaatagtagtacaatttgaacatgatacaactatttgcattgcggttacatagatgatattagattcgaactatgtcacatcctgatttttgtttcaggatttataaattatttaataaattaataatataatttatattaaatgttctttaatttacaagtgaagttaaatgtgggaaataaaatttcctaaatataaagcatggatggatttaatttttattaaattctccatgattaagtcaactctctgaaattttctcggatttttcagagctcaattcctaaatgatacaaagaacagttcagtaattatttgatcattaatgatctaattataattgttaagagcttttcttgtttaaaaatccttaaattataaattattgtttaaaaggaattattagaaatgatcttaaaaacctaaaagagaagatctaattttaatttgttaaatctcaatataaaattgggctagataaaattttgttaaatactttgcttaattctataattcctagatttttctgggatttatttgagctaaggaagtatttttaataaatggaattgcatttcaagaataatttaaattgaaaaatgtttttaaatcctccttttggctttgggccgaaagtcggcccaaaacctctcttcttctctctccctccccggcccagtcggccaagtccgccgagccgccgctctcctctctctctcagccgctgacaggcgggacccacctgtcagtcttgtcttcctcctcgcgccgccgccgccgccagaaaccctagcgcaagccgccgcagtttccttccaaattcggtcgcgtctttccttctccggtgaaatctttagaggggaaataatctcctcgatctcctcttccttttctcttttggaatcatcgtctaaatcgctttggaagttcgtggattcgaggtcgattcggatcggtctctctctctctccgagcccgaactttccatcccgccgccggtcgccgtgggccttcgtcgccgctcgctagcccctttataaggatccccgagctctcctctacccgccgccaccctcgccttcgcctctcgtcgccggtagcgctctagcgccgtgtgacctagcgccaccgtcgtcgccgtcgcttcagccgtgtgccgccgccgttccggtcgtcgtcatcgctcgggaagaccgccatcgtggtcgccaagtcgccgccgtcctcgtccgccccttcgccgccgccgaagaccgccagagcaccgccgtcaccgtcgacccgatctccgccgccgtttcttcctcgtcgccggcgccgtccgttgcccttccgccgttgttttggtcaccggtgagttcgccgcgtcgccctctacccgttggtgtcctccatttgcgtcgtcgcgccgtcgttcgccggcgagcacgcgaggccgagccgccgccggtgctgacgtcatcgctgacatcatcgttgccgtttcccgtgagccggtcgtggaccgttcgatctcggccgtccgttttgggtggatcgatctcggccgttcgttcccgtgaaccgctgccgtgcacccggtccaccgcgaaatcctagccgctgacgcaataatcctccttttccttttcaaaaataattcattattgcgtcgtaattcaattaaaatccatataagtgttttaatccgatttaatctttaaaaattcataactaattcattataactcagtttaatgtggttcaagttgcaaaaattatataaaataaagatctacatattaaaattgtccataaattgaattaaatttatttaattctttttaaatgggctttaattagatttaatcttgtaaaattcataataaattatttgaagttagaatgaggccgttcaagtctcataattcatctaaaattatgatctacatgtttgtttactttttatgtatggtttatttggtttttattagtctttttctttgttttgcgtgttagcttgtcgtttccgtcgttgcgaaggttcgcgagtgcgccggaagtattcaagaagattaattgaataccgattattgcaaggcaagtcacacagatcctaaacacaatcctttgagcatgttgatcctatatttaaattctctatttatttcaactgtgcatttattttcgaatgtcactgggtggtgtgaatctattcctttgttatggcttgtttgcattgattactttattccttgataccttgggttattataacttgactaattgagctttatatattggttcagctagatattagatataattgcttagccatgcttagaaacattagcacactattgggataacttatgactcactattatttaatgatggtttaaagatagttcacgatggtcaatcgtgattggttaattaattacttgtcaactaaaacttgataatggtgggttgtgagcacatggttttgagagtcgtgctcatgacaattaagaaccggttcgcgagctactattgtgaaacattaatcgtgccaaccacaagccagcgtgggcaacggctttaccttttgtataacatgattcattacggagcaccagactgagaagtggcggagataagcccacgggggtcgctggggagtccatgccttgttttataagggggtgattatgatccaggaatggtgcactgtggtgagttgtgttatgcagagggtattgtcacagcctctattcgggtactttccagtatcgcgacgcatagtagacatgatgttgaggctgtgtcttgtgggtacagtggtacacctctggccagagtaaaactattcgaatagccgtgcctgcggttatgggcgggttgagcaatgtttttcgtgattagtctcacacctctcacaatagttatagatgttatacctggtaataatttgcttagctcctggtttggagattagatctgtacagccgggtatggttgttcaggatggttgggcctgtgcagcatgggtgtgctgttcagtgttgattaaaatttctgattaattactccactgttttacctctcttaaatgttttgctaaatgctgcttttgcaaatgagcctatattatgccatcctttggtatccttgtgcacgtgcatatttgctgtgtggcttgctgagtatgtcatatgctcaccttgcaataatcaatcaacctcagttgaagaaaaaggatccagaaggagaagacgtttggcttataccccagttgagctgcctgtgggagtggagccggagcttcgctagattttattttccgctgcagttttcttcatggtgaggactaagtgcctcttaagtaagtatttatcgttgtaattaatttgatgaatctgtatattaaattgtcagtttgtgtacctcggctgattcctggacgaggattttatgcacaaataagttcggaaattactagtgaatttccgggcgtgacaaactaggagggaggtagtgcaatagttgaacacaacgacgatgtagtaatgggacaaggaagcatgacagtagaaatttcaatatgccaagttgtccgataataggtaacccctacgtgaggatccctctcctctctcaaaccgcgctttagtaaccctgtattgctctggtagttcaagctgcacaacacggctaggtggagttagaacctttctggtgtctatccattctctgtattgacatctccttggtggttcctgggaggaaagaatagatgtaaagcaagcaaagttagtaaatgttgtgagaaaataaggattcatgtaatcaaaatattcttaccatgaaatcgtcgtcaagaatatttggacaaacaaagaaccttcgacccaatgttgtaggatttatggaacgaagaacctgacaacgatcaccacacctgcatcttggacgggcttcccatggagggagtgccgtagttagcacctgccagtcgctctgttgttcacgacattgtcgttcataagccgcgtttctctgtaagtattgctcagtactttcggatgcgaaataccagcgaccttcttgtaaacaagtggttaggtcgagaacgggattttctgtatcgacccactcgatgtatgcgcaagccgtagtgcgggtctgccgaatagagtagtgttacgaagaataaagcgattgcccatacggaatgaataagcatatgcagataataaaatacctcacggtcatagttagggcacctaaaaaagcgccttcctcgaatatcaggattcctcgaagccattagttggcatcgatcaccacataggcagagaggacgctggcaccaaggtggtagtaggtatacacaaggatcgctacgccagtttggatcctcaacacctcggcgtctagccattgacgaaagccggtcggatttgtaatgaagcaagtggggaagagagtactgaatgtgactgagttctgaaagattgtgaggcctcactcgttaaggcgacttatataggcgcaaaaaatcgagtgatacccctgacatgtgaacgtggtggggtatggtgggtacgcctgattggcgccgaaagatacatgcatgatcggcgccgaaagttacattggttgtatgcgccaaatggcggacaaatactcgtatcacacgcgaacaaaggaggctgcatcggtacggcagaaagtagtcgtgcatgcgccgaaaggtatcgtgcatgcgccgaaaggtatcgtgcacatataacaacaacgtagtcattacacaagcatacagtactggaaagtgaagcaagtaaacaaagagaagactgctctactggccccgccccgcgccgcgaccacgcttggtcctccgggcctgtgctcgcgcgtggtcctgggagtaggtgaaaagatccggtggcacagtacgggtagcacgagtgtcccgcggaggagtggcctgcgcctggtcctgcgtctgcaccggcagtgcgcctcccagctgtgaggggccgatgacgtcctctgtcgagcctgaagcgaagtcgaagtcagtgatgtcgaagaggaaggtggaaggcaacaagcagtccgacgaggtcccagcatggtccagtggtggaccctgactcgacgtgccggctgcctgtgacgaagtcccggtgtactgccagaactgcgctgagtgcgaggtcgacacagctgcctgagatgctgaccctgcagcctgggagaagtgggcggcctgcgttatagcgaactgggcgaaacctacacatcgacaacgggacccttgtaagctaagacataaaatgtatgtaaattgattgtcgaagtaatgttgtttttttaagtacctgtggggggcacaacagaaggcctagccgaggaaggtggggtgctgaacggtgcacgaaaccctgaagcaatcggcaagtgaaacggctcacttatatgtgcgaggcatgtacagaaatagtaataaaaatacctacctccgtgcggagggggagtcggcctaggaacgtgcgcagctggacggggaccagtcggtacgggtggccgctgtacagctgcgtctgcccgagcaacgtcgtctgcacgacaggtgagcactcggagaatcgagcgcatcgactccaccatccgcgtgtacgtcgtcagctgctcctctacgggtaccggaatccccgcgcctaaacgttggatcgtcgttgaaccatcaacgacgacccggttgatgtcgtcgacctgcatggttaatttgttcgtaaatattcgtaaaatttgacgaagagaaagacatgaaaacataaaggaatggtgcgatgcagggtactcacagcacgagcgaagtcctggtcacggtgcctggcatagaggtctctagtgctcgcaacgtggggctgctactccaagggagcgaaggtgaccctagtacgggtgcgtggctggtaccagcgtaggtaggcctggtacgactcctcagtgtgtggctctccctcgtggtccacgacctcctcggttgcgagcaaccagtcctcaacaaaagtcgccaacttggcgggccagtcgccagctaactgctgactcttgcgcgagtacctgcgaattaatgtgtaatattagtgtgaaacgacagatgttacaaaatattgtgaacatgcagattttaatgcaacaacggaaagcgtagtgcaagatcttaccggtgaacagcagctgggacggtggtcggaaacggtactgtaaagggctaacggaatccgaactaccgcatcacgcggaaaggggcgtgaggctcaacgcagatgtcgaagaccatcggaaccgtagtcatccagtacgcctggtccctggtgcagagtgtggacagacccaacggcgcacgagcctgggtagccgtggcactgtagggctcccacacgacgtcagtcggcagaaggcggtcgaactccataacaaactcaggatacgaccgcctaacctggacgtgagcccatcggcactacaatacgagacgatcgatgtgatgtacaatgaacttatcaattaacttaacaatacgataagatcgatgcaacgtacttgacgacggcaccacagagtacccatcgtagggtagtcgacctctggtcgctcctcgtacagtgactcctcgtacgcgtgctggtccacctcagggcggccgatcgcaatcctctcagctgcccagatagaaagaaagagagggcacccaccaaaggtcgcgctgggatccttcttcgtgcaagactcacaaagtgcacggtacagagccgccaacaacgcggaaccccagctccactgaggcacctcgcctaccgcggcgtcggcgatgctcctggcgtagtgcacgagtcccttgtcgaccgcgtgcccgtgaccgccacagaacatcacccagccaaaaagccagagcaagtacgcctccaaacatcggctgtaggagtactcgtcagcctccgcctgtagctgctcaacctgcaagccgtcgataaaatgttaggcaccttaactgcggactaaatatgtaatacgattgtcatttcggtacaaaaacactcacggtgaactgaagcagccacctcttcgtaggtccggtgttgcggtggtgtgccaacggctcgagcgggaggtgcggtgcgcgctgtactagtgcgaaacgtgccgtcagatcgtcctgccagtccacagccgtggttactggcccaacagcgtctcccgcgagcggtagccccaacaagtacgatacgtcctgtagggtaggggctacctcaccgtacggcaagtgaaaagtgtgcgtctctggcctccatcgatcgaccaaagctgctaggagggacctgtccacagtccatcgtctggccgggtccacgtcgccggccgcagcctccaccagccgacacatcggtaggaggccggcctcacgtagcctgcaataacaaattaatatgtcattataaaaaatattacagtgcaactaacttatagtaaaacactgttcgtacctctcgacaaaggagtcgtaaaccgtgagtagctcaccgcacgtccgtgcccggaacgtcccaagctgagccccctgcaccgcagtaaggtgagaccggtgtcggtgatctatcgccgggtccaacaactgaggtgtatcctgacgtgccatctctgaaaaatatagtgtttcgtgttagaacaattcaaaaaatagtactgtaaaacaaaagataacttgcaaaattataaaatagtaataaaataatgagattaattatgtacaacaagagtacaggctatttaaatatagcaaacgttactaatggtacataacgatgacgtgcaatttaacatatatgtagagttcaataatataacataacattacgtgtcgaagtccgacatacatcagcatacctaaagacgttaggcgccttagtctgacgttacatcacgagacctaaagacatgacatgccgaagtctgacattacacgacgaaacataaacacatcgataagttcgaaacgaattacaagaaaatccacatgccgacatagaacataagaactacaccacgtagccagacgtggcacgacgacgcctaggacgtggtcgagtggaggtagtgccttcacccgtaggtcgagctccatctgctgctgatcctgatagtcctgcctccgccgcacttggtttctccttgtctttaggacaatgcttgtaggtgtgcccatgttcatcgcatttgctgcaacgcttcaccctgccagcctccgactcgtccatatcgttgcggatgcgacgagtcctcctccttccagccttgcctcggagcttcgatgggtcaggaatattgagtacttcatcgttagtctctgtgaactccccagctatgccgaacccataaatctcgccgctccatgtatgatatattgcttgcttactgaagtactgtgacacatatactgcatctgatatgccacactccactgcggcagcaatgacatgggtgcatggcctgtggagcagcttcggctttgcacaagagcaatgacatgtgccgtcggctttgagaacacactcctgcttcactctcttgcggtagatacccctgcctgacttatcttgacatagtatctcaaacctgtgctgttgggtaccttgcactagagctcgatgtttcatggcctttttacgcaactcctctagctttttctgcatgaaagctccaaacaaaatgctgttgttcggcatagagggaagaactgcctggaaccgatccctaaaatacctgcatgtcccatgtaaaatgaactccactatgccaactagtggcagtccacggacaccgcgcatcacccagttgtaaacttctgccaaatttgttgtcattattccatatctagcaccacctgtgtcatacgccttggcccatttctcttttggttcatgcagaatccactgagaaaatttctgaatctccaatccagttcttctaaccaatgttggactatccgttgggagaggtccaagagcttgaggagggtcagcaacggcggtcgatggagccgctgcacgctgatcactgcatttggctgtcaactcatctaatctcttccaaagctcattgaattttttctcctggttctgattgcacagcctcttgaacatgttcatgagctccttgttcttgaattgcttgaagaaattagctcccatatgacgcatgcaccacctactctgtacatcttcccaaacaccggggtatcctcgttccatactcccaaactgcaactctcctatcgctcgcagaatgccagcgtgcctatcatgtatcaggcatacatttggcctcataccaacaacttttgttttaaccaatttcaggaaccagtaccagctgtcggtattctcactctcaacaaaagcaaatgccaagggcaatacctgattgttcccatctacccctattgttgttagtatctggccccgatactttcctatcaagaatgtcccatcaatgcagagaacaggacgacagttcacgaatgccatcttgcatgcatgtagagctaagaacgccctttgcagcacactcttgctaggatgttcaattgaggggaatttcttcacttcgtaagagctcccagggtttctttcctcgataacaccaagcaggtgtggcaaattgtcatacgaggcttcgtaagttccaaatctcatctctattattttctgtttggccctccaggccttggcatagctaatagtatacttgtatgtctcttcaatgtgtcggattattgaccttggttcatatgtgagattatcgatgacatgcgcatacatctcagatgcaacaaatgcacatgtaatgttcctgtggtatttctgaacactaggtagaaaacatgtatgcttggtaacaactgacactgtccaataatccttccatttccccttatacgcgtgcactctccagggacaaccatctttttccttaacacaccgaacttcatattgcgaccggttcgacttggcaacccaaaactctctatgaagtgacactgcaaaatgttttaccgcctccttcatatcttctgctctactataaatcgctccctgaataaccttattttctttgtactcccatctcacactatcctcttcagagacgatcagcccagaaaaatcctcactagcccattctgctggattaatatccgtctcatcatctgacgaatcaccttcctctacacgctcgttgtcagaatcctccctctccatttcatccacaatggcaccgacagtctccccctcgtcggccactccacctggttgaatgcccactggagctactacgcccccgtcctctcgtgcgttgacctcctccacagaagtctcgtttacttcagcacttggtccctcgccatcatccatgttcgtctgcacacctggatccttcgggtgaacaaacggaaccaaagctagaggccacccgcgttgcaatgcattttccaaataccatctccacactcaagagttttgaactggcattagttcccaataaaaaccctcagttgcccgacttactataacattgattgttatgtcacttgtctgtggatcaactctcaagcccctcattaaccatccttttatagaaggtacactcctctcagccggtctatcaatttccctttctgatacaataaaatctgacagatctaccccagttggcccgtaacggacgtttcctggtccatggtaaacttggaatatttgtttgttcgacatatctgtcaacgaaataactagatcatattactctttcatgcaataaacatctataacgtaatatcttcttgtgtaagccaatgccaatgcaacggtaatgtattgattccaaactagcagatctacgtagttaccgatatctacaatacgcacttctagattagtacaactaaaaccctaaaaatataatgcatttattcaaacaaatttttaaagaatacacactatttaactcaatagtcacatataggatctatgaatattacctgaaatcggcgtctgaatccggcagggtttcgccccttcttctcttctccttccctctcttctttttttttcactggaattgaggagagaagaatgagggctgggggctgggcagcaggccttctataggcagcgaggcctgccgcccggccagagggcggcaaggggccgcctgcaaaatagccggccccgactggcttttttgcattcgggccccttgccgccccaccagagggcggcaagggttttcctgcaaaaaaccctccctccgtcaccgcccgttcctcccccgtttgccacgtcagcttgccgccccagaggtgggcggcaggggctatttctgcaatttttttggtcgatagattatttctgtaaatattaaaaaaaaatctaaaaccgaaaaaaagtcagaacaggaaaagaaagcctatcttggcccataacttatttccttatttatgttgtcaccgttatgggccaagatgcatccgggttggcgagttcagctaacggtgctagagatgacaacggggaatacatcctatatatgaccataaggcctgaggcctaataacccagcccacggcacggccatttggctcagctcaagcatggcacgatacgattggtgtcaggctcgtgccggcccggccagacagttgggccgtgcctagccgatgccttggcatggtgggccgacccggcccggcaggattaaagaaaaaaagttgagggaccctatatagacttaactcagccatataagacacggcccaaagagaagaggaatacaaaatagactattccagccatataagacatagcccaaagagataaggaaggaaaaataggcttattctatggagaagcacggtggctattgtgtgtttggtccggcccaacacggtccgagtctgactcgagtcgtgcctaggccatgggtatagcccgtgggtaggcacggcccaacccagcaagtaggtcgggctgtgctgacccgactgacctcggcccaagtccagtcgtgcctggactgtgtcgggcctggcggcccatctggccatctataatacatcctcctcagtcctccctaccccccagtgagtcaaaactttccctgttttcgtccccgcgaaatacaacggaaaaaactttgttccatcccgctcttacacaggaaattaatcccgatgggtcttcatagccgcttaaaaccatatatagatatcaaattatatatacaatacaccacatatattcacactttatattaataatattgacaaactcacatgataacaaataagattatcatttatccaagatcacaagtaaagtaatcacataggatgtaaaaaaattgtaaatttggaccttatacaggtctccgcgggggacggataccccggaggccggtaattgaggattatctctgccgccgcaaaatctgacgtgtacataatttctctcatttaattttcaatggaaaaactaattctaaccatttttatctcctaataggagaattcaccgcagggaaatgggaaccgggccattgccatctataaacggtgcacatggaagtgaacggtgtgtgcatgtggtgagtgactgccgactcttgctgctgtaagcaatgacctcttcgacatgtgcatgcaaacgcggcgaatcggtgagaaaatctagataaaattttctattgatttgagaggatttgtgctagctagcctgctaggatcatctttgcttatgcaaacaaagctttatcagagtttaatcagaggttaatcatcctgtctgacagtcagagagcttgcttaagcttgttatatcagtcatggggtcacaatctgtctatataaactttttttttctctgctagaaaaaaatacatatatagtcttatgttgtcgtatttgtacatgtccatatcttaaaaaaattgtttcggcctaaaacggtcgtaggtctactcctggattgaaaataattgttgtgttcttgcagcacaagaagtctgtcaagagagaagcactagcatacaagaatactgcaccctgtcaaccattttaataagagataataaatatcataatgataaagatatttaagatgatttaggacagggtcagctcatcagatgcgtccaggttactctaatatcctgcgatttaatttcatattcgttttgattcccccaaatcagcagcaccagcatggcaaaatcacacaagatcgcctttcacctgaatacaaatatttttggatcacacgagattcgatccattttcagtggtttcttggcctgttgctcagctatgttcttgtggtcaaaccatttttctgaacctgtcatcctccaggatcagtgccaggttctctgaatgtctcatgttgctctcctgttttttcagtcttcctgatctccatttggcttatctctaggcatccaccggatcacagcatgtgatggaaaaatattcccctaatcttgtcgacatttttgcaggattgattcagttttaactttagattttcgccgtattttgcgaaagactccaaatccagatgctcctattatgcaactttcaagagcttctggtatgtgctgcatgtacatacatgatagttactaggaagattcattttgcatttacaggtaatgtaaagatgaggctgggatgcctaggtgcagttatagcatggatcgtcacagaatcagctaattgaggctaaaaggagcatatcttgatgaattattgggatggcaatgcaggaatagcatcaatcaatgtggggaaacaagaggttttaatcacctgcattcctggattgcaaacaacacatacatggcctgccttttgctgacgagatatttaacatattatagacacaaggacccacatgttataaacgtattagtaacaaattgttaaacgtcacatctaaaagcggtaaatagttaaatacttaactgcccagttgttgacagtaggccggaaacatgatctgtaatgaacagtcttgatttggccatatagcagatactagtagctactagtaacatccacattctttatacatcttttcatgaaacagatgtgcacatcaactctggcatataggtccagctggaaccattccaagaatctggtgccatatgagtaatacagaagggctgtgtctagttcagcgcaaagtttggattttggttaaaactagttgggtggcccgcgcaattgcgcggctagcacccatataaaattatatatttttaatataatttta

SEQ ID NO: 9024 - DNA, 9589 bp, Oryza sativa
aattagttgaaatatgctattatccagagtacttttgggggtttatggattgtttcctcctactcaagagaggtaaacaaagtaacttcttcagtacagattttccagagatgccatttcttcttcatcattcctcctttgattacttcatgattgtttttacctgcttctcagcccatatcccttggaacattcacttccatgaaaattaccacctaaggaaaaaaaaacaaaatggtcagtaattgagaacttgctatattagttacctgaaagatagtaacacccagcaacacagatccatgtttcagtatacttgtggtataggagtagtatagtatagtatacccccacactgctttcaatttgtcagtactactactgtggtagtaacatctagccaaggaggatacaacggtccaatccaatcagatcaacaaacaacaacacattgatttctttggcctactaccatgctttcaacattctttcattttgtttcttcttggttaatgcttgaatttctagatgaaatggatggcacaagaccactcttgaggaatcctaagtttcctataaatcccttttataaatacttttttttagaaacaactgttttgtctcaacttaaaaaaaataaaatcaaaagcatattgcttgcaagaattcagaagatgttctaggtgaaattcttgcagattttattgcatttctctctcatgagtccttcattacaattaggtgaaaactaaagaggtgccatattaaatagagtgaatttattgcaaattaaattggttttcgatttgtcaaatttgctcgagacacctaaccaactaacccttattgtccaaatcaaaattccatctcgtgcgcaattagccctggccatagctttaattcgtcattagtaggcaaccagtgggggctccaaatggtcctagaatcatcacttttactttggatttgcttctgcctcttgcacattcccttattttgtagccttcttgagggtattaggtaggtgttttggcagattatctccccattgatcagctcccaattaatgccagatggtgacactgctaaagatggaagacaagcttgcgagaaaacagtggtagccttattatttcctctcacaagaattgtgcccacaacttgtcctgacatctgtgaatttgtctgtatgttgatagtaatagctggatgaatcatgggtgcttaacaatgctcttacttaccaatagtgtttatggtcggttggcccttgcaacctccaaagaaccaattggagcaattcagccttctcttttttttttctctctctgtcattttctgtgctttaactgttatctgaacgagtagttaactgtataatgtcaaaggaataatcttgcacaaatttagtaccaatgttgttgtagaggagcatgtataagctttatctgtggtactgtggtagtaagtaggatgtgtagagtgtgcaggtcacagttatggatcactgaacaaataaattaactcccctgcttttgacaccccaaactgaaacatataaatgctgcaatgaataaagcaactaactttacactatcacagccctagcttctgttctggccagtttcttgctccctccagacggtaatcactttactctgtatcaacatttgcatttaaactggttgtggttgactggttgtttgactagattagcacaactagaaaccatgccaagccattcctgatctgcagtgtgtcgtttctttcttctgaactgaagatttgatcttttctgtttgcaaagttcatgcttacacacttactacacttgaaatctgtaagataagtgctctacattgaactaaaaatacgtaaattttttgtacatgatctgatttctcatgtgcttgttttcctcttagctaatgacttttatcttttctgttgtagaaattagaatccatgctcatttaccattgtaagatgaaatcctacattgagccaaaaatctaactttcttttctttttgtttgtacatgacctcgtcctctatttggatgaagatttcacctttgctactaatagacgagccttgcaaacaggctaaagaaatgatcttttttttttatttgagtaaatttcagaaatctacaactatttgggtcaaaactatcaatttgctacacgtcatactcatgcatacatgccaagttcacacgcacgcacaactggttacagttgcagaacttgcagtttaatgataaaatcgtttgatatagttacaacagttttgcgaaatgttcgccttaatcttatagaaaagcgatacctttgaccaaataactacagctttctgaaatttactcctttatatatattttgcatcacgagaaacaattttaatcacttaggtggatatctactcatttgttgcatgtgaacaaaatgaatatgaaaaaaaaaataaaaagaataattaatacacgtatattcacagatgaatttgttttttttgttataacttgtatatttcatattaatctatctcgttaatttttttatattatttatttgacatgcaataaatggacgaacatccacccgagcgattacaatcctctccaccaacatacaagtttaaattcaacttctataaattgtaacaaaaataacaaatttaactccaataagtatatgcatattcacaaatgaatttattaattttgttataacttgtagaagtcgaatttaaaattgcatgtttgtggggtgatatatttcatattaatctatcttatcaacttttctgaattttttttcaataaacgggcgaacatccaaccgagcgattacaatcctctctcttggtagctaactaaagaagtgatcttcttcttcttcttcttcatcttgcatgacttctcacgacaatggcggcgcgcgggtgcaggagagcagcatgagtactcgcaccaccgagctgggatggtcggcgatggcgaacaccgatgcagccgccgccgatgagggagaggcagcggtggcggcctgaggaagacgccatcctcctcgcctacgtccgccagtatgggccccgggagtggagcctcgtgtcccagcggatgaaccgccccctccaccgcgacgccaagtcctgcctcgagcgctggaagaactacctccgcccggggatcaagaaaggttcgctcaccgacgacgagcagcgcctcgtcatccgcctccaggccaagcacggcaacaagtggaagaagatcgccgccgaggtccccggccggacggcgaagcggctgggcaagtggtgggaggtgttcaaggagaagcagcagcgggagctccgggatcgggatcgccggcgactcccgccgccgctggacggcgacgagcgcggctgcgccggcgggcgatacgactggctcctcgaggacttcgccgacaagctcgtcaacgaccaccaccgccgaatgatggctgccccgatcctcccgccgtggatgtcgtcgtcgccgtcgtcttcttcctcgccgtcggtgacgcttagcctcgcgtcggcggcggtggcgccggcgcctgcggcgccgccgccgacgtggggtggtggtggaggaggggaggtggtggtggcggagttgatggagtgttgcaggtgcttgaaatcttttgctccctacgtttttaaatatttaatactctttgatttttctaaaaaaaaatatttaaccgctcattttattttttaaaaaattaattattaattttgttcctatcatttcattcatttacttatatttattaaatatacttatatgtatactacatatagttttacatatttcacaaaaatttttaataaaacaaatatttaaacatataattaaaaagttaacggcgttaaatgggggatttcttcatctcattcgtcttctttgacccactatcatcgattggatctcctcttttatgtgtcgtcgcttgactcgcatctattgttgcagggagatggaggaagggcagagggcgtgggcggcgcacaggaaggaggcggcgtggaggatgaagagggtggagatgcagctggagacggagagggcgtgccggcggcgggaggcgacggaggagttcgaggcgaagatgagggcgctgagggaggagcaggcagctgcggtggagcgggtggaggcggagtaccgggagaagatggccggcctccgccgcgacgcggaggccaaggagcagaagatggcggagcagtgggcggccaagcacgcccgcctcgccaagttcctcgaccaggtcgccgcctgccgccgctggccgcccgtagagatcaacggcggcggcggcggcggccccggcggcggccggtgagccgccggacggtggcgctgcatgcatgcgtagttggacacctcgctttcttgcttcttcttctcgtgtcctttttacaactgttggaattcacttctctctagaaatatgtaatcttttgagtctcttttgatcattccaagtttcctactagtagctctattgaataataaatggaccaccaaattgcaaaccaaaatggttacaaaagaatatcttgagcagcagtagattgcaatggaaataagtttttttactctgtggttttgtgttgggatagtgcatgggccaaatgagtcgcatcacgatgaaatggttctgtaggatctttgaaacaaaatttctcgcaacaacactatctgcaacgaattcgaataagattcagtggaattgaaccagacgattgtttttaaagcgcctttggaatacaggaattttttggcatagttgaattctcgtgaaattccagcaaactttcttcattccaacgacggtcttatgtttatttttttacatgcacaagcatatcagggagtaataagcaagagaaaataacaacataagttacaaaatccattttctagttttaatataggtcataataaaacgagttacctgctaggcagggaaataaagaatgggacaaaacatcataatctagtatataggagtataatagaacaacttgaacatggtaaggtggtacccatcatcacaaatggtacgatgttaaatgatatcgactgctcattcccaacttgcgtgtggtcatcgcaaaccgtttccttttcagtcaaacaaacacatttacgcgccaacatcactcatgcaattatgcatacatctttcatcagggggggacctaactaaactagaccctacctagatatgaattatactctataatagaattgtagtagaaccctatcaggatatatgacgctacatagaattgtaaatttgaactagcctgagctggctgactgatctccagagaacacacttccactggacagtgccgctgatcctgactgggaagggcccaacccgcggttcctctggatctgcctaagcctgaatatgtcccgcggcattgctcggctctgcactgttgtcgacgtatcatcctcctcttgtgctcgcccccctgcacacaagttgatgattatcaggtcctatagttgatccaattgtatcatatatctgtaggtagatcataaaagtttgtctaggatagcttgaagataagagacggtactttcagagttcttccgcttcgtgggttgcccgtctcttggaggtctatggatggatccattctggttcaatcctgatttgccaggacctgagaggtcactcgtggcaggaccaggaacttgcgaacctggtttgtctcccactggcaatgtactctgcatcagcacgcttagcacaatatccatatctggtgatggccctatcaagatgaaaaaaacattgaccttagcgatacttcagcaacttaaattcaagatatcaaacagcaacaaaaagatcaggtactcaaagattatcagtaaacatatatgcagctgttcatgtcatgcaaatggaatcccagaacagtaaataaaggactaacaatatgctaatatacatatgaaaaaaacttttctgaaagaactgctgcgacttctaagtcatgtagtattttcaatcagttatgctatgcctgatgttgaacattgcaatctttaaactgtcaaacattccagcaaatacactacaggaaaaaggtatgcaacaggatctcatttaagctttgctcctaatgattccgataccatctggcacacaactaggaggctacagatcagaggacagtgagtacttgggtcatcggagtgcaagttcttagtttggataaagtggggacatggagccattctagttcatttcggtttttaattacatataccacatgaactagcaattgcagaaagttgtatttttagtttggataaagtggctcaatcctgaggcataccttcaatagcaggcaaatttgtgatgaaagacatcatctgtggagaaagtcttttcaatatttcatcaatctcctttgtatacccactggctgtggttgagaagtctgggcctgacaaaaataaacaatgatattttatgtgtgagaaaagttgacaattgtgtctgaatggaatggctggaagcatttgcagcccaaactatgaaaaaaaaaagttgtcaatcccatcaagtaacattatgcaattggcagattagatgttcatggtagcaattaaatgagataaccaagtgataataattttttgaccaagcattaggcagtgtaggctggcagctatacctaaacacagattacgagttgactcatgattatctgaaattctgcatactgcattattaggtgtcaatatctgatcaagacaaatgatacaagagtgggtactactatttcatcaccaagggaatctaggacaaatgtggaatatggaaatatttagaacactgatttgtatacctttcatctgtctaggatcatagataaccattcgagaaatctcaggacgaacaacctttgaagattgtgggaacgactttttattggaaccaactcggatatcacctttatcttagccaaacaaccagcaaacataattagcaactccagtagtatttacattgacatgatggcagacagaacaaaaaaaccttacctaaagtagcaccgccagttagcacaactgatttgtcacccctattagcaatgttttttgcaagccactgtggtattgacatcaagaaagcgttacaagtgagatttttcaatggaaatcaaactgttacaatgtaaaaacctgcatcagaaacattaagtagcaaaaaataaagcattttcaagtagactgaaatattaaggactgactcaagagagatatctcaaaattgcaacatgaaatagattccgactttctatttatgaatgttctcacaatctcgcacaagaactgccaagggatacatgagcatatccttttagataattacttggtatggtttatattaagtcctaagtccaacagccagtggcatcagagcagagacaagggaaagcaagagtaacgctaagccttgtacgtagatgcattaaaattgagcttgactgtgagttccaaatatgagcttgttacatttgcttcggatgaaatatgcaaggtagttgtatatttgagatagtgcaaacctcatgtcttgatagataatccaattctttggttgagcatggccaaagatccatatagctgtatcgagaaacaacgtcataaagtgtgttttccaaggcagataaggcgtcttcggatgtcctagataaagcctccttccttctttgttccacctgagaaaacataatttagagcaaggaatgagggaaaaaatatttttctccaaagtcaaattaaataaggctaaatatatataaagcatgcacatcctaatccaattgtgcatgagctgttattaggaaagcaggaaatacacaaattccattgcaacaagcacaatataaagtcattaaaggatcacaatacaataaattgggtgagatcaatacaaaaacagtcagaagattaaaaaaaattgtatgcccacaatgtggtttcaagattttacaatgtgtaattattgttccaaaactgaccaaaccaagcagcagcttagtatttctaccatacttgacattgtcttgccccgatactatgtaaaaggtttttaataagtgctgtaagttatgtcacagatggcaacttggcaagtccaaggcacaaccatggagcacataaattttaacacaagtatgcctttgcaaaatggattattctatcctgcaatggtaacatatatataagttttgcctagattcatacaattatgagcctcatacctttaacatgcttgacaaatccccgtatgtttgctcaaattgagcaaatcgtttccacacctacaagataatagcaacgtgcattactcagacaacataaaaaaaagtgtttatattcctttgccatggaagctaattacacctaactaattttaactgaactgcagtattcccctttgtcatggaagctaactgtaactaatgcacaaaagttattgcattttgcatctctctaaaacaaaaatccaagtatataacttaaaaggaggaaaaaaagggtcatacataagtgcaaatttgctactgcttaaaaggctccgatgcaatacttaccattctcagaaaatgtattgcaactcatgagttgtgatttatatcaattttgagaacctttcgctagagaatgaaatagaaactctacctctatagattcttcaggaggaagtaagctcagagctcgctcaaacaaagcacgcacatttctgtcgtcatttaagcgacacaggaagtctgcatatctgtatcattgcaccagtcccaacaacacaaactttgattcatatctcttaagtaaagcaaaaaaagtgcaagaaacctttcccaactgttaatttatgaagatagcataccaaaatgtcatatcaatgagcctggaagtgagaacttactcaaggatatatcctggctcatgcataaatcgctttaaaccagcttcaaaaacactttgggctacctggaacagaattgtagcagatgaactaatgcaaaaataaaaacagataaataacctaaaaaccatgtttgcattttttatattaaaaaacatcaagataattcctttcacaacctttgcatccttgtcaaggcaaaatgccattgtagcgtaagcaacatagacatgataagtgcagcctggcaatttccgagcatccagaaagtacttacgagctgcttcaatgccttcagttctccttagaaatcgaataaactacaacagaaaaccagaatgctaaagctctcacatacattacagcaataatctaagtatgccaaaagtaataacaagttagcaactcacctgaatatgtgcaagtgaagtcatcccgcattctcagctataagagactcatatattgctttagcaggctgcaatgcaattgaaggagtatttgagaaaagtagaaaacaaaatcatttttagcgtagctgtagctatccaaaaagggctgcaggaat

SEQ ID NO: 9025 - DNA, 15504 bp, Oryza sativa
gcccataacactagggcagatcgaagtctaaagagttaggagtaaatgctatactaatacatggaaatagcttacaaagatgccactcagataacactccagtttttacaatgcatagatagaagcccctctatccattcaaggcggaagcttgctgacagctttccaggtgactttcacagaaatggtagtgaaatcaccaagcttcaccacttcctctacagttccatgaaaaccagcaccaaatctgtgctcccaccttgtacaaggcagcttctcaccaagatcgatatccgctggagacccttcaatacagagatcaaggtgactacgtctcaccaccgccacaacagaactaattttgcgactagattgtgcaacacctcggaagagacggagcacatcgctgaagccactggttttggcatataacttcagattaaggccacaagcacgtgaatgtataatctcaacatcaactgttgcttgaactgcatttacaagcagaagaaacttcacacccaacccacacttctcaccatacagacggacagtttcggtgaatgatgttgatctcaaaatgttggtgaattcagtgcatccttcaatcaatgtgccacctttgggctcatcctcagcctcaggtgagtcttcagtccgaatacagagttggaattcaaacagtgcacggcttgtaatgcaaatacctcgagctgggctagtcaatggtaaacatgccataccctacaatgaggaacaccaagtattacatcatgtatttgagttattcttcagtaacatcacataccaccagtacatgtgtaagaatgcaatcaagaaaaatgctatgtacagtgacgatgttattttaagtcttactgttagattggattgtgctacatgcattgagagaaatatccaaacttacgaaaataattactaaatgtcaatatgccaaaacatgagtatggaagcaaacagtcacatgtttgcaaactaaattaccgtctttggtttcacagagacagcttcataattgtcaatcgcatgcctaaagacatagttgcgcagaggttccaagtcatcccgcaccgcaaaaaacccgaagattttggcacgtccaggctgggtatggcgatatccagagatttacagatcaatcaactggagcagattcatcgaatggcacctacacccatttaagcaatcaacggtccgagcgctgttgacattgactgcaaaattgatgactaaagaatgagaaatatgtgcaggtttacagtaatctatagatgatgatatgacaaaagaaagcaccagagaactcaaagaagttaatttaaagaaggcatttactttcagattcgtcatcgagtcggtaatcagaaccaaaccaatgcctgcgtttgtcagtgagaggatcgttgaaggcacggaaaagaatgagtggcaaagggccttgaaggcaaagatctggaaatctataccgcgcttcagtctgcgcagaatgatcactactaagccttggaaaatcatcaaccgtaaatgggcggtgcatccctacataaaaaaaatcatgggataattaaatcaactgaaacaatttcaaatgctctggagtttgatctaccaccatctatcatttgtatggaagctaaaattagacgcgtgacagaaaacatagcgatggaaatcgacaagtcaaaaagactatacactgaacgtacatgaatggttgcacactcatttctttctttgtgtgtgtgtgtgtgtgttattattaccaaagtttagtaggatcaggtacgaactaattcaagcaagatgttcttagtgatgttcgttgaagtgtcacccaatcaaagagcaaagcaccggttcctaaatcctaatccagatagtcaatcacaagctaaaagaaccaagtaaatagataagcaccttttttcccattatatttcagtctgaatcaaagaagggaacttataaaaaaagcaaggaggcactagcttaactcaatgatggactgccactgcactgtatgtaacattatattgcggcatgcagacattgaattgctaacatcctctaagtgtgtgagtgtaaccctgtggagaagaggaacacacactgcactgcgccgcaccttgatagttcatacaactacacattagtaactgtaggttgttagtcagatactcagatatttctcagctacgtacctaatgcacatcttctgtttctgaaacttgtactgttgtacagtacaatatggagtgagggcacatgccaacaagtgagcagcatttcagttattcagcaatagcagattcatagcatgagacaatcaaattcctgaaattactttcaaccagaatctctgtggcttatcatcaagaacaagcaaaaaaaaaaaagtaaaccaatatgcaaatcgcttagcacgttgttttctgcattacatatttcagtcggaatcaaagagggggaaaatttaaaaaccgaaaactgaacaagattacagaggctcgtcgaacgaaatattcaggagccattcagatagtaaaagaattatagtgatcatcctgtaccttcttgatcctcctcgccttcgtcttcgtcttcctcctcctcctcgtcgctgaccgcgcagctgtcgtcggagtcctccccgtcgtcgctcggagtcggaggagttgagggggaaggcggtctcttcttcccgcggccggggtcagccatcgccgccgccgccgactcgtctccgcctccatcgacctccatttctcctcaacaccgcctccgcctccgcctccgccgccgccaccgccgccaccgccggcgatctctcccacaaaccctagcaagaggaaaatcgaggacgctcgctagcgtcctcgattttgcaagtgggggccacatcgctgccgagtggggcccacggcatggcgttcgtttcactgacaggtgggtcctgggtcctgggtcgcttcttcttccgaactccggaaggggaagggccacgtgtcgattttgcaaggcactagcgcccaactgcagaccgtagtattggagtacatctgtgatctgtacatacaagcatttcttatctttgaaaaaacaaacattttataaagcctctttgtacggaaaaattttagacgaatttcgtaaaatttgaagaaactataaagttatttgcatgaccgaacaaattgtccaggaacttgcaatgcaatgcctaacagaacatacaagcattggatgctaagttaaatccatgtatgatatttcttcgatttgcattatttccttcaatttatcttccttctaaattctccatcaatgtatgacattttttaaagaataatgtattgtatgatatttctgcgttgtcaggctttgcctgcatacaccaaccaaaattcttccgaaacacaaggatctcttttgataaacttcatatttcacaaggcagcgaaaaatataatttttttaataataaaacagaaaaactacagcatggtgtctcatctaggggagcgagaacgggataaaatgagtagtgctccttatccactagacacgctcctcttccgcccatcgctctccgcctagcattgccaccctcttccttgtgtgcttctcctcctcctccctcccctcttcctccttgtccgagccagcttggaaatggatcatcgctccttcttcccttcactggtcgtctggtccctgctcattcacatgtgctccactcttggttgctgctccgtgccactcatcagtgaatcaggaagcgggctgctaacaccgaatctaaaggtctatggccttaccatcaccggatccaacccaagcgcatgttggcgacgagggcaacggatgggattggttccatgacatcctccttcgtatcatgcttgcagcatggcgacgcccactagatccggttcccatgccgatacgggaacaactaggaaaaaatgaggtcaggaaggacgccaaccgtcacgagctctgctgatacccatagattttagacttgatatatattgtatcatgggtactagacctgatactcataatacttcctccgtcccacaatacttatttttctagcattcaaaagttatcccaaaatggttatcacttggaagtactacttattacaccaaccaattctaattcaaatttcttcccattatacccccaaccaccatctcacatccaactatacattagttactaaggggtattatagtatttttttctcttaaccttagtacatactaaacaacctagaatgacatatattttgggatggaggtagcgtatcaggcctgttattcctaagggtaccatgtagatactagctaatacctatagctactagctgatttttgtattttagataatgatagctactagctgatacgagcacatggtactccctccatcccctaatataagggattttgatattttacttgcactgtttgaccactcgtcttattcaaaaaatttggacaaatataaaaaacgaaacattatttttaaaatactttggataataaagtaaatcacaaataaaataaataataattctaaaattttttgaataagatgaatggttaaacagtgtaagtaaaatgtcaaaatctcttatattaagggacgcatggagtataagtatcaaatggtaaagtgcagggaaaggacacgtggcaccgctaattggccgaccggcgaaccatctgccgccagcgcctcctctcctcggctccaacttttccttccctcgtgtttgctacaagcatcaccctgctactgctatggccaacgttgccagtttgccacctatgtcagtgcctcccagcagctgatgcctcctgctagcgtcgttctgctcaaggtgcggagcacaagcacgcagcgtaggacatgatggaggggcagatcgactcacgagtatgaagtggagacgtggataatgttagcgcaattagttaatttgtgtagatgagcaaagttaccctgatgggacccacccctcctgcacataaaatagagtgactttttaacacatgattaattacgtattagctaatttctttttaaaaatgaattaatttgatttttttaagcaactttcgtatagacaatttttaccaaaaaaacacaccgtttagtagtttgaaaagcatgcgtgcgaaaaacaagggagaaaggttgggaacatggggttgcaaacacagcctcaagcatcatgctaatacagtatgttgcattctttgtgatggcacttagggcaagtactgtaaccgcttcatgttccccctaaatttaccacataggattaggtgatgagttggagaaaagttaggagagagagaatgagccacccctcatgcaaggggcaacctccacacaatctccaagaaaaatataagatgatgtgagagcaggtacaatagcaggctataagccagctgcaaacatattttaaggagataaatcaggagagagaagagcagcgggctacagatttgtagccagctgtagcacggacttcaagacgcagtgtgtctatgacaggtgagactaggtattaatagtgtagtatgtaactattgtatgaatgagctattagattggctataaatgaattagagctagtagttggctatactattgaacttgctctgagaagatgacatggtttaaattagatgtgtcactcacctccactttaaaacttgcccttacagactcttcaccttttttagccagccggtggtgagtctctgccactctgattggcccgagacttttcactgcacatttctctgcagttctgcatgcatgactgaacattgaacaaactgttcaggaacttgcaatgcaattccacgcctgatggaaacctacaggcattgggtaccaaattaaagctatgttttgtaccaaactgcaaatcaacgtgcattcttcagaaacacaacggcggtctcttcacaaggcagcaagaatgtcatctactttacaacgtttcattcagaaaccataaaaattctatcagtctttcacaaagacattgtcactgtttacatttcagtatggatggatcaaacagctaatggaagttttttctttccacacaaattggctactatctacaaaaggaaccatatcatcagtaaacagataaatctgttagtcggctgcgagcagcagggtccaaagttctattgacagatccatggccaccctaagagatcactagccttgctaacatatacgtttcaaaaagttctacattactctgacaaatttgtccctgacacttaggcagctcgaagtcaagcatgttaagagtataactctataggtgtcgagatagcgcacaaaaagatgccaaacacataacatcttccaatttttacattgcatatagaagctcctctatcccttcggcggcggatgcttgtcgacagctttccatgtaactttcacagaaattgtggtaaaatcaccaagcttcaccacttcatctgcagttctatgaaaaccagcaccaaatttgtgctcccaccttacacagggcagcttctcaccaagaccgatatctgctggagacccttcgatacaaagatcaaggtgactacgtcgtaccaccgccacaagagatctaattctgcgaccagattgtgcaacacctcggaagagacggatcacatcgctgaagccactggttttggcatataacttcaaattaaggccacaagcaggtgaatgtataatctcaacatcaactgttgcttgaactgcatttaccagcagagcaaacttcacatccaatccacacttctcaccatacagacgaacagttttggtgaatgatgctgatcttaaaatgttggtgaattcagtgcatctttcaatcaatgtttcacctatgggctcatcctcagcctcaggtgagtcttcagtccgaatacagagttggaattcaaacagtgcacggcttgtaatgcaaatacctcgagcagggctagtcaatggtaaacatgccataccctacaatgaggaacacaaagtattacgtcatgtatttgagttattcttcagtaacatcacataccaccagtaaatgtgtaataatgcaatcaagagaagtgctattgacaatgaggatgttactttaagttttactattagattgttactgtgtacagtgatgatgcaatcaagagaaatatccaaacttacaaaaataatgactaaatgtcaaacatgccaaaagataagtatggaagtaaaaagaaccaaaccaatgcatgcgtttgtcagtgagaggatcattgaatgcacggaaaagactgagtggtgaagggcctcgaagacgaagatgtggaatatcatagagtgcatcagtctgcacagaatggtcactactaagccttggaaaatcatcaacagtaaatgggcggtgcatccctatacaaaaaaatcataggaaaatcaatcaactgaaacaatttccatggctctgtagtttgatctaccaccatctatcatatgtatgcaagctaaaattagacgcttgacagaaaacatagcgatggaagttgattaagtcaaaaagtctgtaattatgtatactgaatatagaataaaaggttgcattttttttcctttttgcattttatattattgccaaagttcattacaagtaggattaggtaggaactaattcaagcaagatattcttagtgatgttccttccaatgtcacccaatcaaagagcaagaactgaatcctaaatcctaatccaagttgtcaatcacaagctaaaagtattaaggaaactgatgagcaccttttttttttcaattgtatttcagtctgaatcaaagaggggaatgggaacttataaaaagcaaggaggcactagattaactgaatggtggactgccactgcactgcattgaacattatattgcggcatgtagcattgaatcgctaacattctcaaagtgtgtaactgtaactctgtagagaaaaggaacacactctgcactgcactgcaacttgattgccgccttgatagttcgatacaagtacatattagtaactgcaagttgttattgccaggttttttctcagccatgtacctaatgaagtaaatgatcctcttctgtttctgcaacttgtacagtatggagtgagggcacatgtgaagcaacatttcagttatccagcagtatcagacttgcagtatgctatttcctctctctctctctttttttctttttttagtttggcttatcataagacaatcaaattcctgaaattacttctaaccagaatatatgttacttatcatcaaataaatagattagcacgttgttttttttatctgaaattttcgccgtgctcggcatttcggtctgaatcaaacaaggggaacatatatgaaaccgaaaaactgaataagattaacgactcgtgaaacaaaatattcaggaatcattcatcattcagatagaagaagatttagaactcatcctgtaccttcctgctcctcctcgtcgtcgtattcctcctcctcctcctcgctgccgctgtcgctcaccgcccagccgtcgtcggagtcctccccgtcgtcgctcggagtcggagttgagggggaaggcggcctcttcctgccgcggccggggtcagtgctcgtcgccgccgccgccgccgccgctgactcgtctccgcttccgtcgatctccatttctcctcaactccgccgcggcgctctcccgcaaaccctagcgagaggaggaatcgaggaaggcgatggccgccgcagaaacggcggcagtagaccacgcgcggcgaggtggggaccacatcgctgccgcgtggggcccacggcatggcattgacgggtgggtccaggagtagtggacttctgaattcggaggaggagagccacgtgtcgacttggcaaggcactagcgcttataaagtgcgaatcctacatgaacatttcagatgaatttcgtgcaaactgagcaaactgcagggttatttgtgcgggtgagcaaactgtccgggaacttgcaatacaatgcctaaaagtaattacagacataacatacacaaacacatttcttgtgcctccttgagatggagaaatttagtggaaaaaattgaacagactactgtactgtaggtactgtagagaatttgatttagaaaccatggaatgtattagtctttcaaagagacacttgtcacagtttacatttctgtatggatggctcaaacagctaacgtaagctatttaattctttccacacaaattaacaactatctaccacaggatggccactgaaaaggcacatcgctctctttctcagaaaaaaagaaagaacaaacatcatcactaaacgaataaatttgttactaggcaaggcgacctcttgatgcatcagccagcccgacccgtttaggcccgtagctctaagagatcgatcactagtcccgccagcagacgagcatggtgacgcagcgacgcatgatgtagaacctggccctttgctccttcaccaggctcgccagccgccctggcacagaccgggatgggcctctcgaagcccggccctcctccaaccttcggctgcccttcttggtgagcttccacttgtcatccatgcacatctccatctctctctaacacaccctttgcagcttctctctctaaaaatgtataggttgagcagactggtgcctctttcttctggttgtggctggagattttggggaagaaggtttggtatgcaatgaggcatgggtgggggtatttatagtgcacagttgccaatcaatccaagtgatatgtttatgctaatgtatgtgattatgcattggatttggagggagattgattagctagttaattaaagtaggacttggtttagtttatattgtttggtggggcatctctttccatgtctgaaataatttatgggaccatgtcccctggggcaatggccatgggacactccctttcggctctgctcatgtcattgtggtgcaaaatattcataattgatatggatctctgtattttaccttggtttgtactgttgcacaatgctaggatctctgtattttacattggtttgtattaattgcatgaagcattcgaattctactgagctgctgctaattgatattgggtgttagtttttttttttgaaaaaaaaaagattgctatgtgattgtaaatgttgtgctgtaggtggatattttaggaaaattgattcttctcagtcctttttttcctagaaaaatgtttggtttctaaagaagttttttttggttaaaatcaagcaggttcaattttaagaacaatattctaactgatctagggtgttgattccgtaaaaaaaaatctatgtaatagtagaagttgtattacaggtggattcttttaggacaacttgattcttctcaggcatttttttccctataaaaattctgcgttagtaagaatttctttttaaaaaccatatgtattccaaagcaggttcatttttgtggaaaaattaatccgtttacgataatctaatgcaggatgctctcctctagagagtgagagaaaaaagttcacattctactgcatcttgtctacatatatacgtgtgtatatacgagtacaaatgtacaatgcacacatacgtacacgtgtgcccacgtgggagcacctacgtggtggggcccatgtggcagggggtggtcagtctcggcgacaagccgccgtccaccggccggcatcgcgtcgccggagagagagagagagggcgcgcgcagatgcggccacacagcgtcgcgcccacagaagcgacgggtgggcgcggcgcacgcacgcgcggccaccaccaccacccacggagcccacggatcttctgcgcccggccagccggcctcatccgagcaccacagcaaattcgtctccgccgctgcattctattccatccatccgttctagaataaaccaacttcgtattagtaaatgttatgaggttaatttattttaaaacgaaataaaccaacttagtattaataatttttttccttccatttgcctcaaaataattaagtttacttttgagaaattattacatcagattttgtgaaaatgaagaataattgtattaggagtagataaagtgagaaatagctgcatcgagatttgataaaataggagtatttagtcttttttttattgctacgtatgagattcttaacttcgtcttcttcgtttttcgtgcgtatatttttcaaaactactaaataatatgtatttcataaaaaatactttaaactattaaagtgatatattttctaaatcttagttaattatgtattaatttactgctctgtttgcgtgcggatgaggaagggtttcaaaccttctcaaaaggggacagccagcattcggatttcagagcatggcactgtctctctgtgatcttggactggatgaatgcatgcatccggcagtgaggctgattgctcaccaatccgtcatgggattttctttttagaactcatggcaggagtcaaagactaatttttgagatatataacatctctcctatccctatctctttccctaccctacatcattattgtcataacaaaaatgagaaggaagattgggatcgcaggacaacggacagccttcgcgctgcccatgccctcgtgtcttctgtcataatccgtcacacggtaatatgatagggacatgctcctgtgagctcacacgtactaatgatggcactcttttgtacgtctgaattttacctggattctatgggaatttttaacggagacaattaattttatttcaacggtttaattgacagattcaagtttttttaaaacggggcgtgatttagtgcttttttataagtaattagttgtccatgttgtttctcctttcattttcaactagtgttggatcacgcatttgtttggaactttatattgccatttgttggagaaacagggggaaatttaagtgttcagattcatgtgcaccaacacattgtagcacacaaagcccacatggctcctactggaccagacagcacatttatgtttgcacacgctgcatcaggacaagccatgcacaggcaatggtcaattaggctgcaatttgacctaattaagttcatgtccgttgatctaactacattgatgatataaatctctacacattggtgtaaccatatgtccatatggcaaatctgaatagttttctgaaaaaaaaaaacaagatttggagagagagacgtcactccaaacatttttttaagaaattatgagcgtgttagggattgaatacgagacctcagggtaaaacaacacaaccattacctttgtactattaagtatatctcgaaatagttttatgaacataacaactccaagtgttgtgccggatatttctttttggggaaggtttttttagggatttaataatcagttttatagatttttatatgcatgaatttataacacgacaattatttaagaatgtaaaaaaagtactacctccgtcacaaaataagtgcagccgtggaactccgtgtccaacgtttgaccgtccgtcttatttgaaaaatttataattttttttaaaaaatagtcacacataaagtactattcatgttttatcatctaataacaataaaaatagtaatcataaaaaaattttaaataagacgaatggtcaaacattggagatgaatagtgcaaaactgtatttattttgggacggagggagtaataggcagcaatttgtgccgcaaacaaacaagaaatcaaacggttagaagatgccaatcaacaaaagcaaagctcatccactgctctggcttcactgtctgccatgtgattatcagataagcttagatttagctaccttaattagtttattatcacaaaaccactatcagctaacttttcgccacatgatcatcagtcactaggggatagtgagcacaaaccagcaatgccactgacactaatcattatttgaccggtcaacagcgcatgccgtcacgacacgtgtcctgatcacgacagtggatacatcatgccggccatgcttatggcggttaagtggatagatattcagctcaatcttgatcatcatttttgccgacatgaagccgaaagatacacacatattatactctacatggaaaaatccatatatgcagagacaatcagacaagatagagtgaacagtgatcaacatgagatatatatgatggtgatgaatcatgcttttagcccttttgtggtgtaattaatctgaaacccatcatgcatcagcatgtgagccaagtagatgcatatgtgattgtcaagtatgcaacaagtgaagccatgtgcatgcagagagacagattcttataatctctccatgacacatgatgagctctggatatttattggttgcaaatgggtccaaattagggttcaaaaccagcctgaaatcaggccaaatttatgaatgtacatgcatggatggaataattagtggtggcaggagactgatttgcagcctaaatggtggatttgggagagaatttagcaggccagatctggtcatgagaggggacaaagtgaccaactgtctagttgtccatttgcccccaaagcttaattttgcatcacatgtgcagtggttgatggcttgatgcagtgtttagattctgcacgaggatgatcgtcctttggcaggaccaaatccgattggccgtgtgtctcgcaaggacgatgtgatggctcaacggttaagacattttcgtccccttgctagcagtgacattttcgtcacacgaccttgagtaaattattcaattttaactattttgtgttatattaattagtatattactccctccgtccttaaatgtttgatgccattaacttttttaaacatgtttgaccgttcgtcttattcaaaaacttttgtaaaatatgtaaaattatatatctacataaaagtatatttaacaatgaatcaaatgataggaaaaaatttaataattacttaaattttttgaataagacgaacggtcaaacctatttaaaaaagtcaatggcgtcaaacatttagagacggaaggagtagttaataattagatagtatggaggaattaattatatataggacccccagtaatttttcttctgatcgagttcatcacttcttgctatgttatataacttgactctccctcttaattaggagatgtctatgttggagattgtttggtttgaggaaagatttaggtccgatctaaaaatccatgagttcaagaaagaaaaactgtaaaaccttaaagcatattaattgtcagaaaaaccacaggacccacaaaagaaaagggaaaaccacacaaattgctactggagggaaacaacaactcatacaaaatgtgggaaactcaaaagaaatataagaaggggaaataaaggacataaggaaacaagcaaagaagcccatctgggcccaaactactagtaaccagactattgatcaaattgggcccaaagttcattgtggcctgtgatcaaattgagtccaaactactaatcaccgatctagtggaacccagaatgggtttctaagttgggaataagttcactttgagtccctcaaatatagctccaatctaattcatgtccctcaaccgtaataccaaatatgttgaccacttgaacccccacaactattgaaaccggtgcaaaaaaataacccccttggtgcttttgtgagtggttttcactgatgtggcgcattgacttatttgactggctgactcaatgtgtgggaccaacatgtcattgcctccatcttttttttcctcctctttcttttctctctctcctcccttctccttctcttcctggtgcggtgcaggtgacataggtcggcgtcggtggcggagcacgagtgtagagtgagatgctcatgggcgcggcgatggtagcacaggcgctgcggcgggagctaggcgacggcggaggacacgggaacgcgagaacaccgtcgcctcgacgtcggcgcggcggaccccggcccgagcctcctgtccctgccaccggcttccccaacctccacgcgcgaggctgctacgggcgcggtcggcgacaagctagtccaaaaagaagaagaaagaagaaggggttcgtgactttcgtagtggacggtggtcggggaaggggcccgcagtgtcggaggtggaggaggggccgtcgtcgccggcgatcggcaatgccgaggaaggagtagggggtgttagggagctagccgggggaagaagccacgcgtgaggaggctgagctccaaccgctgctccgtcttaggttgcgtcgtcgcttcgcctggtcaccgtcggcgtcggggaggatggagggagg

SEQ ID NO: 9026 - DNA, 14191 bp, Oryza sativa
ttcttgcacaggagaaagagagaggagagagatgcacttacaccgactcctagtgctctgatggagtgaaactgtgaaagaaaggtttccagtcccagtgccatctcatggactatacacagctgtccaaaattgggacccacatgtcctggactgtatgtgggccccacacatcacgggctcatgcagaagttacctgcagtgaagctctgggggggaggctttcagtttcagtacagacagtttcagtcaggaggttcagtcactgatttggtggggtcagagtgttggtgggcccaacagccagtgacagtaaaagggaagcggttggttctgatgtggaactagcctgtgggtcccagttgtcatacgtggatgaactgcaattatccacatatgacttctgctttttgctcatcagaaagttcaacaccgttcagcatacggttgtcgtgatctgcaactcatacagtcatactactacctgtggcctacaagtgtcctgcacaatcatagtcgtagcaagcatgaatccaatatgttattgagggcattgaaatgtttgttttcgaagatagtagcaaacaaaaagagaagacaatgacattttatacattgggtacagattaatacccaattaataccaccaatgctactctaatagggcaatgtatagggcaacgtatcctatccacacgctacctctaatgcacttatgcactcagtcattgtaggccctccgattccaatccaacggatacaaactgaggttggcatatttttgcacgaaaccgcccacacccctccacctaaatttagaggtaacacctcacttggctttcctcttctcttattcaacatttttcccaaatcgatcaccaatctccaccatgctgtaggaatggatgccggcggcatctcgaatcacccacacagaggcacgcagggcctcgccggtggtgcctgcgtcatggacaccggcgaatgcgtgtctatccaggcacagttggatgttgatctagccaagctcaattaggcatcacggcctggctggcctccaagcagcgaccttgccgaggagcaaggcagtttccaatcgattaaaaaacgagaagagacatcgagagattgaccaggccacaattcatttccagtatcgtctagagcgttagcatcatctgaataataccaatatattttacacccgatgctattggcatccgagaaaaaaacaaagtgcattcagttaaaagcaaaggtaaaaacacaagtcatggattcatcctagttaatcatccttgacacaatcaaacactgtgtgctaagttgctaacgacctggaaagcaataccctgagcgtgtggcatgccgtcagcgtgaccctcgccgttgtgaagacgatcaccacaagagtcctatagatggcaaaaccagcccgcgagccgataacaaccagcagctgcgagagatagcgtctggaaagggcacagaacggccattgcttgcccgctcgcctcctacaacaggaggtagtgcgtgccctccggcgtgggctgcatctccagatgctcgtcgcgccccccttcctacatcatgctgaggattggggatcgatttaggaagaaggttgaacaagagaaggtgagagccaagtgaggggttacatgtaaatttaggtggagggacatgggttgttttctgcaaaaatgcaccatctcgatttgtatccgtcggattggaatcagatggtctagggtggcggagtgcattagaggtagtgtgtgcataggatacgttgcccaaattatagttgtgcaaagacagactcttctagcatgagatgtgcacctacttcagctcaaaacattttgctgaaactgatttctcaaaaggtctggccgctaataatagttcatgacaagattcatccatgtatagtttaattacctatcttagagtgccatctagttcctcctaccaccacgtcctcttttcctgcatatacacaggcatatttctttaaaagaaaaattgtgaaaaatctacgcttcaacattggggaatcaggggttttctctctttattcaacaatgatgagagagagaaagagagtgagtttgtgtcctgctttttttaatatatatatatatatatatatatatatatatatatatatatatatatatatatatatatatatatatatatatgaaagttgttttaaaaaattatattaatttatttattaaaatttaaataattaatactttttctctccatttaatattataagtcgtttgtcagtggccacgctgatatgtgggtctcatgctgactcatccgccacgtcagataaaaccggggtcaaaaccaccgaatgatctaaagtgaacggttttattagttgagggacacccggtatttctgtggttaggggacgattttgtaactcgatgataagttgagggaccttcagtatactttttcctttattctcttctcaaaccagtgtacacaccagtgtacgctgtgcagcccaaacatatgggccgcaaggaggaggaggagggaatcccactccgggccaaccgtaatggcccacaattacgacggagccccaactacatgggcctcaaagaggcccatgtaatcgaaagcccataaggcccacccacttctctattactatctccctcgcgtccggccgcggagacctcccgcatccccccaccgatttcgtcccctccggcggcggcggcggcggcggcgcacggcttctccgggagctctacgcggtaactctcgccgcgctctcgctctctctctccaccccatcctctattcacgcttgttcccgtgcgtgttcgtgtggtggtcatgcggtttccgcttgtcgccgcaaaccctagattcagaggtggctcggatgggtcgcatgattggctcgcgttgattcgggtagcttgacctaattggttatttagtggtaaatatgtgaattgactgaattcctttggtttggggatgctggttggtggttatttattcgtacgcacaggtttaagggttagatttatatataacttagatgtggagaacgtatagcttcgtttgttgacgttctgtacgtgggttagttttggagtgcatgagaaacttgcgttagagatttccgttgggaggggaatattttttttatctaatatatcgatcattctcttactcctagatatattgtattgttttttcctatggataaagtagtacgggaatgtcatggcatgaaaatcgtgtttggcaatttggcatgctactactatgattgtaaactttggttagttttgcaatgcatgaggaacttgctttacgcatatctgatgacctgaatgtatataaactgtgcggtgtgttaaagtaagattttaattgacgtagttttttttttctggacttgaaaagctctgcaatgtagtcttatgcttgcaatagttggcccaacatattttctgattatatttccgcttttctctttgactctacacttaacactttcaagggcagtaattttctaaatcttgtgcctatacgctaattgattcgctaatttctctcattttgttccatccgtcttctttctgttaacattttctgttatgtgcttcagacaaaacaatgaggaggtacagcccaccatatcgcagtccccctaggaggggctatggtggcagaggaagaagtccccctaggaggggatatggaggacggagggagcagggttctggaagtctcttggtccgcaacatcccattaagctgcaggtagtgaaaattgataactatgcaaaattggcatgtcgattccattttgatgactgtgttcttcatgaaagagacaaatgtttcaattcacaagttacacacttaattcaatttcattgattaccttaactgtggcagaggggaggatcttcgagttccttttgaaaggtttggtcctgttcgggatgtttacctgccaaaggattattacagcgggtaaggcattactgaacaattatattaacataatttggtttgttagttgtcaattgctgaacaacatttatcttctttactctagcgtagtaaatgtagattgtctatatttgtctgtgctgttggcctgtcgttgaaatgattttagaagctgttctgatgttatgcagtaaaccacaaatataaccatttttttcatgacgggaactctcagcaaacatcttccagctttagtgtgttgtcgaattcgtcagtcacctttgtgcatttctgctcaaatagaatgctttaatcatttttttttgggtctggtgatctagttaatagatttattgttgtctcaagacatgtaatgcactccttgccctgagtttttcccctgaaattattcccagggtcatgttggattgaagtaaatacaatgttgaaggataccttttaatattcctaacaattcatttgtttggcaagataaagtcttttccgtacgaagttcttctatgaagacaagatttgtttcattgagaaaattagtttcacgaagagaagataagagagttgtactgggtggtccatgagaagataaatatgaagtgaagtttatttgaagtactatcatgacttctcaaacatttggaaacttgaagcgaatgattttgtgaagatactctttatgaggatcaccatgcgtagtgttacacaagaaattcagatactagagcctggacatctaactgcttttgcatcgagaatcatagaggacatattgagttttgaactgtaatggtaacatgacagacacaatgctatacatgagcactttacaccctcgttatggttaggttttttcatcaatctgctttaaactaccttttctaatataatcaacatttacagggaaccacggggatttgcatttgtggagttcgttgacccttatgatgcctctgaggctcaatatcacatgaatcgccaggtgtttttcggccgggagataactgttgttcttgctgctgagtcgcggaaaaggccagaggaaatgcgcagtagagctagagtcaggtactttattcccattattgttttgaatgtccagccttatcttctgtcatgtgctcgtttagtcgtttgcattaacgttatgtcattgtgtgcttgatttgcaggggttactctggaaacgaagggcgccgctcttcatattatggtatttttagcattagtcattatttgtgataaggcctttcaaaatgcatatctataaatctatgccttttttaactgtactgaggaaatatgctctcgtcttatcacaacaaaattccttcagtttttctcgagtttcttctgaaaagttctgtttgctaattccttttgttgccacaccaaaattactgataggctttattgtttcatacagggaggtctcgttcccgttctcgctctccccactatcgaggtcgtccacggtcaaggtagatgaataatgtccatatatcaatcctcaagccattcaccttgtactcatgaatccggtcgcttttaaaaggtcatactctcctgctccaagacggcgagatgactactcagcttccccaccgagaaaggatacgcaccccacaaaatctcctaggcgtcagccaaaagaacatgatgaagagaagaagcggagatcctactctcctgccagtagagatggcgaccctcgcgatgctgataacggttatgagaagtaagcatagtatttcatacttccatcactttttccttaaatgcaatatttgttttcattattgcaatagggccatttacacaccaatctggtgttttacgagtagtaaccttctgtagacttgtaaagtatgatgaatatgaaaggatgtgggccttagggtcacttgaactatgggcagcattttaatctttgctgcatactcacgacagattttgttagtcttattctgtattaattaacaggaatacatagagtgaaagtgctaactatggtttatgttcttcacaggaggtcgcccccacctgacagcgatggatcccctccacaccggaggtctcctaggcactcctcagggtcgcctccaggatcccgctctaggtccgccgatgtttcccctgcccgcagcgactgacagaactttgaaccaacgaaatgggatagctgcatgatctccacagcacctccaattctagtcagtctccatcttccttcctggtccaaccaagctgtttcaattaaaccgaagccctaagcggcgtgttgtattattgctaagtgtgcttgccatgagtttggtatggcacatcgcctgtttgtgtgctcatatgttgggagtccaggatgttgtagtcttttgagagctgctttgtttggtggtcatttgctttttgctgaacattaacttgaaacaatgtgacattggtgttgtgtactaccactagtgagccttgaactgggtaaccgcctatttccacatctatctatgcttgtgagtgcttagcccaggggcccatgctgccatgccaatattgccatcgactttgtttgggaaaaagcttttgattggatctaccactgactgggccagcagtacactacactgcctctcttttcttcctcacactgcaacgattggattggacttgtgaatgcagcagcatcatgctgctgctgcaaacgcaatcccttttaatcatggagcaattgttgggttgcaggtgatcgatccatggcgtgcattgcttccatggttgttgtcaatgtttgcaatttactccctaaatgtttgacattgttgactttttagcacatgtttgatcgttcgtcttattcaaaaacttttgtgaaatatataaaattatatgtctatataaaaatatatttaacaatgaaacaaatgataggaaaagaattaataattacttaatttttttttgaataagacgaacggtcaaacatgtgctaaaaagttaacgaccgtcaaacatttcaaaacggagggagtatttatttatttatttttactttcatgatgcagcagtgaaaggcaggggttggtaggatgtgtcacgcagaaagtgtactgctttttgtgcgtggttgggtttgtgttgtgttgcttgattgcaggcactgcagatacgtgggctttgttgtggtggccggcctgaaaagttgacaaatctgtctatctgtccgctgctgactgctgtctcatctttcggctgagaattaaaagtggcaacggttcatcgccctgacgaccatcgttgatcgatccatcatgcaacaggatatatatactgcatgagtactggtactcgtagagtcgtagtgtatttctcggagtagcagcatagcatactcattagcatgctgggtaacgattaatctaggagctgtccgatggcaatgatcgggtgtatcagacccaccaacccccccccccccctaaaaaaaactgttgcatctaaaatttgcagaccttttcttttattttttatggatctcacgaaatgtactagattcaatcaaattttatattcaaatattctaaaattttacaaaattcagtcctatcggttttctccgatagaaatagcctaaccaatactacattaaaccttggtctacaccgatcataatcaagtagcctttccctcgaggacgcaaatcacacggttataggttttttttccctcaacccacacctagggtttaacttttcggcttgaccgattgtatcggaggtcaccggtagaccgaaaattaggaatttttgaataaatattactaaaattcacgaaaagttaaaactttttaaatattttggccaaaataatatcgtaacggaggggtccaaaatgactgaaatttcagaaatcaaagtccgaaatttccaaccttgcccacacctactccctccgtaaaaaaaaaacctaaccaatgacttgatataacataggacaacgaacatgtccagtcctatattatatcatatccttgtctatgttgtttttttttatgaaaggagtaggtgggtaaaatacactcgatgggtgacctagaccatgcaaatagaaacaactggataaagtatagcacatatgaacaatcaatagtttaagttaacaaaaataaagagcacacacatatatataaattgaagtgcaaatttaaccattatagtgtatccaattccacaagttcaccacttaatttaaaaggtgtataaactattctagattctactttatactaatgcatgttcatgcttcatacaaccaatagtatgtatatgtgaccattcaattgttgtcgctacatgagaaagacttctctttatctcatttctttaaccttattggttcatcatccttaataagctcctattgtatgaggaccctaactcatttctttgaaaatggtgtatccaattccattatagtgtatccaattccacaagttcaccacttaatttaaaaggtgtataaactattctagattctactttatactaatgcatgttcatgcttcatacaaccaataggactgtggagaacaaaaggccattgccatttgccagtttgtcacataacaatttacaacatgtcataatatatattcccttctatatcttttgtatgacattgacgaattcaattttgaacaaaccaacgtcataatttaaagggagaaggtactgtatgctatccatttaggatatgggtgtgactattgcgaaaccataccactgataccaacgcacatttctcaccacttaagtgttgtttttattctcgttgaaggtgcatccacaggtggatgaattgacctatcattatctaaggttttgttcgattaaaccctatctcaaggggatttgaaggatattgattatacacttctcactatcccctccaatctattactcctatgaaggctttgttcggaggcacttgctacggctgcggcaattcaaatcggctgtcagttgcaaccattcacaactgctgcaggctacggtagctagtctagctaaacgcagccgaattaaccaaacaaactctaatatggttaagggtttgggtttgtctccattttgatcatttttgaagaagttcacgtagtagtagtacaatactaaggctgtgtttagatccaaagtttagatccaaacttcagtcattttccatcacatcaacctgttatacacacaactttttagtcacatcatctccaatttcaaccaaaatctaaattttgtgctgaactaaacacagcctaaaatgaggaaaaaaaaggatttgaattttttcaccctccgaggggagacgcgtccggtttacccggggagggaagaagatgcagaggcgcagagcaccaatgcatatgcagcagctgcaggcggcagcagcgaccacttgtgacctgcactactacacgtcctccctcctcctccttcctctgctggcttcttgctgatttggtgtgatctcttctgatacgcatcaacacgagaagcatcgaatcgagtgtacatgtacagtagtcgacagtactactacagtatggacattcagccagctgcatcgatctgcgccgttggatcgacacgacgtgcggcccggatgcatctgtcggtcgtggactgtagcaaaccacagccagtgatgtgatgagtgatcaatcgatggatctctatatcagctgacctgatgcgttgggggatccaaggttactactgcgcgtgtatggatcaatctttggtggtagccagggtttacaaaaccatcttattattacgtaacattctcagttttttaaaccacggcatactttgttgtaaccgtaaccgtgcggttaccgtaataaccgtcaaactatagagtgacggtaactctacacaaaacagtttgacgaattatggtggtagcgtgtcctcttgttttctagggaacgaaagatgagagagttggttagaggggtccgtccattggagtactagcttaatttgatctcgattgatacttgcaaaggttgatgtttaatcatagattcggtcctcgatctaataacaatatctaacccctctgctcaatctaatttagtgctagtacatgtatctatctggtcccgttgcgtgtcttcttttctactactgctcatttgctttagttgtgttctttagttcatcggccagctgaaaaatgcttttattttcttagaatccctgccgtttaatttgaaaatgatgtgaatctgaacatatattcatggtagttcatacgaaattaatagtggtcttcatataatgaagtttactgcattacttaggatgcatccatttggaatggttgggatctcctcttctgccgtacgtaaaatgggacgagtcactagcacataactaattaaagtattggattaaaaaaccctgaaaatatattaatataattttctcaagcaacttcatatataatttactagtgccaaaaccgaactgtttagcgatttgaaaaagactgagttcctgcttgaggttccaactctcctccctcgtttttttttgaaactgctaaacggtatgtttttttttgaaaaaaaaagttatgtcgtttgcattaacgttatgtcattgtgtgcttgatttgcaggggttactctggaaacgaagggcgccgctcttcatattatggtatttttagcattagtcattatttgtgataaggcctttcaaaatgcatatctataaatctatgccttttttaactgtactgaggaaatatgctctcgtcttatcacaacaaaattccttcagtttttctcgagtttcttctgaaaagttctgtttgctaattccttttgttgccacaccaaaattactgataggctttattgtttcatacagggaggtctcgttcccgttctcgctctccccactatcgaggtcgtccacggtcaaggtagatgaataatgtccatatatcaatcctcaagccattcaccttgtactcatgaatccggtcgcttttaaaaggtcatactctcctgctccaagacggcgagatgactactcagcttccccaccgagaaaggatacgcaccccacaaaatctcctaggcgtcagccaaaagaacatgatgaagagaagaagcggagatcctactctcctgccagtagagatggcgaccctcgcgatgctgataacggttatgagaagtaagcatagtatttcatacttccatcactttttccttaaatgcaatatttgttttcattattgcaatagggccatttacacaccaatctggtgttttacgagtagtaaccttctgtagacttgtaaagtatgatgaatatgaaaggatgtgggccttagggtcacttgaactatgggcagcattttaatctttgctgcatactcacgacagattttgttagtcttattctgtattaattaacaggaatacatagagtgaaagtgctaactatggtttatgttcttcacaggaggtcgcccccacctgacagcgatggatcccctccacaccggaggtctcctaggcactcctcagggtcgcctccaggatcccgctctaggtccgccgatgtttcccctgcccgcagcgactgacagaactttgaaccaacgaaatgggatagctgcatgatctccacagcacctccaattctagtcagtctccatcttccttctggtccaaccaagctgtttcaattaaaccgaagccctaagcggcgtgttgtattattgctaagtgtgcttgccatgagtttggtatggcacatcgcctgtttgtgtgctcatatgttgggagtccaggatgttgtagtcttttgagagctgctttgtttggtggtcatttgctttttgctgaacattaacttgaaacaatgtgacattggtgttgtgtactaccactagtgagccttgaactgggtaaccgcctatttccacatctatctatgcttgtgagtgcttagcccaggggcccatgctgccatgccaatattgccatcgactttgtttgggaaaaagcttttgattggatctaccactgactgggccagcagtacactacactgcctctcttttcttcctcacactgcaacgattggattggacttgtgaatgcagcagcatcatgctgctgctgcaaacgcaatcccttttaatcatggagcaattgttgggttgcaggtgatcgatccatggcgtgcattgcttccatggttgttgtcaatgtttgcaatttactccctaaatgtttgacattgttgactttttagcacatgtttgatcgttcgtcttattcaaaaacttttgtgaaatatataaaattatatgtctatataaaaatatatttaacaatgaaacaaatgataggaaaagaattaataattacttaatttttttttgaataagacgaacggtcaaacatgtgctaaaaagttaacgaccgtcaaacatttcaaaacggagggagtatttatttatttatttttactttcatgatgcagcagtgaaaggcaggggttggtaggatgtgtcacgcagaaagtgtactgctttttgtgcgtggttgggtttgtgttgtgttgcttgattgcaggcactgcagatacgtgggctttgttgtggtggccggcctgaaaagttgacaaatctgtctatctgtccgctgctgactgctgtctcatctttcggctgagaattaaaagtggcaacggttcatcgccctgacgaccatcgttgatcgatccatcatgcaacaggatatatatactgcatgagtactggtactcgtagagtcgtagtgtatttctcggagtagcagcatagcatactcattagcatgctgggtaacgattaatctaggagctgtccgatggcaatgatcgggtgtatcagacccaccaacccccccccccccctaaaaaaaactgttgcatctaaaatttgcagaccttttcttttattttttatggatctcacgaaatgtactagattcaatcaaattttatattcaaatattctaaaattttacaaaattcagtcctatcggttttctccgatagaaatagcctaaccaatactacattaaaccttggtctacaccgatcataatcaagtagcctttccctcgaggacgcaaatcacacggttataggttttttttccctcaacccacacctagggtttaacttttcggcttgaccgattgtatcggaggtcaccggtagaccgaaaattaggaatttttgaataaatattactaaaattcacgaaaagttaaaactttttaaatattttggccaaaataatatcgtaacggaggggtccaaaatgactgaaatttcagaaatcaaagtccgaaatttccaaccttgcccacacctactccctccgtaaaaaaaaaacctaaccaatgacttgatataacataggacaacgaacatgtccagtcctatattatatcatatccttgtctatgttgtttttttttatgaaaggagtaggtgggtaaaatacactcgatgggtgacctagaccatgcaaatagaaacaactggataaagtatagcacatatgaacaatcaatagtttaagttaacaaaaataaagagcacacacatatatataaattgaagtgcaaatttaaccattatagtgtatccaattccacaagttcaccacttaatttaaaaggtgtataaactattctagattctactttatactaatgcatgttcatgcttcatacaaccaatagtatgtatatgtgaccattcaattgttgtcgctacatgagaaagacttctctttatctcatttctttaaccttattggttcatcatccttaataagctcctattgtatgaggaccctaactcatttctttgaaaatggtgtatccaattccattatagtgtatccaattccacaagttcaccacttaatttaaaaggtgtataaactattctagattctactttatactaatgcatgttcatgcttcatacaaccaataggactgtggagaacaaaaggccattgccatttgccagtttgtcacataacaatttacaacatgtcataatatatattcccttctatat

SEQ ID NO: 9027 - DNA, 20313 bp, Oryza sativa
tatgagctgtggaactacaaggatgggaggaaggccaccctgcgtgagtgtgttgagtacgtttgcaatcaagtgaagcaactcacagtgaccaagcgcaggaagtctcgcaggtacaatgtccatggattataattgctgattgatctcatatatttactgcttcggtagcaattgtttttatagtaacaaaatgtgggatacaaaatcattgctactggtggttaactgattgtatcatcactcatcagggtggtcaacaatctttctagcactgatcagaaattcacaagtagatggcagttttacattttacaactagcagatggaagttttaatttttgaaaattagcataatggtactttcatgttttttttttagttttaggcctttagctcgctttgattatgtttagtcaccttagaagctgaaacctaccgccattcttttaccatcaagtgttcgacgagtgaatgctacgtcaaacattgcagcctatatgaaacactttccttcacccccataaaatcttataaggaaaaatgcttgtgtgactgcaggggaagttgacctgctggtggcaccacaacaacacaagggtatattgcaagaatgaacttgtaaacttcacttcaatttcttactgcgtgatgttgtgaattttactacctttttctttctacgaataaaatccttgactctcactttttctggtagtaactagaaatgggactgctcattcttcaacttatgctattggagtacccacactctccagtacctttgccttgatgttcattttagttcccacaaatcagttctcaagaacatgttattgtcaatgtatatgcatttatatttttaagaatatttatacgttgagctcatttcgccatattgttgtttttgcaggtggtgagggctgagttttgggggcagtgtaggactaatccatgaagttcctgagcaagaatggaagtcttagcttgcttatgtcttttgtaaaaatgtcatgactaggaagtaggaatcctgaagaacctgatcgtatgaagcaacggatggaaaactatgaactactactactactactactagtacatctattttgtgttttgtaaaaccaagttgtggcttatgaccactgtactgcttgtgcacccagctcattacatgctatagtatgtatttacatgagacctatagttaatgtctgagtgctttgatgttaagtaagtgtttgtagttgatggcctgaagaacagcagtttccagcaacattgatgcctgaattattctaccctgatcagagggtcgttgtgactgttagcgctcaacttggacgaaaattttttgaaattatactgtttatcaattgattgtgcaaaaatataccggatagcgaacgatttgcggaaataaaccattagtatcgctttttggaatagcgataccgatgttcgctcgttgaaagtgcgatagcgtggcgaaatcgcgatctgacagagcgatagcgaagttgagctggcgctctcgcgcaagcgagacgcgagaccgcagcggtatcgcttttcccacgagtgagagcgccacgtggagaaatccccacgactacctcgggcggagccatcgctctcgcactttcgttgcgcgagaccgaggccggtttcgtaatatgaaaccgcgagaccagttatgacgcgacggggaagacgtgggcacgcggtatcgcgctttgcgtgtgcgagactgctgacgcggcatgcgcgcgagagagaaagcctgggggagggcagtgggcccgcggcgtcgcgctttgggagcgcgagaccgaacacggtgtcgctatacgcgtgcgcgagagcgaggagcgaggtggggcagcgctgtcgcgctttgagggcgcgagaccgcttgcggtctcgctctacgcgtgcgcgagagcgagtgcatcgagggcgcgacagtaggctcggtatcgcggtacgcacgcgcgagaccgccctcggtatcacgctccgcatgcgcgagagcgtcgccgcttttcgccaccgacacctttgtttcccatctctatttcttttttgctttttacacggattctgcctctgactgatgaagaaatctgctgtccaggaagctctagatacatacatgttattagtagttgctactacttgctcatctattggatggtttcagtgtggagtctgaatctgtttgtgatgctggaagaaccctaattaagtatggtgatatggcttagttgatcagtgcatcagtagttaagagttcatggttgatcatcactctaaaaatctgaacttttcttttgggtcatgtgatgatggtgttggaacttggaagaaatctaaacatgctattgatggcttaattagtacggagttatactactaatcctgcacccctaattttgtttcacttctgtcattcagtgatgcttagcaatgatcagctgctagctaaagctgcattttaatattactgcttgttctatgcattttgcggcttactaatgtgatatgtgaaaaagttggagctgcgactatttgatctactatgctgaaatatgagtaccagttgataacttgacatatctatatatatatatttgctggatatggttatgatggagcaatgtactccaataatccctgtatccctccctgtagtgcttgtttgaatgtgttagcttaaaacctgaaccctttggtttgagtttgacagtaatttcatttttttcagattgggggtaatcgtcatctatccatgcatgcatatgctgattactactacccctgtatacacttttgcagggacaaattgaatccatgcatgtttctttcaatttcatcttaaaaccatcagttgctttccatgtcaattcatcaaaacggatttgaatcaagcatatcatatttcacattctcaatctgagcattctaattcacggatattgctgctactgtgccacgtggcgttacaaacacactatgttggttaattgcttggtttactgaccatttccacttggaaaactaaaataaaaacaaggtctcttcatgatctctttgctgaagatatcaactgacttttatgactgcaataatcttcacatcttttccatggaacaataaccaatctccaaaattttaaattttaattaaaacctaacttacaagttttatatagcagttgacggttgacgtacagaccaaatcgaaaaaaaaaaccctgtaaattctgaataacaaactatagatcattcaagtcacaacgaatgaattcataaccaaaacgcaatccaaacacaaaaatggtttcaagaaacatgcctaacctgcacccaaccatcatgcataatgatcccataattagcactgccaattcgtacgcttgcatgcgtctcaaaccttagaaaagcactccaaactgcaacgattatatcaataaaataaaataaattaactgtgtaaggtctgatcatattttcttcttaaaatgggatatcttctttttatatatataaaacgtcagcaacggcatgaccattcgaaaataaaaaaataaaatcaaaattgggtggctaaccagtaaccacgtgtttaccatgaaacgcctatacgaaatcatgtacggaaaaaaagatttaatccaaaatggaaattgatggaggatgatctgcaattagaaagaagaaatcgcgttgaattcgatcagtttgtcgaacagctaacacgtacgatgagcggctcgccggcaacgccggcgacgcatgcgtgatcggcggccggcgagggcggttcccgccgccgccatggatggctcgcatggatcggcggcggcgctccgggcgacggggcggtgcctcgcgccgctgatcatcccggcgtcctgcgtcgtgtgggtgctcttcttcttcccctcgccgtcgccggacgtcgccgtccgccgcgacggcttcctcccggccgtcacattgccggtgcaacgcgccggcgacacgccgccaccgccgccgatcattgacgcgtcacctccaccaccgtcgacgtcgccgccgccgccgccgccgcgtcgagggcgtccggcgaggagggacaggtgcgccgggaggtacgtgtacatgcacgagctgccgagccggttcaactccgacctcctccgcgactgccggacgctgtcggagtggacggacatgtgccgccacgtcgccaacggcgggatcgggccgcggctgccgccggcggcgcgcggcggcgtgctcccggcgaccgggtggtacgacaccaaccagttcaccctcgaggtgatcttccacgcgcggatgaggcggtacggctgcctcaccgccgacgcgtcgcgcgccgccgcggtgtacgtgccctactacccgggcctcgacgtcggccgctacctgtgggggttcagcaacggcgtccgcgacctgctcgccgaggacctcgccgagtggctccgcgggacgccggcgtgggcggcgcacggcgggcgcgaccacttcctcgtcggcggccgcatcgcgtgggacttccgccgcgaggacggcggcggcgaggggagccagtgggggagccgcctcctcctcctcccggaggcgatgaacatgacggcgctcgtcatcgaggcgagcccgtggcaccgccgcaccgacgtcgccgtgccgtacccgacctacttccacccgtggcgcccctccgacgtgtcgtcctggcagcgcgacgcgcgccgcgcgcgccgcccgtggctgttcgcgttcgccggcgccgggcgtggcaacggcgacgaccacgaccgacaccacggcggcggcgtcgtgcgcgaccgcgtcatcgcccagtgcgcgcggtcgcggcggtgcgggctgctccggtgcggggcgcgcgggaggcgcgacgactgctacgacccggggaacgtgatgcggctgttcaagagcgctgccttctgcctccagccgcggggggactcgtacacgcggcggtcggtgttcgacgccatcctcgccggctgcgtgccggtgttcttccacccgggctccgcctacacccagtaccggtggcacctgccgcgggaccacgccgcctactcggtgttcgtcccggaggacggcgtgcgcaacggcacggtgaggctggaggacgtgctccggcgggtgagcgcggcgagggtggcggcgatgagggagcaggtgatcaggatgatacccaccgtcgtgtacagggacccccgggcgccgtcggcccgcgggttcacggacgcaatcgacgtcgccgtcgacggcgtcatcgagagggtcaggaggatcaagcaagggctccctcccggaggcgacgacgacgacgaccaccggtgggatgcctacttcgacacgcagtgaatgatgcgttgctcgattttttttttttggtttgattttgtaggcagagaggaggatgaaactgaaatggtagagaattttagaattttttgtttggaaacaaatcgatgtagttcaaaaagaaagtttaagaggatttcaattcaaaacagagcaatttttgggcctatccaaatacttatattcatgtcattacaaatcataccattattaaataaaaaataataattatgtggttgtatttagtttgttgccgaatattggtaatgtctattaaattttgataaccctagcctatcttacggaaacttaacaatgttgataatttgtcgaaattttgggaagtgttatttttaccttgtaaaactcccgaatggggtgaaaaatatgaccgttggatctagcaccaacggtacggacgttggccgcgcgccggagatccacccacggcggcgcccctccacagccacgccggacgggaggcggaggcggcggcattgggcgctcctgggccggcgaggccgagggcgagggcctcttcggcgacgacagcgccgccgccccggtgacggcgggggccgagcgtcgacgagggcgaaggcaccggcctcatcccgctgcgcggaggcggaggaggccggcctcgtccccgccggtcggcccggaggatgccgcggcggcgcaacgacggcgacgcttcgtttccctacggtgagaaagaccgtcgccaaatgcactacttatattgagtataatcatcaaagagaatttggaaagcttttcatttcgcataaggaatcaagaatgtgtgtgagaccggatgctgaaagaaattgggaagaggggttagttagggtatatatgaacttcaaaacttgctgctggctgctacttcctgtcaatatttccttctttgggaaacgattcaaacattttgtatgaattttggctgcagttgactagctgaagagatcaagaagactttgtatggtttctaaaaaggaaaaaaaaaaggcatgtgaggtaatattgctgttccacactaatcttgccaagacagtttacaaatcaaatatttagtattcttttttattaaattcgggtttatcagaatcaaattcaaggggaaaaagaatacaaatccatgctccagccgaaagtagagtatactacctgctcttttcaaggattgaaaagttccacctagctgataccaatgaatatgcatacacaaatcttctttttaaacattctaacaaaattcaactttgaccttcaagaggaatctgacatacacaactgaaatgcaaagaaatcacccaacggacttagcatgccttacaccttcaatctatgaacaattgcaagatatacatggaatgctccctgtctgaaaccaagtcacatcatcctggaatgatagatcaagcaagcagaacggttctgatcctaatttcctgaacacattaaaaaaattcatgaacgcctggaactgagtgtgttctggaaagatgcaacacaaaacattacaacagatcatccaacgacaaacttcaattgaattttacccacaagaaagagcagcacgctccagcggtagcagattaaaacaacaaaaagacatgcttaaacatctaaaccacagaaacacccagagataaagctaaacagaatccatcttacttaaatagtactgaatttacaaaaaagagtgccattatagatagatagtggacattacatggcatatatagtgtaagcttgccaaaatgggagggaacacactcctcatcacaagcttacagaagcatgtccatcaagcattcgagagaacatatttctaagcaaaaagagcactcctcaagcttgcaggagtgagcgcacctaaccgagtagcctgttagctcatcccacgagcgcagcaaaatcgaaggagagtgaactgatctctccttcagattgtgggactgtttgctttattctatatagtaatgtaagttctggtattactgtatcagggaagtaagcctactcaacaaaacttgaagtgctcaatcatgcagccacaagtggtgcagcccttgagtaatgttactgaagccaggaagcatcctcgacatgcgatgctgtgcatacagggggaacatctgacaatcgcctcagctccacggcagaccaccatcagctggcacctttgatctgatgcacgctccatgactccctgcatatcagatgatcgatcagacatcagacacattcaatcataaactctggtcaagtaaaaacagcagtaagcatcctgatcctttgctagtttctaacagtctgaaaaaatatcccattgaaacacagtagataaatatatatcaaacaatttttcaaaagggaacatcagaagaaattccactgtttggagataattattaccacatattggtatcttgcatcctgtgcaggggaagacttgactccacttacagcagtgccacaggtcatgcatgccctgacattgcatctcatcatgcaggcaacacaaatcttatgaaggcatgggacaagctgcatcacagcatcataggatcgacagatgatgcagtaatcactcttgggatatggagcctaaagtagaaagaaccaagttaggcatagttctcagtccaagcaactaagcaatgtaaatctcacaagatcacttaccaggaacctgtcccattgtgattggaagaaagagaatctcatatcagcctcacagttgcttggagttactgctggcctttcaactggacagtcaacgaagcatgttgttggtctggaaccaatcaaaccaatcctccttgcaagtccagattcaaacaaatcagtcttcctcataggctcagaaacaatcttctgagtaagagatgcaggctcaatgacagttggttttcttgtaggcaaaggctcagtcacaattggttttcttgtaggcacaggctcaatcacaattggtttccttgtaggaacaggctcaatcacaattggttttcttgtaggcacaacaggctcaattgccattggttttcttgtaggcacgggctcaatcacacttggttttcttgtaggcacaggctcaatcacaattggttttcttgtaggttcagtcacaatcaaatcaggttttcttgtagtgactgtgtcaatcagatgaggttttcttgtaggtacaagctcaatcaaatcagactttcctgtaggtatggactcaatggaatcaggctttggggtactgacagtaacttcacccagtaagctaccattgtcagtggaagcactatcctgctggctttcagtgttgctcccgcagcactcatcgccctgatggctctgcacattgctctcactgcaagtatcaccctgctgactgtctgtgttatgaggggagtcctcggtgatattagtggtaagtggagacctcggggactgatgatctgacactgattctgggagctcatcatgatcaaaagagaatggttccagcaagggtacatacttcggtcgcgagaccggtggaaggaggaccatgtgtgtggcaggaccacttcctacagggactacacacattctgcagataccaggaagggaacgcatgaaatcactgagcttaggataaccaagtgtgccatgatcaagctccattctgcaaattgctctgaaatcacccttcagggagctcaatgggtacctatctccaagtcgttcggtagcatctgcaagaaatcctggcaaccacttcctgaatataaagaaccaagatggaagacacttctctggcaagggccggcgcttcctaatgtaatgttcctcctttagctcaccatccaacagatggtgagttacctttggaacctcctggctgtggtgcctgaatggagcaattttctggatttctgcaggcaaggatcctctagcaacagcatcctttacctccactctcttcccaagcatgtacacatgatgagtttcctttgcacttatcacatcctcttctcttttgaactttacaaaaccaaatcctcgagattgcacccgatcacccatccttatcccaatgactactgcttcctccacaggtccaaattcagcagtgaagaactcagtgaggtactctgccaggaagaacaaaacaaggtaagtgttagaacttagaaacacattagttctaactttattaagtacaagtagttcaggattctgaagtttaccagcgcccacagaaggtgggaggcccccaacaaaaattttccgagtgtagtcgtgcttcggccaatgattaggctaaaagaaaatcttataagaggcagaccatgtgaagaaaaagggaattggttaatataggcagagtatgtttgtttacccgaggcacaaacttggaaccttgcttgggagcacaatggttcttactcttgcccccttgggcagaaccattactagaccggaaatcccgatggcttgctgatgttttaagcccagtaaagctgccacattatcaaaataaatatattagtttgaaacgtaggatgagaagcaaaggttctagtatgcaaaagaatggaagatctaatataaatcatgcagtatgcaccggacatacctttcatttaaatcatcactgtcataatcaccaaaatcttccaggaactctttgcagctttccttattcgtcacacttttttttggatgtgagctacggttccctacaaacagaatatatttcagttgaaaaggtatttgccgcgtattgatcgttatgcagtaaaaccaacaggaaaccaatcttgaaatctttttcattgaatcgaacactgctaattgtatgcactactacaaatatttttgtgatttcagttgataaatatctttaaatgtcagaaaatatcttacatggagccacatttgcagaggtaagaatgaaacgcatatcttgggacgttgccacgtctattggtctttgctttctgtttaatgtcaaaggatcaaaggatggtaagtgcatcaagtcgtcaaacagaagcatattcttcttaaatccaaatattacccaccttaggttctggactttggtgctagccccagaacgcaggagaagctttacacagtccaaagaaccattcttcactgctaagaacaatggggtttctttggtcttggaaggagtatcaacacaatcttgagcatgaagcagaagtgacttacagagcaaacaaacatactatcaattagttataagctcaaaaaatgccatcgtgtgagtagaagttacaaaaggctacctgaagagctttataatttcccttagctgcagcgctgtgtactggtgtaagaccaagtttgttcccctggaaaactctggcaccattcttcagcaggagccacacaatcctgcacaaatacagaagacaactaagtaaagagaatgcaaatagcagtaagaactagtatgttgtattttaacagttgatagaacaaaattctaatagcataccttggctcctgtgtgcttgagctaccactaaggcaccagtgaagtgccgtgttcccttcaggatcggcttcattgacatcaacatcccccatcaggagcatctttgtgacatttacatctccaacctacagtagaaaggtcagtcagaagaaagtcttctggtgtatatacagttgtagcactaaaaactttaccttaagcatagcacattttaagcattcttgcatggaccataattggagaaaaatcagttttgaaattgggcagggcatgaaaatgactcaaaagctcagcttacatggtattaattgtaactcatcagtatgcataccatataaagtgtcaagcaaggaaattctgaaatagctctgtgaactgtcaacaagaacagcaatatgaacagaggtaccttggcagctttaagcagagggggcaagcttctcttgtcaatgttgcgatctctccataacgctgccccaaattggttaagtagctgaatctcactgagcagggcctttctcctctcattgctgtcccgggctggagcatccccaatggacagagcctcatccacaatagagtagtagattgatttctttgtcctgacgccctctataactacactgactggtgccgatatcttctcttcagccaccagaagcagcattgccaacacagtaacacgaccttccatggcatatctgtaggccacctccccaacctctctggttttctctgccaggagcctcactgcattcagatcctacacatggaacaaggtgacatttttgtgtgagaagatctatggaccaattatgagacagtgaatgaacattagtagtactagtaaccatacaaaccttttcttgcagagatgacagaagatcttcaatggagttgtccagtgaccatttaacttgagctctggataagaacatcagtcagaaaaacagccattgcatggagagaacttgagaagtgagctcagtggtcaccatcaccttctgcttaagagagcgatctcgagcgcgacaagagggcggccatcgaccagcttgaggtcggtgcgcgcgttcttggagagcagcagctcgatgcaccgggccgagtgcgcctcggcggcgacctggagcggcgtccgcgtgagctggtccctggcgtccacgggcgacgccgtgatgccgtgccctccctcgaggaggagcctggcgcactgcacggcgtcgtgcttgcaggcgaggtggagcagcctcgtggacatctcctggtccagcatccgcgacgcgtcggagcccttccggagacggcccatcgcctccttcctgaagcttcccaccgccgcgagcagcagcgcggtgtcgtcctccgcgacggcgcgggacacggcggtctccttccccgtcgccgccgccgccgccttgtcctcgcgcgccgctgccttggcgcgatccatgctcccggtctcttcactcgcgccctgacaaaatcaaaccacaaaacgaactcttcaaacacagatgaacacaacgaacacataaataaatttcgctcaagtttgcatcaaccgaaaattcataggcacatataaacgaaatcaacaaactaaatatcatctctgtaccgaaagaaacccacgaaactcgagccatcgccgcactgtacgctaaacattttcaaacaaaagcagcaagcggaagaagcaggagatgggactgaaactgcagacagatacacaagaatggaattccacgaatccatcagtcgcctcggcttttaagcaggcacgacaaggtgcaagaaaacaagcaggaaagggaccaaaatttgatgagcgccattgcaatttcctttcgcttccaaagacaaaagccctcgtaaaatcacggggaatcgaatcgaaagctcagagaatcacatgatgtcgcagacagaaacgaatgacacgtcgtgacgtgtgacaagacgcccgagattgaaacgaagctacggaagatggggaaacaccagcaaggaaggtttgctcgatacgaggaggaacttggaatctcgctcggattgcaaaaaaaaaaaacgtgggaaaaaacaaaacacacgtcgaatcgcaggctcgcagcaaaaaaaacaaacgaaacagtatgaaaccacaaaaacttttcaaaaacgcgctgaaatttcgcacgcccgctgaaattggtcgaatcgtggcaccacaaataggtggaatacacacgaatgcacatcatcacaaaaacccaaatctccacgaaaaaaaaagaggaaaataaggcatgaagccatgagccatcaacgaacagcacctaaaaccctagcactggtcaatccaagttccagaagctccaaaacactggacgacgcatattagcagtacgcatggatgacttgtgcatcggacaaatccgaatggaagttctgaaaaagaaaaaaaaatgatgaagcattcccctactttgcacgggaaagggtcaaaaatccttgtcaaatgaggcaaaatcaatccaaaatccagaaatcaaaccgcacgatcaaagcatccgcaagccagtcacaaattttcccaaacccgcacaaaacgcaaaaagcacaagcgaaaaaaaaaagagagaggcagggataaacaaaccgtcatcatcgcaatatacataacggcaagtttaattcacgaggattcgtcaaaccctaacatctcacgacgaaaccaccagaattggagcaccatttcctcccccctctcgtcgcctcggcgagcaacagaggcaacgtacgccatgctcgcgagagctccgaggaaacaaaacgaaactcccagaaaaggccaaaaccacacggatcccagcgaaaatcctcgaaaaacccaaccaaaatcagacgaatcttcccctcaaaaaaaaataaatcagacgaatcggagaaacaacgcaaccaaaaccccccaaaccgaatcaacatcaaaccaaatgctctctcaagcgaaaaaccatcccctcgatcgatcgctggacgcggccgcctcacctctcccatccgcgctagcttctccccgaaccgcacccagcactgcaccaacctcctcctcctcctcctctccaatctcaaatactcctctcctcctcctccaccaactcaccacggggaagaaggagacaaaccaaacaaaagcgaagtactcgctgtctgctccacccctctctctcgtcctctctctgttcgtgtgtctgatccgctgcgactacccactcctgccgctgcaaggaatcagcttttgcatcccctctctctcgagagaaaaaagttttgtagctttgccgtttcgggcaagctaggctcgcagcggtgatcatggcggacacgggaacgccaaaaccaaacccaaccccccacccgcgtttgaaatccccgatgagtcactgccaggtgggcccaaccctcctccgctgtgtcgctggcaggtggggccaacgagcaccctccttgtctcttgtggcgctgcgcgttgtcagaggcagaggggacagcccgctgccacggagcagaaggggaggggggtttgtttgctttgcttacgtggggttggtttgggtgatgtggctgacgtatggggccgggtggtggggctggaggggtggggcctaggtgtcagtgggggttgggtgatggattggtgcgtgtgggaggtgggttgggggttgtggggtgggtcccatgcgtatcgttcttgggggttgtgaaggtgaggaggaggttgggatggcgcgtacggatgaggttgaggtggaggatgacgacgatgatgcatcccctatttgtcactttctgctcttcatgtctacagtactcctagtttagtttcagccgttacatgtcttccttaaaattgtttgtaatttagtgagtactgaaatattgcattcactattaaatgatgaaaattgtagtttgtgacattttttattttgagaattgtgataagctagtcggcagttactatattagcatgtattttctcttctattgttttatgaaggtatagtcgtgtagcttacttattgaataataagtatataatacatgtggatcacattttattttctttgtttcaactaggtatagtattgtgtaacttaacaattaaatggaagtataattacacgattgcatgccgacgcacatttttctttgaaaggaatacaataaatgaagtagtcaagttgtcacgaatagtctctaccctgtatcctaacgcctattttcctttttgaggaagtgacaagtggtaaccaagttgatctaccctacaacaaagtgagaatattactactagtattactaacaaaagatatatgtttatactttttagtaacaaaaaaatgctataagaatttcagagcagaagcacacacggtttaatgatcacaaaaatatgttaggcgttcgcgcgcactcgatgtccaagtccaacgcacgcggcacagcatatattacgtacgtgcaacgcgcacggtgcagttgtgcccgtgcaggggctagagactagagaggcccggtttgggtgaaacggatcagacacgacgtggcgtggcgtgcgtgatgcgtgtgtgggcgattcgggcgcgcgggcagacaaaggctgcgttgccctgcggcatctgcatgcagcagacgaggcaggcaggagcaggacgacgtccaaccacactagctacacagggcaaagagagagagagaggctatagtacacagtacctgcacgactgcactgcacttatttgcccatgcgaattccaccgcatttccaaaatacccagacgcatcaggcaatcaatcaaagcgatgtaaagtagcggaatgctagagcttgagttcagtggaaccgaaggtccgtgtaacttgtgaatttaattatttgtcacttctataatttgtgtttctctaaatgccacttttatatttatctttagaaatttgacatcagtgggagaaattttcttgatatttttctttacatttctgctgatgtggcatgacaactaggacaatctgtatggccgagtgataagtaattttcattttctccctctccaagtctggcacaaaccatcgccaccgcaataccaccgactttgccacgtcgactcaagcccgacccaacaacacacgcacatgacgcactcgaccttcccttcccactcccaagtggtagaaaaaaaattcattgaggaagcaaagtgaaatcgtgatggatgctaggtaggatgactacgagagacggcgccggtggcatcgatgatgtatcgctgcagaaggtctggtcctagacaaagccaccacgccaccaacctctccagacctagcatgcataggcgacgataatggttgtggagatcgacagggaagaggcatgtccactgaccgttgtaacaatggttgtcaccacctcgagctaccctctccagcagttgaggaaggcaactcgctgttgccgccttctcgatcccccgagcctcctcctccctcctacattcttcgttacttacctctaggatctcaagtcgcattgccttatcctcgagcatcaacgattccatgactgttggcgagaaaaaatccatggccaaatcgaccacaatatgcattgccgctagatccccttcggccaccgtcggtctgccgtggcccactaccggtcggcaagcggtcattgggacttaatgctcatcctttccctagccctagcagcaagcgctccttatcctaaggccctatgtacagtggttgaggacgaaatagagaggatgacttgtgggatccactaggtgcaaaatggagattccgcctttgcattccacgctggacatccataggtcaagccacgctacacaaaaacttaagaagtatgaggtgtttggatggtgaccacactttgtcacaactttgaccaacttaacctagtgttttgtttgattaccacatgattgtcatgccacacttttttgttttgtgtccccacaagccataggcacatctctttgccaaagcttgcctaacttgtggttaaggatttctcagccacatcaagtgtggcatgccacatcttagctgtaaaaagtttgacagactgaaacaagcatcccctaggaaaaaaccataagaacgattctagaagtgacatttgaagagcggatgtttcttagattggcaaatagttgaatccctccatgcaagatgagtactacctccatattttaatgtatgacaccgttgactttttgtctaacgtttaaccattcgtcttattcaaaaattttatgtaattatcatttattttattatgacttgattcgtcatcaaatgttctttagcatgaaataaatatttttatatttgcacaaaaattttgaataaaacgaatggtcaaacgttggtcgaaaagtcaacggtgtcatacattcaaatacggagggagtacttcaaagcgaatatatttgtctacggttaaattgacctcgtttttactgtatatataatatttgacaaaaaataacatcgtaaaaaaactgtcaaatataaatataatatagtaatagtataatttcaatgtgatcagtatataatcataatataagtaggatataactggtatgtaacaataagaaaaatgtggtttgctcagtggtatcggccactgcatgcacatatgttatttgttgttcccctgtcgctcacgaatctcggggccaatctcaaacaacatcctcaatggtaaaaagagtgcaagatttagcagtgaaatttccgagtcaacaaataattagcaattctgtccttttctttttgcgagcaactatggtttaatcaatcgatcctgaacgtgtgtgtactcacacgatcgatcgatcgatcaaatttatggatccatttgaccatctctaactctaaaggtttgtacacaaacttttggacatttttgcaccatttctctggattgtcaggcctaattaacctaacaggctatacgtgcaacgtgctagatatatttggcccatccggataacggcccacggcccacgtccaaacaaacgggtcgtgctccgctgcgccaagctctatttttacgtgtctcccttctgaaagcgtactttggtggtttacgtattcacgcggcggaagcttttctgttttcccccaaatttgcgcttccctccctcttctcgaaccttccgaccgccaccgttgtcgccatcgccgccggcgccgaattccgccgcgatctcgcctgctccccccagtggtaagagattcgatcggtctcgtagtaactccggctcgctcgggcaccttaggtgcgccggttcctgctcgattcgagctaccggctgccgactttgccggcggaacgtaatcggctgcgctgtcgcagtcggcggcgtgcttaaccgctcccggaattctgcttagctatggcgatgattcgatgtgccctccttcgtgctaggaaatcttgtgctgtgattttcaggcttcaactcgtttgatgcgtctatttttggaagttattagcagtagcagtgtgttcgtgtcctgcaattgacctagcctgcgcaatctgttgcttgctgctaaatgtgtgggttttttccccctagccattaaattcaaacaactagtagacaactcgttattgccgaagtacagtttggaatcatttgggtttgactgttcgttcaataaaagaaaaaaagaagggtttcagagtgtctgctagctttaaatttttgcacggtcagattaaggaaattttaattttacttgttggttgttttatttctcaacctcccattaattgctcccagttaaggtattttcagttggaacattagttatgatttgtacaatcacagatgggatttacagatgaaatagtacaagtagatgtgttagaaaggcacttgttggctggtttatcaccggatgattataagggaataagtgaggatgagatcctctatgatgcatcatttgaggcaactgaagacaagtttgtcaagtatcagattacttggtggattctgctgtcagtattgttgatcttagcttggggagtaggactcctcatgctgctttacttgccaatttggatatatgtgtgccggaaggacttccgctcaaggaagttgtgtttgactccacatgctattgtctataaggtatctgcatgttggataggagatggaaactctatttgttttctctcttaggttcttactaatatatctaacacccctgctcataatccaggtaactaggcctgccacttttccttgttttggtgttttgaggaatgagaagcatgttgtccttcattcagtttctgatattgttgtcgaacaaggtaagctgaaaataatgcagaacaaacttgttcgtgacgattcatttaaaaagactgtttgtgacttgttactaaactattaaagcgcttttgctaggacttggttatgagagatatatatatattttcattttccatctttttgttgagttagtgcaaatccagttctttccttggttgtgaaaagctatgttaacttgttaagaagtttgttcttgttttttttaaataaatgagtgacactcttggtgcaatatgcttagttatctactgtactcatgtgatatctgtaggttatctccaatcactttttggtatatattcaatcagatttgagaacattggtgtccgaaagccttctagtgatgacataaagataactggaattagtcatccacatgatttcaggaaggtactaaacattttgatttatctatctcagtctatctcgagtttttgtctcattcagacatgctttcttcaggctgttcttgtccatcttttgaatacaagcaatctgaatctcagtagaaaagcttatgtacacgatgatcagcagagcacgagttctaaacctataactatgtcttcggtatgtctatttcttaatggtaccttttaatagtttaaactgtaaagatcctttgcatttagcaagccctggagctatgagatccaacctttctgaatgtgcgatagttataaaactaagaacaagcatatattttgtatatcgaggttctgtttgtataataccttaggaagtattgtattgtagatatatagcttctaacaacatacatggttttgctaagtcaagattgtatttccatattaccctattaaacttggctaatgttttcattttacagaccattttcactgatccccgtgttttgcatgatatatatacaacacattgaatttttcaggttcctcctcttggagatttgatacttgagaag

SEQ ID NO: 9028 - DNA, 38883 bp, Oryza sativa
  unsure (1)..(38883): unsure at all n locations
aagtatgcaggacacccccaccccacccccccccccccaccccccaaaaaaaaaaactgtggagttaacatatgtaggttcgatcaatgcctggtgtaaagcaatgttagaacctcacttactgattaccttgtaggagcctgtggggggaactgccagcatgttccaatcaatatcatcaatgtatttcttacgctctctatatactgctttggcactgttaaactttggctgatactccgataacaaaccttttgcctggaatacagattgataatcaacaactccatatgaatcaaatgtaacccagttacattgttttagatttgataatattaattttgaaaacaaagtaaaagatgaaacctgctaacagaaatactagaactattgatacaatgaggatgcactgaatctgcaagtgtcatgttcatgaagaactacagcaccatatgttttaccagacagcgattagagtcgtttgctagctaattttcacaaagatcaaagattcaaatggaaactacaattaccaaggtgcggctaacagaattctcaaaattctcataatccttccatagctgctccacatgattagttggaactaaaattgccttctgatatactttccgtacagtagtcatacgatgtgattcttcctgcggtgtcacaacctgaagagtatgcaaagaaatatttacacagaataatagaagggatgaatgttaacatggggaaggacaggaaacaagaaggaagaaaacaaaccggcattgacttcaagaaagcaatataatccatccaaacagggccagaagcaacatcattgcctggaaagtttaagtgtccaagttaaagaaaaaacaaagagggattatctatacttatggcaccacatttttcaccaaaaaacagtcaaacctttcagccagtatttacactgtaaattccatatcttgcaatgtaattttcatatatttacagtgtaattttcaaatcttacactctatatttttatcattccctatataagagaactacgaaaaaggttgatcatctatttgaatcattgaaaaaggtactagtgcaaattaacacataagtagaaggacaaacacaaaagtcaataagaaagagagatgagaaatacaagtatagttacatgtaatataaagggtagttatcaataatgcagtgaaaaaaaagtgactgaaatcaagccaaatatgtgacgccatattttttttagcaaaattatgttaaaaaaatgtacttaggaagtcacatcatcaccaggcactagatataattaagtgcctacttaccaacatagttcagcatgaaatcaaaagcctttttggtctcttccaaaccatcagaaccccttttatcgttcactctcctgataaagttgatgtaacaacgcctgcaaattacacccagacaaatagggaaatgttaatgatgcacttgaaaacatactaatactagatccaagggaataggcaaaactaagagcaacaaaaacaaggcagacaatcacaaatgagatcacataacagggaactagtggctaatgagaccatcaggttaaatgagcagagactgcttaggaatttgatgatttacatgcatgatttgacacagaagttcaatcccaaaccacacatatcacggtaggaatatagttcagtgacacaaccagcgataacaatgataattcacataatgacagtaaagcaatttattcaacacatcccacatatgcatactacaacgtgtgcctaatgtacaatctccaaatatggcctccactcaccagagattaatctgaaggcaactgagcaagcatctgctgaatatctgcttggtggcctcatcatccttcgcggacatgtaagcttcgacatactgcttccagtacttcgcctgcacatacacatatagcaggtgaagccaagtgaaatggcatcactagatgaaccagacgaacctatatatagatatacgatgcaaccccaaagcaagcaaaacatcgagtcgaaatcgaactggactcacggcagtggggaaagttgacagcagcttctcgtagatgggagcggcctcgccgattgggagcagctggagacaaggaaggagcggagcggagcgcaagcgcgcaacaccgtggtgagctcgtcagtgcaacccagctcaagtgaactcggtcgcgaagcgaggcgaatcggggggaggggggagagctcacctgggcctcgttggcgaggatctcggcggcctcgacattgtagatgtccatcgcctccaactccgccgccgccgccgccagcgagggcgccggattcctgttcaccgcagagcaattcgggtttggattacctcaccgcgaagaagaggattgggagagcggattcggagcgagctagggcttcctcaccgggggaaaggagtcggtcgggatggataggggggatctccaccccacgccagtccactgtaggggaggaggaagcggaggaggacggcggcgggaagaacggcgagttcacggcggcggagagcttactccggcggaaggcggcgcgagcgaacggagaaatcagggggcgccggagtgatgtgtttggaagaaattttagatgaattttactgaaatgtttggatttcttttttaaaaaaaattccaaggaccagcgtatctgtagctcgaggatacatacgtcgtatgggtagttttcatgttattagaaaaattatttctcaatacttggtccattacccttcctcttgtattatatttttattgagaaaattcgatctataacatagaaaacatgtcggtatccaaaaaatagcacacaaaattcccaccttcgatcagaagtatattccacttgtttttattttatccgttgtatttccgtcacaactacaggtctaatcaaagtttttcgccatgagtagggacagagaaagatcaatttgtccatattattctctgcatttacacatgactaggttgggcacttgcgctagagcacttggactagaggctgcgcacgccatgaaaatagcgacgacggcaggcttgcgcgaccatgcgccgcaactgctatttcaatgttgttgacaacgatggctggtggttgcttgaagatggcgactggctgagggttagggaatacgagtagctagcagcttgtttaagccgtcgagctcaacgctggcagtggccgacttgcttgcaacggctgctagggcttattgctaggtgaagatgtgagcatgaccaaaaattgcaaggaccatatactccttaaaaactaatcaatttcaacttcaataaccaccatacacatgtaagataaaaacttaaattttacaaattggaccttgcctatgcgtggtgtctcggtcatgcataagagacaagaggcaagcgatgaacaggggaagaggtatgcagtgagggactggaaggaggaggaagaagaaattgacctaagggttttctttttggtctttttagtggacggaagtgctaaattttagaaatctctaacagagctgtgctttcaggcgaagaaacaagtttcttgtgctattattttactcggacaatacctatgctaccaatcgaattttctcatatttatttattattatatattgctcccttcatccagcaatataagatttatagcgtttaaatttttacctttgttgttcagcagttaattgtaaaaaacatcagtcaattacattagccattgaatttcggggagggggtggggatttaagggacgactagcagtggatggcgatgcactagcggtgccgccagaacccaccaataccatggggctggaggagtgcgttggatcaatgttggagacagaggtgattcgtcggagtggctagcaagcggtgggcagctatgcaccagcggtgccactatagcccaacattgccatggggatagaggagtgcgttgagtcgatgttggagacggagacgattcatcggagtggctagtagacgtgtggcacatgagctgccagatacaggggggataggtgaggcgagataaggcatataaattaaagatgatggtggtgaaattagggaggctcgtggacatgaaagcaccaaagagtataaaaaataatagccaagcatccgagggaagtgaaagaagatagatacattgagagaaaatcaactgacaaaacaaaacagaatcaaatcatatgccattgtttcttacattttattataaatgctacatttcgagtgggattttcccctactagtaaatgctaaacattattctctgctaaagctcatataaatgcttatatttgtgggggaatgtatcgtatatacacataaatttacacactatgtacccaccagataatatatatcataaaaaattatataaacaatatacatgtattttcaatagtattgcatacacatataaattaagtaccaacttcatatttgttatgttttagccataaaaaaagtaacatatctattagaattttatcttgctaaaatataatgaaattgaaattatactttatagatagatgtaatattattgaaattgaaagtacgtgcaaaatattctctcaaagttttagtgaaacccgccatgttagttggtgtatacggaacttgcataataaaattgtatatggtacttctatttgtggacgaactaacaacatctatattgtttcacgatgctaccgactgtattggagtatcctagcaatataaccattcgaccatgccttgaaaggaaacgattgaacagggcccgagaatacacgaggatgaagttgagacaatctaaggatatcactttaggtaattttacgatccatgtatgttataatacaacatttcataccttaaatattagatatctaaatatttctattataaatttagataactcaagatattttaccaaatatcataacatctattctttctataaagctaaggccatgtacaaagttagagtcagatataagctctacgttatctaaagactagcatcctacaacagttagagacagtatggtctctaatcattaatgtattcaaatattttttcttactcttctttccttcctttcaccaccatgcaataaaatttgctctaataaatgctaagagtcgactctgagctgttgtcatgcataacaactatactcatttctctttcttccatgtcatcaaatttacttgtatggcaatagagagagactactaataaagaccgttgtacatgccctaatgaccactaagcacataaagctcaacatgcaagcatagtatttattagcattcctaaaacctacatgcaaggatgccacatcaatctattaaatacataaagctcaacatgtaagcatatagtaatcatatcagcaatttatttcattgtaaaactaaacatacacatgctaaatcaccattcgcaaatcattttcataatatttcaatccaaatcatttcatcatttctccattatataacatatatcccgcagcaaagcgcgggacatcatctagtttctaaaacaatttagacacttgaccagagttgacatgaacatcactctcatttattacattggcacacgtatgatggcacgtgcttactccctctgtcaaaaaaaacctaacttaaataagatatgatatatacaatgaatgtgaacagatggttgttcagattcattgtattaggttatatcatcttaatctaggttggacatttttttttacgaagggagtacacgtgaagtgagcatgagcacaggggcggagctatgtatagctgggggtgtccaggaacctggttaaaaaaatattaactatagtttatctatttttaccatatataccctgttagtttaaacttcactcgtattaagctaaatttgatttaaacgagagtaaagcaaacgactggaacccctccattttattatagctctgcccctgcatgagcttggcgtcaatgccgctcctgtacgcgcacgactgggtgtaggcctccccatgcttcttgccggtgcagcttgcttaattacctaagcaatgcataagcatgcgtcaagagaaactattcttggggattgttttcaaatggttatatattttttcaaaaaaaattaacaacataaattaatactatataatagataactctacaaacataaaaaaatcaaattaaattatacaagttgcaaaaagaaacaaatttaactacaaatatacgttaactagttataatttaatttatctttttattgtaaattgtagaagtcgacttttagcttgtatgattatagagtgatatatcacatattaatctatactactaatttttcttataactatttaaataacacgtaaagagcaaagagacatcccgtggggcgtttaaaatccatgccccatgcttcgatcatgccctgatcaccagtggcagcgcacgataaataattttgtggcgatgatgatgatcatatttgcgagtgctacacttgaactaccggagccactagctgtctagcttctacaaaagttaatataagactggcatgccccttgtgcatatggaatgtgtgtggtaccaacaaacgattggaccaaattaatcttggtgattgatttccacttaatgtattttacttagtttttgaaccttaatcgagctatagtcaattattacttggattccagacaagaacattggaacaacatcaaacaccgatcgaaactgaaactctgaaaactgcatggggtcttatgctgaactgctgaaattaaactcccctccagtgtgacttggtctagaaaaaaagaaatactgaagttaaacaggaaccgcctctgccaaatccagtttaattaatcttccaatctactccctccatcccaaaatatttaacgccattgactttttaaaaatgtttgaccgttcgtcttatttaaaaaatttaagtaattattattttttcctattatttgatttattgttaaacatacttttatgtatacgtatagttttacacatttcataaaagtttttgaataagacgaacggtcaaacatatttaaaaaagtcaacggtgttaaacatttagggaatgagggagtataattaagactctgttaaggattactgcacttggctgacttatgcatgacacaggactggcgcatacaagctagtggctacagtacgatcgacttcatggcttccattaacaagctcgatctcaagctcctttggaccatctagcaggagtggccagccttgtcatcaattagccattttgcttagggctttagtgcactagcaaatagcatttactttagggctaaagatatacatatatcaactatcgttgtgtttagttgcaaaatttttcttcaaacttccaacttttttatcacatcaaaactttcctacacatacaaactttcaacttttccgtcacatcgttccaatttcaaccaaacttctaattttaatgtgaagtaaacacaccctatatagtttatagagttctctcaataaaaagggaactatatagagttgcttccaatggctgcttagttctcacagacctgcacaacgcacatgcaggattttcagagggtgtcttcaaagggaccgtatgctccttttatttttttttcaaaatataagtgttttttaagagttttagcagaaattaagacaccctctgacttgcacgtttgtatatattcatagcattacaatctatataaccaacttttctttcagattttatttgatccacatgcaagtctcgtcatgcctcagcagtatcacgatcggttttggagaaaggggagatttccaactgagcacttaaaatgttgaggtttgctagttttcactatagtatctggcctcctcttgaatttgggctcaacctccgccattgtgaggggtggaggtagagtatatattagggggtgcccaggaactcggttaagaaaattttttagctgtacctaatttatttttattatgtgtgcaccactcttaatacaaatggcctgtttggtacagttccaactcctaaatataactccaggagttgagttgtggagttgtctaaacccagctccacaactctagtacattttgtgagagctccacccaactccactcctagttttggtggaactgaaattgtttggctgagcttcagctccaggaggggtggagctggagctggagctgtgccaaacaggccctaaattagacacccgtatcagcttaaactcaatataaagtaaagtaaattaagtaagtggcaccctccactattctgttctagccccgcccattgttgcattggtagatcgtaaggcagccgggggtgtagggcgtgccgccgttggcggcgcacgtcttgtccggcgggcagaaaggctgatccctcttcagcccgtcgaaatacgagccgtgcccgtcgccgacgacgaggcccaccgggaagaactccggcgccacctcgtcctccaccgccgccgccgccgccagcgccatttcggcgccgtgcatggcgccgccggcgtatgatccccaagatgatgaggtggtggtcgcgcgtgcagacgacgcgtacatgttgcctgcagcctccacgccgccggtggcgacggcggcggcgagggccgccgcaaggatcacgacagcgcgcggcggcggcgatggcaggtcaagccgccgcatcacgcgcgccggccggcgatgagcaatttcgatggcccgtcgtcgttgcttgctactagctagcttccgttctggtttgctgctgtcctgccgcgactttgctgcgtgtgatatcactcctataaatagcgatggaagggctgatcgagcttcctgaatatggttccatcgtttcgctccggaggcaggccggagtgtagtggtaccctaccccaccctcccttacgataggagttttttttttctttatcttatctttttttatctgtttttttttcttgacccctggcaatggccttttgacagtgtgcgttgtgtaatcaaattttgttctctttttctaacatatatattgacgtgtaatctttttgcgccttcgcgaaaaaaatgtgtttattggtacggtttattaaaatgtatctctactattatgaaaattgaaaatattttcatcggaattttggtacgtcatccgtgtttgaatcggttttaattttatgtttctgtcaaatcatttcctttttttcttacgccgctatgacgcgcgcaaattaattgggccagcatcttttcacacgctccttgccgtacgcagtgattgggctcgcgacagagtctgttttccacacgcgcctttgtgcgccgctgtgattggacccgcaacaccctcgctctcgtgattttcaacatgtccgattgggcctgcgatgccctcgtgagtgtaatttgccttgccacatgtccgagtgggactgcgtcgccctcgccagcgattcaaaaattgaatgttttttttgtcaaaactatggtacgtaatccgtatccgattcccgtcacgcgtaacattcattgcaaagtcgcacccacgagcaaactgtgaaacagagaccgtacgatgtggataccaagctgtcggtgacatgggaccgggagtatcatgactagaggcttgggcagccgcggtcacccacgtggcctgaccccctcggggggtcgggcccgagggagacgtgcccaccccctcctctgtctccccgaggggtcgggccgctcctgtttcggcccctagggctggggcgccccgaccccctgtggtattggcgccacgtgtgtgggttaggtgggcacagcggcgctcaccaaaccacatttattgcggaatggacaagcgcgccacgccgcatttaatgcagcacggcgcacgcatatccggtccgtgaccggtcgcagtgtgtgaccggtcacagaccggtcagatcgcgggttaggtggcagcaggcggcctgtcacacgcctcgccccgtcccgtcgaaatgatgagagcctcttggcactcgtccctagctggagccggcgtggtaactcctggagttagcacgtcagtcccggctcgattcatgccaggcttcatcgcaaccattgcaaggaagtcactgtatgaagaagggcagatgtgcggcatgctaaactgacgcgtggtggagaagaatgaccggtctgtgactgggctgatgccggtcacgtcatcggcagacaaccgtgctcccgcgttgcatctgcttccggcggagtggaggtaggtatgacccatcccatcggagggtcattcagacagcggccattgcagatctcctcccattaatgaagaaatgacagggtgatcccctgtgtccgacgagtgacggcgctgggcatcactcaaggacaagcggtgatttagcttccaggcggaggcgcgagtgaatatttggtcaagatagggtgggtccccacccaaaagaagagtagatagaagtagtgcatgtggtatccccttgagatataaaaggaggactttgcccacctaagaagagaaaaaaagaggggggagagagaaaaagaactagaggagaaggaagagggggagatcgagggagaaaaagaaccagaggagaaggaaaaagagggattctagagcttgaactctcttgctctccatttgctctgtaactccttcacacacagatccaccagaacacaggagtagggtattacgcttctcagcggcccgaacctgtatacatcgcccgtgtcttgtgcatttgctctctcgcgaacgttccatagatcgagggtgaagaatctcactcagcgcccccggccgaaccggcaaaggggggcctgcgcggtctcccggtgaggagccccacgctccgtcacaagcgaatgaaacttgcagagttcgtgcggatatcacgtacgtcgttttgcatagatcatccgattctattcgtattacatggcacgattccttagacatgttagcatgatttcaagttagtctccacacatgctcgtacatattatcaggataccgttacaaataatccataagaatcaattttactttcaaaaagaatatgccaactgaaataaaggatgatcgaagctgctgattccgtccatcatcatttcttgcccgatttgaagtaaagctggacgacaattcgagctcgtgtttgaagtctcgttatttggcttatgcttattcctataagccaaagtttaaattttagaacttaattttgaatttgaatttttggttttcttattgtactttattttaaagcatttgcttttgagtcgctaagaatatgtatataaaagatttgcacataaatagtcttttatttgataataacttattcggataagcacatgaataaataaaataatgagctatgattatttatctactgacatatatgtataaattaaattggccctaccccttacaacgcacaaacatcttttctagtctacttaaaaaaatacgcaagtattcctgtagaaattcttgtacgttgtcctacactcgatccgtatccaatcgctccaccacgtttgttcattgagggcgaaaccatcctataccaagcggttgaatcggactcactgttccgggcgaaaacctgcttgacttaatgtaacaccccaggtaaccacgtacctagagtgccacaccaaacatacactcaaaccgctaactcccaaaattattagaaattttggcagagtctcccctgtaaatatggacatccacgacaggcaattataagttaaactaataacaatatcattcccacaatacgatccatccttataatccatggggaagaaactattaaaaatctaaaagattattacaagaccgaaccatgatatagtttaagtatcattatggacctaagcaatatagtttgatagtatacagataaatgtgtatataagggtgctacttcccgcccatgcatgtcggtctcaatatgtacctaaaaccaattaaaacacaatagtgagtataaaaatactcaacaagtacaatatggagctagaaaacacatatacacattattgacaataaagcgtaaacagaaggctttctttctttaataggaaacacattttcaaacaccaagtcaaagaagatagtagttcccatcccgggcaggcatgaattaaaatagtagtttccatcccggacaatagtgaatacatcctagcatttgccggcaaagccgagtaagcgtgatcaacgcttacccacaggaacttgaataaagaaccaaattgcactcccatgactacgcatggtacttgaataattgaaaccggaatcaaagaaccaaattgaaaccatattgcacattcatggcaaacagggaacttgaattatttacccagaaccagaatccggaatattgaaacaagaataacatcgtaaacataggataaacatgaaaacctaaatggcgcgaataacaatatgaatataagcggtcacatgtcacatagaaatatatcggaaataaatagatagagcaaacaatccatcaatcacacacttagttcgtcatgcacttgccttcaatgaagggttggtatcatacacgatctgaaggaccaccacctaatcacaaataaaacctcagcaaacacattcaaacatgcatataaaacaatgaaaaaggtgaacctactgccccatcctatcaaaacgcaataacaaggaacgccgcttgcactataaacaatattgttgcttcaaacctttatatcttgaaatatgaaaaggctatgaccgcaaataaatatattttggaaatctacagaacaatgcctacaactcttatgtggaaattatatttttattatgccattaaaatggtctaatttgcgcttgaaagcaggcttcacaatctgtccagaaaattcagactatccgcactaaaacaatcataactggagttctacttgcccaatcagagtgtactttaccaatatggaaagctaagaaaaatctctacaactttgtctataggagtcttggctgttccactgtttagcccatccaaaaacagttcaatctactactatccagattatggcataaaaacaacagttatactcaaaaattcgtatcgtctaaaccacttgagataaaatcgcgcccttcggtcagaagatagatataaatattatctacaactttctagttatacactttcgcagaaaatatcatttagctctccgaaacttcaaaaaaccgaaacactgtaaatctgccaacatgcagaacagccaattcgaaccacaacaaacaaaactccttctctaaccttccttatccacaaattaaaccactaaaaccaccctagaacaactgatataacaaggggaaaaacctcacctataatttctttagagaacttgtgaggagacaataggggagactctgatctaatccctccttttactcctctcctcctcctcgttccatttttctatttcgctttttgatccaagctatgaaggtggagatctagggagggcaatttgttgtagaggggagagatgcgaacataggagaaggggaggaaggaggcgccggccagggagaggggtggcggcactatgaggggaggtgggagtcggttcccctctctcttggttttagggagaactaatgggctgggtttatgggccttctcatgttggcccacttctaaagatatttttcttttatttatttctgttaacatctttattttaacaagttaacccaaactaaaaaaactaaatatcttttaatatacggggtattacacttaaatacttaattaaggagatcgagctatagcacattactccatatatatgtggggctagctggccatttgtagtgtgatcgatgaagatgatagagacgatcgagatgcctaacttgctgttgctaattaattaacatgcatacacatatataatctaatctaactctacttaagaaaacactatgattgcgtggctctcccgcacctggcacacatacatgggaatggtacggaacaaagataaaaaacaagtcaagcaacggctctaatttcgagcgtgcatcaaatgcattaaccgagcaaaccacccaatcacgaaacaatacgtgatattgtgatatatgaccttgattttcctgaggacaacaaacggtgtaagcgggtgcttgaggccgggctggagagggcggcagtgttgggtgcactttatagggaggccactgattctcttggctacaactccatctgctgaggtggggggggggggggggggacaactgcaaggggagagccaatggcgatggtggtggcgcgacaacgaaggagggcgcggtaacaacgacgagcttagataggccacgccgcccctgatccatgtgcgggtggaaggggagagccgggggcgtggagaaagaggaagaatgggataattcagtggaaggggagagctgccgccgtgtccctctcccgtcgccgccatgttcctcctccggcgccgcgacttcaatctggacccttgcgctaccgccgcctggacgtcaactctatcgtcgctaggaacaatgacttgaaccctttctcatcttttctctcccgatcctacccatcccagacttaacggttagatgtgttttggtacctagcggtaccataaagatgctccatggtacgagcgtgatatgacaagtagtagtactagtacagtccatggtacattgagattcaattacaacaatcaattataatgagtaattaaacaactatataaacaatattatagtatactacatgataagatcgatagctctatagcaagctagcttactgcttgcaattatttctgtagatgcagccatggccggtgtagggcatggcgaacgcggcgcacgagtgaccctgcaggcagacttgcttgttcgccgtgagcccgctgaaggacccgccctgctgcagctgctcagctccgacgaccgccatcgccgccgggaacaccacctcgtcctccagctgctgccgccgccgccgcggaagcagcagcatcgcgcctgcagccgcgtacctgtcgacggccacttcgctgccgccgccgccggcgacgacgacgacggtgacggcgtggaggaggaggaggaggaggagggcggctgccagctgggcggaaacggccgccgccgccgggacgacgcggcggcgcatcgtgcacccgcgctttatatattttttcctcctctggccgatcgatatactaattgcgcgagcgagcttatggtggtagtagctgtgaacgcttggagtagaacaattattggaggttaagttgttgctgtcttacaaaatgtctccaagtgccaacaacagacatgtgagtccgtgactaactagcagtatactccatttgggtgcattgggaattggattttcatccctggatggacatccctcatttctgctatactctctccgtactcgtaaagtaagttgtttagaacagcgacacagtcttcaaaacataattttgactccttatttttataaaaatatttattgaaaagtgatatatgtatacttttatgaaagtatttttcaaagacaaatctattcatataatttttatattttcaattgagggttattcatgatttatattttcaaggtttgatttaaacattgtcctaaacgatttcctttacgggtacggagggagtatcatctaaatagttataaaaaaagtttgatgcaatttaataatatggattaatagaaattatatcattacacaaacatgcaagactaaattcaactttcacagaaaaaagaacaaattaacttcacaattatatttgttatttttgttccaacttgtagaagctaaatttgaacttacatatttgtggagtgatatattttatattaatctatcttatcatttttttaaaaaaatttattactatttagatgacatgcatgcaagaaataaggggatatcttctcaaagaaattgaaacactttcccggtgcatcgatcaaacacaaagaaatagtaataaaaaaaaaggccccatcaaaattggcaaaattcagaaatttcagggaaaaatggctacctttgagccaaatttctaataagcattaagaaaaactagcatattgtccgtgaagaaaattaacattaccatgttattatcatatcttaattgttgtagatatttgttactcatatgtggacatttttagctcacactgttttttccttcccacaaaaattaaaaactgatgaaagtagttgacatatggactctctagccctaaatatcatttatttatttattttaaaagttgggaattggtagtaatgttggtagcaaaaccaccaccatcactagctattctcttttataaaaagtatatatatggtgggtgaaagtgggaggtcaatagacttgtctgaagctgcaccaaaatgaacgaaattcgccgaatgtcgaccaatgcagtccgattcccaaaatactgtcctacgcagaacagtcccgctacagaaaggaacaatagaaacgctcgaaaaactcagctttcctatggttatgacgaagatacttgcagtgtgttgtgcgctgcttggtggctaaacagaatggcggcctagggatcaagaacgtgcctagacaaagtttatcagtaatttagtaatatttacaatatcaatcaataattaaatatattttcataataaatttgtcttaagttaaaaacgttactattttttcgataaaattaattgatcaaacttaaacttaaaataatatgactttgatcaaaataaaaacggcctattacctgaaatagagggagtacataataatacaggcatgtggagtaaataattaattaatacatgcatgcaattatcacaaatcgagctagcaggcaccaggcagatatgtgtgcttgcagctgctaattatcttttgcaaatgcagccatggcttagcttggccggaagcaggtgttgccgtacgtgcacggccgggtgtacgcccctcctggctgcttgccggcgcagccgccgcgggggcacgccggctggttcgcctccaaggcgccgtagccgcccccgccgccgcccgcaccaaccacgagaccgcccgggatgaggagctcctcctccggcgccaccacgtcctccaggcgttgccgccccagcgccgccgccatcatgccggcgagatcgtcgacgacgacgcggcggtgagcggtggcggtggcgccgctgccgctgctcttcttcccggcgacgatgaccaccctggcgctgtacccgccgccggccgccggcgccgccgcggccacggtggtgaggaggaggatgagaagggcggcgagggtgatgaggagcagctgcgccacgaggccggccggtcgccggtcgctcccgagcattatcgtcgtcgtcctggcggcgctcgatccagtttctctccgggcactttgggcgcgtgcttatatatatacgcacacataatgttactccctccgtttgaggttacaaagatgttttgatttggtcataggtcaaactactttaaatttaattaagtttatacacaaacacaaatataataatatttataatactaaattagttttattaaatcaataatcgaatatattttcataataaatttatgttgagttaaaaatattattattatttttacaacttgattaaatttgaaatagtttgaccttgatcaaaatcaaaaatcaaaacgtcttgtaacctgaaacgaatagggtaattagttagtgctactaattaatgagtaagtttatgaagttatatattgtcagttttttttcatgaaacacagtcacagtacagacgtatatgctcatatattaattatacacgtgcacgcactgctacaatgaacacatgcacacgtacacgttgagcaccttcgaaaactggaccaatatatatttagattgacaaagccactacatatatctcgtcgtcaactatacgtgcacttagtccccaatgaaacactttctagtccaacgagtctaggcagagagtttcatcggggatttggtacgtaacaatgttttaagacggatgaagtattaactaaatatatatgagcacacgtgctaaatttaaaactttatcctagctttatgtcgccgttgcaagtgaccgtgtttgcttaatactctctccgtccttaaatgtaagggattttgatgggatatgatacatcctagtacaacgaatctgtacatgcctctgtttagggacggagggagtataagcaatgcatcagcatatgttttgatcaactggaacgtacagtggtgctaatcgatcatgatcatcagtgccagcgcacgataaatatttcgtggcgatgatgattatatcccaagtcctactacacttgaactaccggagccactagcctctacgaaaactataagattggcaccttgaatatggtcatgtggtacccacgattgcaccaattttggtgatatttcaattccacctaaattaaaattaccgaaccccagttctacaaatcctgctctcttttagaagaaaatgcaacattaattttttactggttacaaacttacaattacttggactccagataggggaacgacagcaagactgaaactctgaaaattgcacaaaggttttaattaattaattaaacagaaccgggtctactcaatactcccttcgtactcataaaggaagttatttaggacagcgacacggtctccaaaacacaactttgacttcttatttatataaaaatatttattgaaaagtgatatatgtatacttttatgaaagtatttttcaagacaaatctattcatataatttttacattttcaaactcaacaacttgagagctattcatgatttatattcccaaggtttgacttaaacattgtcctaaacgacttcttttacgagtacggagggagtacagtttaatctaccctgttacgaatggattactgtttggatgacttatgcatgatacaagcctggcgcatacaagctagccactgttatatatgggctatacgcacgcttccattattaacaaagctctctctcaagctgctttggacacaactactactagtacatatataggagaccaggaatggcctcccattttattgagggctatagtacattaacacatatggcactttagtgctaaaactaagccacaaatatcaaccactcatatagttgcttcaaattcatggctacccgatagttacctcaatcttcttcttcttctttttttccaaaaccacaagagggagggaattttctactttatattaagaagaaaaaaaaagggagttgaatagtcccttgggcttgaaaaattggataaaaaaatcttacatctaaaaaccgataaaaacccatacgaagagcgaataaaaaagactgcattgacatagctattgtgactcctcacaagtcatcgttgtcaagctgacctagttatcttaattcttagaggccgacgatctcatacatatatcttcagtttttccatagggtatcttcagaagagaacataggctgtgcacataagtttcacgtgcacactccatacacaccaacaaataaatgtcactataagttctagaaaaaattgtgcatatactttcaatagtaatacatgctagaatctctattgtaaattatcttatacatgctccctttaacaagcttgatcttaagccttttggatccacccactggtacacaggagagctttggtagtgaccatcaggccacgaatgtagtttggtccttgagtgcagtagcatattagggctaaaagctagtgagtgcggaaactattctgatccctcaaggggatatcccctcgttatttacatgtcactcaaatagttatgaaaaagatttaaaaaaattgagaagatgtattaacatgtgatatatcgctctacaaatatacaagtttaaattcaacttttatatctcgcaaccaaaaagactgccaccgctactctggggaagcgagtcggggactaggggagaagagaacacgagtatggatggggagtgggggatttatggtttagttttgggctgggcttgtggccttttaggctgaactttgcgagtctatttttcagtttttctgccgctaagtgcagctatcttcggctattatagcggctatctccagctaagtgtagctattagcggccgataaatcgtagcgtcaaaattggtatatcctagctattctcctccccatccactctctccagagatttagaacattgctcccagtgcatcacgcataaagtgggtacgaataataatgtttgctttaattatacagttcccttgattctcagaaatggtttacatctccgatttctatctaagatacacattcataaatttattcgacatataaaaaaagatgataggtaatatgacaaacccctttaactcctctttattaccaactggtcttaaaccatatagatttagccatcaattctaattaacaccgaattaacacataaatgatcagagaactcgcagagccacactgaatattaaaccttcaccctcctccgtaaaaaagattaactcgtgatttttattcttagacgggagagagatctagtactacgccctttaaacaacaggagtagattaattaattactgcattagcaaatgcaagtacatacgttaatttgcaccaccgccggtttaccgtcatcatcaccgatgtgtcgcgtatacggcggcggccggatcgatcgatcacggccggcggtggccgcagcggttgccgtacgtgcacggccgtgtgtagggccgccctctggcggcgcacccgccggcgcgcgggcacgccggcctcgcccggctgaggcagccgtaggagaagccgccgccgccgccgtagtgtcgccttgctcggacggcgaggccgccgccgccgccgtcgaccaccgggagctccgtttccaccaccacctcatcctccagccgccgccgccgctggggatgatgatcgtgatccatcagcgccgcagccacgtcgacgtcgtcgtcgacgccgaccacgcggcagtggcggcggccagcagcgtcgtccgtagctgtcccggcgccggcggcgacaatgagtacgccggcgacgaggacgaagagcggcaatacaccgtactgcatcgttgtcgtcgtcatcatcacacatataactcggagaactatacacgtagtaactatatattgagttatctatatagacatgcaattgaataatatactcgctaaatatatgacgcctgaatttttaaataatatttgataatttttttattcaaaattttcacgtaaatataaaaatatttatatcatgcttaaagattatttgatgataagtcaagtcataataaaataaatgatagttatataatttttttaagaagacaaatagtctaacgttaataaaaaattaacggtgtcatatattaaaatataaaagtagtacatatccagcagatacgtacaacgatcacgtgaagacgtgattcatccctcatcgccatcgatcaaccacaacacgacgatcgatggagttacgatgcaaaacaccgaaacgccgctactacaccaggtggcaccatacgtacacatacgacacatgcaacggacacacgtcagatactcggatcacagtcaacacgaagaagaggcccagcagcccacagacaatttagttagcgcaaggcccacaaaactgtgcggctcggcccacatctcgacgccgagtttgaatttacgcccttcatacgcaataccagaaatagcgcgtcactcaacctacaaaaccaatatacttaaggtcttaggatagtatatatagtgtccaattttagatgatgcgataagtgagaccaacatatcagcgaccacatgtggcaagaaggaattagtggtggagggggctcggggtgtgtggtggcaaagtgagaggaagatgatggagcggctaccttgctcggctatttggtcaccagctactccctccgtctcaaaatgtttgacagcgttgacttttttaaacatgtttgaccgttcgtcttattcaaaaaattttacgaaatacataaaactatatgtatacataaaaatatatttaacaatgaatcaaatgataggaaaagaattaaaaaatacttaaatttttttgaataaaacgaacggtcaaacattttgggacggagggagtatatgaatattatgagatgttttgagtattttcttttcataattattgtatggtatttgaagaagcgacaagatcgtcgttgtccctcaagggggattaaatgggtaatttcccccaagtcacattcagcttattatacacaacgccaagcaaagcataagcggtcgtggtaatttaatcaatttcaaaatctctcggatataagtgctcataagaataaggtgtacgcacgtgtgtttataagggtaagtatacgaagtgttgtgagcgtcaacttttgcactgtactactccctccattcctaaatgtctgacgccgttgatttttttaaacatgttttaccgttcgtcttattcaaaaattttaagtaattattaattatttacctatcatttgattcattgttaaatatacttttatgtatacatataattttacatatttcacaaaagtttttgaataagatgaacggtcaaacatgtttagaaaagtcaacggcgtcaaacatttagggaaggagtgagtatttcttaggggaaaaaaaagcatgcatatatatggtagatcgagaggcatcgagagatcaaagtgcagtgagaagtgagaattaacccgatcgaagcacagtgaaacacacacacacgcgtgtgtgtgtatatatatatatatatatataacagtcgactgatgatcaaatcacgctttaacatggagtacgtagttgtacagctacagcttaatttgcacgattattcgattaatttgtttggtcgatctcgtcatctcatgcgtgcgtgcgtgcggcgcccggccggccggcggcggcgggcggcgccgccgcatcgcgataccatatcacggccgccgccccttcatgcacccgttggcatacgtgcacggccgggtgtaggcgtccgccccacgcccacgggcggcgcagccgcgcgggcacgccggccggtcggggatgagcgaccccgtggcgccgcgcggcggcggcggcttggtggcgaggctgccgcccaccaccgccggccggaggaggagctgatcgtccggcgccgccacctcctgcagcagctgccgcggcggcagcggcagcacggcggcgtggacgacgccgcctcctgcacccgcgtatccgtcgtcgccggcgacgaggacgacgtggatgaggaagaggaggaggacggcggcggccgggacagcaaggcggtggtggcgcatcgtgtagctgctggctagctagctagttcttgctagtgttgtgcgtgcacagtgctcatggctagctcaggattccatatatttctagggcttagattaattatgaatcaatgcatggctgagaaaaccgttgatagatatattgtactaagttgttgcagaattatatgttaatgctacttaggttgtgtttggatccatggactaaagtttagtccctgtcacatcggatgtttggacgctaatttggagtattaaacatagactaattacaaaactaattgcattaatgagagctaattcgcgagacaaatttttaagcctaattaattagcattacatccataattagcacatgttaactgtagcgttacatatgttaatcatggattaattaggctcaatagatttgtctcgcgaattagtccagagttatatggaatgggttttgtcattagtctacgtttaatatttttaattagtgtccaaacatccgatataacagggactaaagttttagtccttgatccaaacagtgccttagagcaatcaagattgaaatcgggagaaattaatttcaatcaccgaggttaatttaatttgatcgatcgatcgatcgttggtttgaattattctcagaaaacacttaatgttctcttaataattaattaaaataagaaaactaaatagtatactacgaacgctaattttaactataattaatatttgggacaaaggttctagtcataaaaatgacataatctcatgcacgtttattataacaaaatatttcataatgttaagtattttatttatagtttgtgcatgtctcaattgaattatcaaattaagttgtatcttaaagactttaaaaaaaatagatccaaagcatcattgtttcatggctggaggaatacacctcaatttgtgccaaagatgacaatatatactcttttcgattttgatttttaatgcatgacgtcgttgaatttaaatacacatttaaccatttttgttattcataggtattattttgtgcaaatataaaaaatataattcagaccgaatacctttattgataaaaaaatctaaaacatatgataataacgtatttttacaaaataagacaaattccaaacgaaacatatgcttaaaagtcaactcaattatatgttaaaaacgggtgggacgtagatgtcttcaagccaagaacaacatacagttcgatagttggtacattaggaaagtaggaataatgggcacataccatatagttagggcattatggcagtagaattttaggtctaaaagctacatcaaacattaaattgcttggagttaattaacgagtacttcatacatatacatacagctaggaataccttatatttggggcaacataacgtacttgcagtacagttgcagttccctgtatcttcagttaaaggttactcctcattgcaccttaattaatttggtctcaattgttcagttcaaaaatcaaaagtcctagtaaaaggaaagtgaacaattcacacgtcaggcaaatcaactttgttaatacttggagctgagtgggctttccatcagtgggccggcctttattgatactttcctgggcttctgacagaattaggtgcttcttagccttcctatacggacagaaaagatgtccaacttaataattacactattcttgttcatctcaaagaaaaaggaaaaaaagaaagaaaagggaattgtccaactcttctcggctgaacctacactctcaattttaagaaaatctccttttaaaacgaacaattgcttttcacaggttgctgtttatagttgaatttgttctcaggttttggttaatatattgacacgcaaagcttttaaagaaaaaatccgacaggtcctcttcttgcattctaaaagagaaccactgataaaatcatggcaaagttaactgttccactgacagtcaaattacgagatcacatttagttatggcaaagttaattaactgttcctaataagagaccctgtgaccatcctacctgtagttagtagtaagctatcatgggagctcacatgcagtcatggttacaggcaagcagcagcacatggacacaggtcttgccgcacatgaaaccgaactgatgaactcgacgcaatgcagccattggtatcctatactactcatgaagttaatctttattagtattatacttgttcttccaaggaaccaagaaaaaaatgtgctttttttttgtgtgtgtcctgatactgggaatctgcaatctacatacccccagatctgggtacagtaactgaatttgtatgttcagttcaggccatgcaggttttttttttttttcagttcagagttgcagttgcaggacatgctgattgatttagtttggtgatgctaatgtaatgttaatgttgatggagatggacaggagtcagggtgataaacaaaaggaaagagacagagactgcagcaacagcttaggtgtaatctctgatatgatacattccagttgcaatgtcatggatttgataattaggttgatcaggtagggtaggaactgtgctaaactagaactgctgataactttaaaaccaaagcaaatagacaagttcattagtttgatgcaggatacactcagacagaaaaacaagtttattagttaagtgtgatgcaggatatatatgatatgcagacagaacaagttcagattcttcagaaaaccaaaaagtttgaagaaaaatctcttgtcagcaatactttttcagtgcacactcaaatgtgattccctataaaaggcagacattataacaaaaagaagatgtggataaagagaatatcataaatcatatgtcacctcacatcacataaataaaagaaaaggagaagaagaaaaaaaatattaatttaattcttttttgctctcttttaactcctctgaccagtgacccaccctcaccttcttcaagctccctcctctgaagcctcttcttcttcctctgattcctctctccttccatcagcttaaacctctctctctctctctctctgttgtgtcagtgtgtgtgcgtggcttcgaagagcaagaagctagagcttggcgagcgttgacaatggcggagcataaggcggcgaagagcaagtccaagtcaaagagcggcggccatggccatgacgcggcggcggcgtccaagaagtcgaaaggcggcaaggccaaggcgaacaacgccgcggcggcggcgccggcgacgtcgctggacgcgctgttcaggccgtgcggcgacgtgaaggggctccggttcggcgcccagctcgtcacccgcgcgctcaccgtgcgccgcgccgcgccgctcgagctcccgcacctcctccgcgtcgccgacgagaggcagcgggaggcgccgctggcgttcgcgccgacgacgacggcgtacatcccgaccaacttcgccatcctggcgcaccacgcgtggcacaccctcacgctgggcctcggcaccaggaactccaaggccgcggtgttcgtcttcgagtccgccgccatgaaggccgccgccgacgccgcgtggccgcaggtcgtcccgctcggcgacgccgggaggcgcctcatccgcgcggcgcccggcgcgccggagatggcgaggttcaagttccgcaagggctgcgtcaccttctacgtctacgccgcgcgcaccgccggcgcccgcggcttcgcccgcgccgacgagctcagggccgtcgtcgaggccgtcgccaagctcaaggacttcctggaccacaccgccatgctcgcgctgccggggcagaggagcatcgacgtcgccgccgccgccgacgccgcggcggcggcgccggtgggcgtcgtgcattaatgcattgatgcatttcggctgcttttgtgacgaactgtgaatagagcttttatttttctttttctttttcttttggtgtgtaataattaattaattgattgatttcttgatgtgagttttttggttgagatgttgagcaaattcctttgattatgccttgtcaattgctgcattggcatgagcagatgtcaagtaattatactagcttgtaataagctgataaatttagaagttttcaggtagaaaactggaaactgatctttgcatttttttttaaattttgactcctttttgtttagttttcatgctgtgatgacttgtgtatttgagctgtataattttgtcagagctctgttcttgaatctgatttactccctctggacggaggtagtattttgtattatgtgggaagccatggctcaagacacaaatttttgcaaatttatgtgcaatcatggctcagaagtgctcagctgattgtgcattatgaattgaatcttccaacagagatgctttaggtggggagagcatccatgttgaattgaaccgaactgaactgaactctctaattgcttcaagttgagctgtactttacagccatgagattctaattctacggtcactataaataattgctttaccaatgtgaattatgtgatttgcaaggttgaaaactcgaagtctgtcattcttgctgtcgattccagggcaacatttgtgtgaccatcatggatgaatgggagacctggacagctgcggggttgattccaatagagtgatctgtggttggggcggccctgtttaaggaggggttttagtagctttttctctgcttttctgctcctggagttctgttcctggggcgttaggaaataatgtacattctcgctttctttcttaatatactttggccggcaagttttgccagctcggcgaaaaaaaagaaatacacagctcatctaaacaaaagctggagtccagcagtgagggccattgatgctttggaaacacagatccaagcatcaagaatgacaacctgtccatccaaaaggcagaggaaaaaagaacagatcaagaaccaaatcagtaatccgaagtacagaaagttcagacaggcaagctcaaaagggccaggaagcatcactccaatcttgatgccaaacattactaactacttacacaatgatgtatgcattgatgacacttgtgaaaaaaccacacatttcagagcaagcaggctcacaatgtcatgccaccgacaatgccacaaaattccaatctgtctttgctacttcatcaccacacaatgccatcacatgtagaacaattgcacaaccagattggagaagaaacagcaggtagtgggcagaaggtgaccaacctgccaacactggcgtgcacactgccaatgaccaatgctccaaaccatgagatgccaaagggagaaggtgatcatgtccaaacacattggaagcatccaatgattagggttgggtagctcaatctgggacgtcgatttcgcgatctgacgatcagaagcgtttcaactgtgttgtggttagtactatactgaagcaggtctaagttcattgacaaggtgaagagggttgatggaggattgcaagtatggtggcaaagcggttgtgctctacaaggaggttacatgtgcagcaattcactagccaatattgtaatactgatgaaaaaggacatgacatgatagctgatacatcaataatttgtagagaaagaacagtgagagatcttgcagtttggtggtgctgatggcatgatgagttcatgtgcatggtcctatattctttgctctcaatcaaagcagatgtctagagagagggcaagggaaaaggtgcctttacagatggtggatactattatatgtgaatcaagaccattgaacacagcaatggtaaaaaaatgtacttaaggttcctgtaacctcaggatatgaaattagacataacagaattagattacacgatataccataaaaatattcagaaatatggctcttctcaatagctaccaatatgggaatttaatataaatttattcaacttgatacccagcagtcgcccatcggtttaagaggaaaacatgatgtctctcgtatcctcaagtactcaaatatttaaggattacagattttatgctgacaaaattgccaacgttagaaaccaaacccaattgattagtcaggtgtggcaacaccctggttaagctcagcaaatctcatgccaaccctcatggagtgcttcaggaacttctcagcgcagcggcggacgcaggattcctcttgcttgtcgagggtcttccggcggaaagtgtccacgcagtctgtgaagcatcgttccacgagggagttgtacattctcaaactgtgcgttgacaacccaaaaaagtcagcatctttcagttgtaatttgacaagtgaaaggcaaatcaaagagttgatcagaatttacacatcaagaatgattgaatgaatgacataactttcatgaacacgggagaaagcaacggtaagattgcacagtgatgaggtagctgattgaaaaagcatcaaagaacacatgaaacatactaaagaagattgttttactgagctattttattgtactctatcttcagaaccatcctgtttattgactccattggttttgcctatgtcatgcatggtgacaaaccagctaaaaagacaatattccaagttccaacctatgtggttagttatcatgtacatgaacttaatggaaccatcccatcaatagacttcaacatagatttcgcaagctctgcaacaacaacaaaacattgaaaaataacatctacatttacatttctggccacagcatacagaccatgaacagaacttagctatcagaagagacataggtgtagaactagccatcaaatgaatactgccaaaccagcccaaaataaagtgcttctactcgcagaatacacttggtcacaacagcaactaggcatcagtatataatactccatactttcctattagagattatgatcaccatggctaatttgagaaatatgcaagtaaatgaaaagcatccttagctgatactacaatcagacgggcaaataccaaacccaagcaagaaaactgggaccgaacacacaaggatgcatctttcagccgcactacagtaataaccaacatacataatcctcactacaatcaatctctaaccgcacagctgaaaaattgtagaatcctaaaactaaatccccgtggatttggagtgtgtaagttcaccaagatcacacaaatctgtcagaattttccgcacgcacaacacaaacctcacctcgcaccgtatagtataatcgcgcgcacaagaaagtagccgcaaatcggccatcccgatcactcccatccatcgaggccgcaaaaaaaaactaaggaggcaccgccgaacgaatcccacatgcaagcagagcagccgcaatcgaaagaattcattcgttaattaacatgtagtgagggggcgcgggtggacctatcgcggatctggagctggtcgaccatggccgccatgcgcatcttgtcctcctccgggagaccgtcgaggtcgccgagcatgctcttgtccatcgccgccgccgccgccgggagaggaggaggaaggctagggttttggaggaagagaggagaggaagcgagatctaaaacctcgggaaattcctttttattttctttttattgatgtaatgggcttgttttaattgggccgggccacatgggcttcgaaattaagcccagtatgagaagtgtgaggcccatttgggatggaatcccacaagtttgtgtacaactcgaatgaattcttgcagataaaaaaaacgattctagtatatatttgttgacaaattttcttctaaaaattttgtcaaatgtaaatgtagtataattgtagcttacatttaactacaatgtaacttggttgtaactttcgtatgatattaaatcgtttgatttgcttcatgatttgtgcgagcgaggaagaaaaaagatcatggcatgcatatagctgaagcgatttggtcatatgacctccacttcgtggaatagtgtattactgtatataattgtgggatttttaaaagttgcatataaattatattatagttacatgctagttacaatataattacaatatgactgtattattttcttttttagataatggaataaacagactgtattatatttacatcaaacaaacatttatcgacaaatatatggacagtcttaaaaaaattactataatagaatggtgagtgcaagagaaaaatgagagagtaaaattcacatacacaaaacaatatttatatttcacaaacaacatttacataaagctagaaaccacatggatttccagccacgatttttgacacctgattcacacatggttgacacaaacacacacacacactgatggattcagtcacactcacacaggcatgagccatcacactggatggactctttatttattcatcatgtagacaggctggtgcattggcaattcagtcatagatcgccttggccttagcagttgcaggggttgcacctgcagctggagccacagctgcagccatgggcagcctcgccagattcagctgccttgccaaccccctcagagtgcctgcaaatcaacaaggcaaattcagaaacgaacagtttcaggcatggaaagatgtagatcacagcatattgttcatgtctgaatctcaggtaggattttttttacttcagtgaagttttttatcagtgaaaagattcagagatatcataccccttctcaggtgcaacacctaggacagtggttgcagtagtggtggtggtggtgatcttctcagccaggtcagggtacatctttctgaaccaagaaaacaaaaaacagaacgcaaaattcagtaactagaaatgacaactttttttttgtcttatggatggcttcaactgaatataacttcaaatcaattgtaagcagaactattggggctaacatagtattcttctatgatggaaagtacatcaaaatcatcaaagcttatgacagtttatgttgacaaatacatagcaaacatattcagaatcaatagctgaagatcgaacgtacccgcagccaccgccgcatccgcaggaaccgcagttgcaacttccaccgcacgacatcttgatcgtctgggtctcttgtaaactcttgaacttgtatagttggatgaaatgagagattgaaagcttgatatgaactcagttcagatatgcccccctatttatagtagtagtacgcttgagaataagctgcacaattatttcaagcattatcatgccagaaagatgtagctggttgaaatggccttgaaaaatcattatcattcattgacgtcagttttctatatgcatttcccggagttttaaaaaagcatatttgtttggggtgcaattgcgtcattcttagttgaagatagtattgataagtgccctaaaatataaaaatattgacgatttttatatacgccctccgtcccataaaaaacgaatctaatactagatgtgacataatctagtacgatgaatctggacatatgtatgtccagattcataatactaggatgtgtcacatctggtactagattggttttttatggaacggagggagtagttgcttacgtgcaaaggttgcattattttaattactgttaatctgaaccaagtttctggacaaatgtgatccaagttttggccaggttcaaatttgctttcacaccatgatgtcaacctttgcttaaggtcgacgccttgttgctcatatttaaatcaaacaatctgaataagtttcttgtatgaactggatttaaactttcatcacgaaaaaccgttgaatttgatcaagttcttagctgtttcaatcatgcatcagtactatgatgcagaccctttgcttaagatagatgcattattgcacagcttgaaattgaatacgtttcttgtatgagttgaattcaaatttcttgcttgaaccacgctggatttgattaagttccccaaaagtcaaacttataccagttccacccccaaaaggcacactcatcatcgtgcaaatgtcaatttaaatgagctaagagtatgaattgaaatatgcaaattcagttcccttgcatgaattgaattcaatggtttacacgaattgaaatataaaactgatgtgtcttgtattttttgaactcaagtttatcatacgccaagaattcagatccctcaagctactgaccaaatcatcgttccttcaaatccacggcgctagctagctacaccagacacgtacttaaacatatcttgtacacatcaaatttgattaacttgctgtacgaattcaatttaaatttattgcatgacctagactgcatttgagtttgatgattttatgaccaaatcaaacctgctctgaacatgttcatgtatcaactgaatttgaaatacgtgcctttaatcaaaccacaaatacatatacctcactgaatttgaagttgttgggatcgatatctcacagcatcgtatcagggtttacaatttcagatctaattttctgaaatttcgttattacccgtgggtgcctgtaggaggttcttccggacggattttttttaatttagcaaacaaaatcaaatttagtaattttcaatgctattcatttgaaatttctgatatttcggaatttcagtccctccggtaggcttcctgatggtagcgtgaaaatttcaggtcaaatgaacagaatttagaaatacacatagaccacactaatataataacaggctaagatcaggtaaagcagccatctgaccaagcaatgggaatctgtaatttctaccatagaatggtaaaaacaagagataatgagagaggaaaattcataaacaagccatcttatatttcactgaacaacattacacagggcacactggcaagatgatgaccagtaattcacacagccaaacatacagtgattgaacccatcacactggatggcctattttatttatttgttcatcacagataggcatgctggtgcatgctacggtcactaatcccttgatcttagcagttgcaggggttgcacttgcagctggagccgcagctgcagccatggtcggcctcaccggagccggcagcagcctcgaacaccgcttcgccgcgcctgcgtaagaaagaagcagacaaattcaggcatagaaagaatgttgtggtctgattcaaatctgaagctcagctggtactaatgagattcttcagttcagtttctttaagatgaaatataagctagatggctataccccttttcaggtgcaacaccgaggatcatggtatctgaggtggtgatggtggtgttcttctctgccagatcagggtacatctttctgaaccaagaaaaaaagcaggacataaaatgaatgtaaagtaactgataatgaattagtgataatctcttctcatcttacatgtaactttatctgaacaaactttgaactttgaagcaatggaaatagcatgttttttttatcatggaaagtacgttaaaatcaaccaaactttttgagcgaaaaaaaaatcaacaaaacgaagtaactgctatttctgaaagcttatttcagtttattttgataaatcagcatatgaaaaaagtacccgcagccgcagcttaaaccgcagttgcaacttccaccgcacgacatcttgattttttaggtctcttgtttaactcttcaggaaattgtgtgcaatgaagtgttgagaaagcttgaggtgagtttagtgcaattgcctagcagagcacatatgtccctctatttatagcttgcacaatatgtcaagcatgatcatgtcaggatgatctaagcaggtcgggaaggcaatttgtattgaattgaattcaaattttcttaccgatagatgcattgaatttgaggaaattcttagctgtttccatcttgcttcaatactatgatgctgacctttttgtttaagatagttgcattattgtgcaatttgaaattgatcacttttcgtgtacgtgttggattcaaattgctggcataaaacaagctgaatttaattaagtttccaaaaagtcaaatttgtaccacgcctaagtagatctagatccgtgtccgtccttgtgcaaatttaatttgaatgggtaaaagtaaaactcgattttcatactaagataacaccttttcttgtacgaatttgatttgaaaattcatgtgcaaattgaaatatagaacctgaagtttcttggacaacctgaattcttgggcacatgcacagcaaacttgattttattgattccacacaacatttgacacacaaggatacttgtggcttggaatcctcaggtttctgatcaggtgatcagaaattcagaacacacacatgttaggctttgctctaggattacctaggttagatctagttgggtggatctattggtttgatgtttgaactataaagattgaaaacgggagagggtttgatgtttgatgttttggttaccctccacccgcgtgaagtgtgtgagagagaacaacgacgacggcgatgacggctgtggcaatgacggtcgtagatgtcccggcgatgaggcgtggcacggaggtggcgtttcccgtcactggctgcaccccctctcaatcggattagggtttgtggggtggagttggcggcggcagcgaacctcgnacngtgnnccgccccggcctccacccccttttatatggcgcagtgtgacgggggcccaccagccattgggctggacgcccccgatcagggcgcgggtcaaggcccgactcaaggggagggagatccatctaacattctcccccttgatctcactatttcttttagcctttttctattccatcacagatttgcacatatagcatgtttcatcgtcacgctcaatcaccgatggattcgacagccactatacacatctctattcagaaacagatacttttacttttgggccctgtagtccaggattcataaggcttcccttaaacccatgccggctacatgttccttgaacacgttgggtggtaggcctttcgtgagcggatccgcgagctccttctgttttaatgtgctcgagactgattgtttgatcccggactttgtcttcacaacatagtactttatgtcaatgtgtttggcagcaccacttgactgattgttgtgagcgtacattactgcgggttcgttgtcgcagtataactttagtggtttctcaatactgtcaaccacctttaaactaggtatgaacttctttagccagttcacctgccccgttgcctcatagcatgctataaactcggcatacatagtagaccctacagtgatagtctgttttgagcttttccatgaaatagctcctcctgccagggtgaacacatatccccgatgttgactttgtattatcttttgcaaaatcagaatctgaataccccactatctagagcgattctgatcttctgtaagacagcatgaggccttttattccttgcaaataacgcaagactttctttaccaatttccagtgctctgggcctggattactctgaaatctgccaagtaacctgataacaaatgccaagtcaggtcgtgtgcacacttacgcgtactgtaggcttcctacagctgacgcatatggctttgttttcatttcattgagctcatattgatttctgggacattgcgatgccccatacttttcccctttgactataggagcaggtgtagcactgcatctgttcatgttgaatttcttcaacaccttttctatatgtcttttgagaaagtcccaatgcatactttgttttatctcggtgaatctctatgcccaaaacatatgaagcttcaccgagatctttcatgtcaaagtttgaggacaagaatttctttgtttcctgcagtagactgacatcactactagccagtagaatgtcatccacatacagaattaggaaaataaatctcccattcttaaactttgaataaatacagttgtcctcgacattctcttgaaacccaaatttctttattgtcccatcaaacttcaagtaccactgtctcgaagcttgctttaatccataaatggatcttttagacggcatcccatattttcgtttcctttcatgacaaaacctttcggttgcgccatgtatactttttcctccaaatctccatttagaaatgtcgtttttacatccatctgatgtaattccaaatcataatgtgccactagtgccattataatcctgaaggaatctttacaagagactggagaaaatgtttcattgtaattaatcccctctcgttgcgtgaagccttttgccacaagtcacgctttaaacttttctatattccctctggagtcatatttggttttgtagacccacttacagcctactattttcgctcctttaggaatttcttctaaatcccaaacatcgtttagtttcattgatttcatttcatctttcatggcttccaaccattcagacaagcgagcgcttctcatggcctcttcatatgaggtgggatcatcctccatatgtgactcttctatgttataaactttatagtcatcacggatagccgatcttctgactctttcagaccttctaggggcctccacatttggcacatcctatacctgaggctcttgttgagtctcctgtactggcacattatctgtttgaggctgttgcagctcctcctctggtgtggcaaccatttctattgaatcttgtataacaggttcctcattttcatttattgttgccacaggagaggtaacaacaggtgctggtaccacaatgacaggcattgcaggcacaccatcagcaggtagagagaagaaaggttcctgagtcgacggagcgggtacagacacccgcctctcctcaagatcaatttctcgaactactgagctccccctaatcatttcgccttccaagaagacggcatgtctcgtttctacaaactttgtataactatttggacagtagaacgatagccctttgatctttcaggatagccaataaaatggcagctgactgttttggatccaacttcccaatatttgggttaaatactttgtacaggactcccccacacacggaggtgagctagcg

SEQ ID NO: 9029 - DNA, 2697 bp, Oryza sativa
ccaagcatgtaaaattcctcaatgagtggcttaaagggtgggatgaaagaggtcacagaaataaacagaatatagttactaacgggagcatgaatggtagatcctgtcaagatggttctgatacagattattcagaagatgcttctgattatgagaatgtgcttctaattactggaccagttggggtgagttccattttgaagattacttgccgtttgcattgtatgcttcacgtattgttttgttttttcttttgaatttgctgggcatcatctccttgtgtgttcgcgtgcgtgtgtgttttgtggggggtttgtgtgtgtgagaggggaagagggggggggagccttatcttatttgtttgagctcgggacaataatttttacaccccctggaacttgtcgggaatttgaattggtctgtacgtttgaaagtactaagctacgtctaggcagaatagtaagttttcgaccacttttttctccacatgaaggtgtggtaacataagattactggctgcaatcaattgatgctcctatagtattctattatatatttttgtatgctgtacttgaaaaaaaaggtgtaccaacctataagcaatcagttttgttcccagctgcaaagctgcttcttcattctctttgttcatttttacagtgtggaaaatcagccgcagtttttgcatgtgcgagagaacaaggattcaatgtaattgaggtattgtctggaattccatttttctctaccttgtaagagcttccatattcctatattatttgtgtactaagatactaatatattttggcttgatgaatcctttcagcttcttctttccttttcgcctgtttttctctacaatatctaccaattcgggacttttttgtaacattaaaatgctgtaaaaatgataatactgtattggaagtcctttatttatatactccctccatctacttttgataggcatatttccaaatctgaaaaatttatttttgataggcatatttcaatctaacaacttatcatcttaatggctttcttggatttaatgcgtgactctccattcttccacacaagattagctacatgggcatcgagaaatgtaaatattaatgaatcgcttgtttacgaggaatgactagtagcatatttaaatgaatgataagtagaaccacttatcattgttctgtgtgtcaagatgaaatatgactatcaaaagtagatggagggagtacaacacacacatgttcctcccttaggaacatgaaaaatctaagggtgatttagtatatgcttttccatccctctcttgacacgaccagcttaatatgcccaaaacagttgtgttcccattcttaccgcacaacaagcttcttgctcaaaccctggatctgaaacctgacaagcttcatgactccagtcatcctagcatcaagtacattcccactagagtatttgttcatatgaatagaaattctattatatccatttctgcacattcaaggtactctatgtatagaggaataaataattttgaacatataaaatatggcgctgtttgggggagcttctggcagaagaaactgaaagatctcattgaaattgagcctaatcccattttgggtagattacaccgctcacacaaaccttagcttatgcatttgtctttgcttcgtgtaaaagggttacatgggggttgaagtgttttggtacttggtatatatgttggtacatcactcgttaaactagcaagatggtactattctaccatgcactcacgcccacatgcatgggctaaagttgggctcaactcgcccctcttgggttgggtctcatgttttgaattcaaggagggttttagttatactgatattgtggaatgtgcttatttgaactcgactttgttaagatatggtgatgcccagaaattagctgaaatccatttttttttgctcgctatgaggtgtcacctggcttggttatttgggtttcgtttgtatatatgagaaatgctaacataaccacctccatgcgcacccatactggtgtggatcagtcttgctttagctactatggaatttcgttattattatgaggcacttagctagctcatatccataatgatgacatcaagttcataatcatgtctagttctctaagcgtaatcaaacttcattgtctagtaagcacagacaaaacttaaggttctctaccacctgattatttgagttatgcatttatgatttgtctgttggtctaatcaagctaacatatgataaaaggctaagtaaaggtccatggcctataatcggttctgtcttcatccttatgtttggatatattctaaagtataatcttgaacttgttccagacatacttgattgtaaaaatgcagtagtgtcaggggttataggtttttataggttacagtcagtaaaaatgttatgttaatatggaattatggacacatgctattcaaaatgcagtgctttcattttagagaaaactaggacatgggacatgaacagaattctgagtattctcgttacctagtttacagtacttcagcaaaatttattcctgaaatttcaactctgatttctaaagcttgatttttttattctgatggaagtttgtgacgtttttctaggtaaatacatccgatatgagaaatggggcttatgtaaggcagaa

SEQ ID NO: 9030 - DNA, 6098 bp, Oryza sativa
aacatttgcagcagtacatccaccataaatggtggtcttttcgatccagtggcatctcatgttggtccatactagtggtacagtttaacaatagactgttgtataaacacagcagtatctgggacgatactcgagtaatacataaattctattctacatatatatctccatgccaagtattttcgaagactggcatagcgggcagaagctcagcttgctttcgcactccttgcaaaggcaaagatgccgacaaggcaacaatagcatgcaagcctcgcttgacttgcagactctacatgcggtcaaatctttggagtgtctgttctccttcggcattagttgcaaattggcggcaccaccattgcaacaggatgccgtgtcatccacctcgctatcaccacaaccttctttgaaatccttgctttgatgggcacatacctgttccaagttgtacttcagtgcgtttatcatgctctcattgtacttggccctttgctgccacgcaccaacttccactgccaactgtttaatctggtcctcaagttcagagttccttttgttaatgttctccacttctgcctctttatcccgtatttttctaagtatcttatcctcaacagaggccagcgcctcaaattgctttgcctgaactttctccaatatggactgcctaagccgctcactctgccaatttgacaaatttagttagcacaccaaaatattgtgaaatattaaacataagttacatcactaattgtaactgtatttaaacaaaccatccatccaatgcatagtcctatttgggaacatactgccaagtgtatctttttcttatcacagttcactaactcctttgcttcttctgatttcttttgaggaataaggatgggggttcatatcaccagcaccatttacgtggaataaaagaatgtagacagatatcatataatccggaagtcaatagtaacttatatcaagtcgtcaccaaaaagaaggctgacagctcagctgaagcacatgatcaaagttctccctttttgctttatatataatattgcccatgccctttttccctttctccccactttgattattaaaacatgttaagccagatatacattcctggtgcctagaaattagctgaattcactagcttaccgtaaatgtatgtggcatgggctaagaaacccaacgtacattaaataatactgtttagtgtccaaaggttaaatgaatgatccgaccaacattgaagatcaggtccattttgcaggtaaagcaattgtttaaaagttcaattgatggaagcaaatcaagaatagacaactgaaatttatccaatcaacagaagacaaaaggaactaagaacacaggtggtacacggatagaaccttctggttaattatttcatcaactgaaaatgcattgcagttttgtctttaagcaacagtgcctacaataatgtagcaggcagatcacattaactaagacaaaggataccagaaattctatcttttcgttccattttgtctaacaccgtggcttatcaggattcaggagtcacatagcagtcccatgtgtatactgatgggttagctgtaccaccaagtataatatgtaacacttgagggttcaaagacagtaacttcaggatgatcattttggttaaagaaagggttttagtccaatagagttgctaggcctgcataggcccatctagagtggtatctgggttgtaaaccaaacatagcctaatgttcacctttttgttaaaatttacatggttttcttcaggtggagtactgaaggaattccttgaaaaaagatggtctgctcatgtagagatacgctcataacgatcagcatggtgtcaatagcaattagcaaaggcggaaacctctaacattagcaaagaaaagaaactatctgtgtgtgcccttcacctgcaaaaactatatggcctgaaacagtgacgcttcactagttttccctaacaaaatgatcatgaatacctcatacaagtaacacatgctggtaaagtaataacatcattagttcatttttcgtattagctaatcccacaacgaaaaaggtttacgagtgcctgacctgggccttgatgaagcggtccatatctgcatcgagccgctgaacctcgcgagagatgtcatcatccaacatcgggagcaggagcaacggcgaatcgccggaggagttcccagccccagcgccgctgccaccgccatggcgtctgtcctccagagagagcgccagcccagtggacaccgcggagcccgtctgcaggaaatcgatggacgacatctgggagttctctcctagcagctcctgctccctaggctgcctccaccctagccccgccgcggccgtaagccccatcgcgtccaccactacacagtacggggcaaaagccctatgctatcagcgccaatcgaagcggaatttcaaccaggcgaagaggacgagggttcttcgcggtgggtggggagaaaatggaaactcacgtggtggctgcgcgggctggtcctggaaggccggcggcgggttgaagaagggaagaggcgccgggatctgcccatctaccggcaccggcagcgcgttcctgccatgaagcgcggaatccggcggggaatttttagcgcgaaaattcgtacgcacgaacgcgcagagaatggaattgagatcgcgtacctgaaggaagggggcaccggttgctgctgctgctgcggcggcggcggcggcggagcctgaggatgcggctgctggaggtggtgatgggagaagaacgccatggccgaggacggggaggaagtcgggggaaggagggagagaggggaaagggaaggtagagggaagagaggagagagaaggcgagacggggtctacagttacgaacattttggctcatcgagagttgtttaagcggctaacatgtggggtcacggtccgtggagcccacatgtcagtcacgtatttgttagctctctcatgttctgcatgcttttggaattttgggctgaaatattccgtgagagcccctaaacattgccagtatgttcagttcatggacaagttcttttttgggagaaatgttccgtaatggccccttaactttgctggatatgttcagcctcataagtttgttgatagtatgttcttggtcgttggacgtatggccttgcaaggaaacctcatgagcaggcactcaagattaatatgttagcagcctcttctccaatcagaatttgcaataatgctgaatacaacacacaattattttggtggagcgaggaggaaaagaataagagatacaagtctctagaagatactagaaggatctaggacagtgaaagaggagaggattacaaaagaaatcgataagtttgaagccagaaacagatcgctgccaagagcctcagctcaccatttcaccaattgatcaatcaactccacccacctagagttgtcgtcgttgcatatatttcttctcctaatgcctgcatggagttctcaaaaacgaaatgcttgcatgggctcggcttgaatcgtggccatttcagcccatgtataatattagtaaagcgttggaacatatatgccgtaaactaggccatatgctttaaatggctgacatgtgagccccacatctcatggttcgtatgtcagtgatctatgttagagggtagtattgggtggatctacaatatatgggacaacatcaaatgacatcgataaatttgggtaaaacatagggttatgttgtttatctatatattataacactatggtctaaaatcctgtttgtttcaacttaagattattgtaattcagattattgagtcggattactataagttggattataataatctatagtagagtaacttatgagttgtttgtttctccgaattattggaggaatggattattgggtttgaaagactaatgtctataatgccctcagctattgcagagtgagagaaggatgagatggcggtggcgacgtggcttggcaaaggagctaggacgcagggtgggggctcgggaaggatttgcgcgtagggttcaagcttggggaagcattcgcgcgcgactagggagagaggaagcggatgcacgcactgccagtggagacgtcggattcacacacgactgggaagagaggaaacggatgcgcgtgtggccgggggagtgagaaagcggatgtgctcgatcgattgggttcgatggcagtgctagataatttgcgtaaaattttaagggtagtgggtctttagccacccaataatctaaaaaaaatcatgtttagaggggattaccagattatactaatatagtttatagattataataatctatcatagtaatttaccaatttgtttcatattattactaataatttagattgtaataatcctaagctgaaacaaacatgatctaaatataattcgcataatatgacaccgaagatacattatgacaccaacaaaccaattttgcgatccaccactggcaatagttcaagagcttctgttagaagtgtaaggtgtgtacatgccaaggtgttttcggaggctctgttgcccaaacgccgcagcaattatacagcctcaagcacactacttgcactcgacgtcgggggctattcgattgttttgataggaggtcatcgtttggcttattataggaataagccaaataatatatttgtaaacgaaaaataaattgtgaacaaaacttttatatacgtgttcttggcgacctaaaagcaaaggctgaaaaataaacttcgatgaaaaaaaaccttaaaatcaactccaaatttaatgttgaaaattcaaattttggctaataagtataaacataagcgaaaagatgatagaaaatttagaataatattagtaaaaaagaaatgaatgaattaactattgcaaaaaagaatcaaaatgtttttttttataaaaactattactccctccgtcccgaaaaaaggaattaggatgaaatatgacatattctagtacaatgaatctggacaaaggtatatcaaaattcatcacatccaatactaggttggttttttatgggacagatggagtacctgagaaactaatacatagaaatttctttaaaaatcaaagtcaggaagcatgtctgataatccaatgatatgtaaagagagcaaaactgggcctaatgaagaacacaaatagaagttcccataaacagcatttcgcagttttgcgccccacgtcgcagcaatagcaccccttgatgagtacagcacaaccccgcacaagtgcgcaacaagcctttggaacgcaaaacgtagtagtattatctggcattggcttcacgaattcgtgcaggtccattgaaggacacatctttaactgactaaaaacatgcataaactcacaattacaagtgaacagatgaaggcaacgtggagatcacgtcagaaacaagttgcataatatgtgctgggtattacactcgtgttttgacaatgtcacaatgcatagatgatctttctaagcagaagatgtaacatgtaacaagtgttcttatatcctgcttaaccagcgaagattatatacgttctaaaattttcagaattcagacttgctcctaaaaaatgacatcaaaaggatcttagagtcgttcatagttcagcagtcacaatgacagatgtacaggttaaccgcagcaggatccacaagcagggagagaatctggaatttgaggttggttagtcttagatgtgccaaaaaaggccacagcaaagtaaaaactggaatttgactcagcacttactctgatcgttagatcggatgtcagatagtgtgcgaggacctcggaggccgcctccaccgccgcggccgcccccataagggccaccaccaggacctcccccaccaggcccaccatcccatttcttaccagagccataccctttcctatagctgtctgttttttcaatctgaaagatggaagtgcggaaatattacaatcttcctgagttgtgaccatatccattatggaagcacatggaacagaaggtaaatttagggatgtaa

SEQ ID NO: 9031 - DNA, 2884 bp, Oryza sativa
ttcatgcccatttcgccccttgcccacaaatcctagcatgctccagcccaaaatagaactactagtactgagtaactagctgtggtaggtggctcaaccagtggtgaacccagaacagaaattacagggggtccttatgctcatctgacccatgcggtagccttctcaggtgtccaatgtaacttggttgggatatcccacatggtatagttataactgtaaaaaaataatttacatgtgtccaaggacccctgttgggccttagtaggtacgcccctgggctcaaccagcccaactacaggttattagagaagaaacaataagacattcccttggataatctgccaacactaccaaagagcgcatcagtataggctctggagcgacagtagtcacagtgtgatgccactatcatcggaaacttcactggttggtgacttggtgtcattaattgagacatgttccgccagcactcactatccttctctgcctgacacaattgggcctttttgtcatgcttgctcagattcgtctaccatcttcatcatcctcatctactcgccctttttttctcggtgctattttaaataagtctatttgaatttggattttttttctctcaattaagtccatttgaagctatgaacagtcatttttagactagtttgatagccatcaaaggatagtggttatacagtggttgcaaccttatatagtgattttttttgtcatcgataaacagataaagaattaaaaattgtgcacaacaccctaatttaatcatgtttctacctgagttatgtattgttttgacatgttctctccctaacaaaagtggcacactagacttatatgtcctttaaaagaactagttggaccaaccgaaattcaacccaacgggtgaatcagaacagtatggactaccgagaagacgcagacaacagctaaggtaggcaaaattcaagcaatgtaccttcttgccggcctctgatttccgcggccttcctctctttttcaccttctccggcgtcccatcgcccgcggccaggggagggagaccggcacctcctgcttctcctccgcctccgcccgccttgggaggtccccacgagagcttcgactgaacgcaccgccgcaaccgattcccgtccgcggaagcaggcgaaggagtcgccttcgccggggaaggggacggcgacggcgtcggcgtcggcgcctcgggatcagcagatccgcccatgggaacgagcgagaaggcgaggcggagaggaggggatcgactctagggtttgggtttttgtgaacgatggggggaagaagctcagagagagtcagagtgagcacagcgggagacgggggttggattagcttcacgtttcccgcgcggtgaggcgaaacgcgggcagatttgggcgcgccgcgcatatataccgcgcgtccgcgcgcgcgcggaggagctttggcgccgcggtcagagggcggaacgggatgctggagcctggaggccgaggagacggacactcgcgtctcgagtctctgctgacacgcggcagattatttgatactcgttttcatgtctctcttgattttgtgaagaaaactgtaatcagatttttttttgagagagagagtgcaatcagaaactattttatgtcacttccatcgtctgttgataagaaattatatatatcactagagagacagggcctattccactatttccagcttatcatgttggatcaattctgcctataaataggttgttaaaacgaaccaaccatgacagtataacaataaggcatcacgataattctgggcattttgattgtccatagcataacagagtttggatgcacaacacatagcaaggtttagtcccatgcaagcacaggttcaaaagaaatccacgaggcgatagtttagaggaagataacagctaaatatgtgaccatggagcttatcctctcaaccacgtgttcctgtaagatgagttatcccgcagtgaagcatcatgtggtttgtactccatcagatagctgtgtggcagcttcagatgcctcttaattgaatctcttaatgtcatcacagcctgcacgacagaagaaagaaagtgagtacaagtctagagttcaaacataatagctattgtagcatttgtgttgtcccaaacctggtggtcagatgcattacggttccagacacttagaatgtcctcattgaaacgaacactgagtacaacgccacaaacatcatcactataatcaagttgatcacccactagcaccaacacctgagatataagcacaataagcaaaaggagttactaaaattcaagctaccatacatgtgcaccataaagaacagtttggtgaagcattgaagagcatctacaagttaatagcagaactggacaagcctcctgagaaaagtacatattattctgaaaacttttacatgcatatggctggtctcatgcatcattagtcattggaaccttgaaagaaccatttagcagtttgaaatcattctcaaggtgacttctgcgaaggtaaagaaaactgaatgtggaacatgctagtcccagatcatggcatgaaacaagccatcagaaaaggtttgaagatgctaaaggttatacagtatctggcatagacctaaatatagttgtgtaccatactgtgatgtgacaatgattcctatgaaagtcgggccctttgattcaaaggaaatttataggaatttcagagggtttcattcctataggattttttttcctatataacctttgaataaaaggaatcaatcctacgaaattcctatggaatgcatgttcccatacaagttttggaggaaatttagggccccttggaatcgcaggaatgag

SEQ ID NO: 9032 - DNA, 27204 bp, Oryza sativa
tgtttttttttcacggtgatatcaaatgtttctctttgttattcaatgtttctgattgctaggagtacaagattagggggctattttaataactatgtttggttctgtcgaagggtatacctaacaatggtatttgtaaaaatatgtggatctttggtactaagatatataagaatgtggtaaaaaagatgggagatatagacttttatatagatttgtgccctactcttgttagcggaagctagtgttactattatatatcaatatctcatgattacaatattaagggcgacataatctaatctctatcagcttagcggcgtaaagctctcacatttgctggacggctagcttagtccacttcctcgaataggaactcaatgatattggatgtagctctagatctctctggtcggcttgtggctttctattgggtttgtctagacttgccttggtgtatgttggtgtatctttgcttgtgtttgtttgtattgacacgtttcctctcctccgagagtcttgtatttatactctcagggtgcccacctgtccaagtaaaaataatgaagtaaggctatgttctttaacacctcttcccaacttctactctttcgttttttgtgtgcacgcttccccaaccactaaatggtgcattttttaaaaaatctatatgaaagttgatttaaaaatcatattaatacatttttcaagtttattttagctaatgctctattaatcatacgctaatgaatcactctattttacatgcggggaggtgaagttcccaaccttcaccttcgaacataacctaagtatagatacgattcaaatagaacttgtaatatttgagtaggactctatttctatttttttaatatgaaggaccttccaatcttccatgtatgatagtatgaggctttattccgtatatgacttgatatatggtgaataccgccgagtctaatacacaagtatgaggtctcacgtatccaggacacagatagtttctattctaatttcttcttatataaataaaaaaatagccttaatggaatgcaatttttaattgtggataatggattaccacgcacacattttcaacatcctaaatggcaaagaaaaacttactttattatttgtaaaataactttttacaacatttttcaacaatctaattatcatttcattcctttataacctcaagtaattgtcacaaacttatccatgagcacattcatacagccactatatattccctgtgatactgtgtttttctctcaactttcccaacctctcatctctcatttttcgtgtacatgcttcctaaactactaaaagatatatttttcacaaaataaattctataaaaaattactttaaaaattatattaattcatttttaaaggttttatagctaatacttaattaattatgcattaatcatttggttttgcgtcagaaggatacgtgttgccctctagaccaaacaactgtaccggaagcatttccacacgcccccattactcgtcggaacttttgaccggcgctgaagaaaacatatcccgcaatcaatgatcataatcagcccctaaccccttcccttcctcccttctccctttcccctcccctgaacggcttgtacggaggaccggacagctgggcagccagacgcgcagggacgcggtcgacgactcgtcatcacaacacactccgcccgcgtccgcgaggacgcgcagggccgcacgggggcgcgcgcatccaagccgtgtactcctggtgtgtacgtgccggagcgagtacgcgaccgcccaatggaattcgcggccgctttgaagaagcttgatgcttcgcgctggcccgccccgtccccgtggttggttggtttggtttggttacttgctactactcctactacgactactattccctccctggtttgctcggacgaacgagtcgtggactcgcgggttgggtctgcgcgtctgaccgcgtggcgttgctcacacaggcgagcgaaagcgagagacacaggcgggtgggggggcgacagagagggagagggagagggagagggagagagagacgccgccggtttcttccgcctgctcccgctcgttcttcctcggggtgggtgggtgagccggtccacgaggcggcgtcggcgacggcggggcaacactgccgcagcacaggggtcaggagacggggccggcgttggcggaggagaagattgggcacaacgagactatagagcaagcgacgcctccttttctttttttctccgatccatcaggtgaactaggccatgcgtctgaacttgtctcccttcccccctcttcctccggctgcttcatcggctccttaccttgttggtgacctagaaccgcgtgtagattggcaagattattttttgttttttgtaattttttttgcatgtgttttctcgtgattttaggggaagcttctcccatctcgttgactattgagaacggatattcgaatggagtgagggttttgtatggctaatcgtgagctgagctgggtgatctggtcttcgtgacagttctgagcacgaactggggaactggcttcgcattgaggttccaagaaggtcaccggatttggcgcatgggggtctccgccagctgcttgtggggtggctccgagtcgagggggaaccaaaatggttctgctgcggtgacgtctcctcgttcaggtatagtatttcactcacttggttccagagatcatgagctagctaatactgtcagaattttaatgctgcttgcatttcaaggtctgcatttgcatttaggaaaaaccagtgttgttttacatgaaaatggcgattaaattactacctatcctcttctgccatgtacacatgttgctccaggatatatatggttatggatgtgtcgaacaatcattctttggagagtctactgagaggattttctttttctttatgttattgaagcattcaaagggatgaaatgatgagaaattcatgttttttttaataataggaggaacgtctgaatattttctgtcttttcatacataggaaagtgttgttggcaagtttctctttttaagacaaaagcaaggctcaacacaccaaaactcacacaatatatgcttcatgagtataatcatcactcaagataacacatccgaaaaaaagttcttgatgttcttatgtcttcctttaagcagtgccatctgcaaggaagttttgagcgagctacttcctgcattagggcttaggggtcctgttggaaactatactgtgtaaaaaaaaataggaaacaccatgtaaaacggtatgcattataattaatcatgcatatatgaggatattggtcttaaccttagagcagtcaaccttaatggccactatcatgttttagtgaactaatacatgtacttctttttattacttctctttcctatttttctaaacaaacattgatgatatcacctctggaagaaatgcaggtcaagtaatatcaagagctggaagtaatgtacgagtcttctccctaaaggagttgaagcttgccactcgaaactttcacatgatgaactgcgttggccgtgggggttttggagcagtgtacaaggtgagaaatggactcactttgtgcatcatattttcctggcttcttactttatggccttttattttatcatcacttgctagttttactgtaagaattctctcttgatattttgtaataatacgttttataagtctgcaagtatataatgaataacaactaacaagagtctccttcacttagggaaacctgaaagatggcactcaaattgcaattaaaaagctgtcagctgaatcaaagcaaggggcaaatgagttcttgacagagataaatgtcatatccaatgtcaggcaccccaaccttgtaaagctaattggttgctgtgttgaagggactaacagactactagtgtatgaatatgcagagaacaatagcttggcacatgctttacttggtaagttcattaaatcaatactgacatattgatcaagtaaagtccagccattgtgttaaatttacctttgtgatcaggaccaaggagtaggtgtattccgttaaactggcaaaaaagagcagctatttgtatcggaactgcttctggccttgcatttcttcatgaggaagcacagccacgcattgttcatcgtgatatcaaggccagcaacattttacttgataagaaactacttcctaaaattggagattttggactggccaagctttttcctgacaccattactcacattagcacacgtgttgcaggaacaatgtaagtacatgtaaatcttttgattatttacctgctcttgtaatggatctatgcacattacgtgtagattttttccagaataatcagctcagtgtatgaatttttccaggcagttttgtcagcttactattgttgcctctatttctagtgacccaagttgacctgtcattgtcaaatcacttaaattgcatcttgcttagtctgtgataggatcattttacttatcgtttgggatgttatttctcctgcaggggttacttagcaccagagtatgccttgttgggacagttaaccaagaaagcagatatatatagttttggggtccttgtccttgaagtgataagtggtgaaagcagtagcaaatcgacttgggggcaagatatgaatgtccttgtggaatgggtaacacacttttctctcctcaccagagcactagtttgcagcaattttaatgcccacatcaactcttgatagcagtagtattattcattgattcatgacagtgtaccagcttttccttatgacatacatctacatggtcttgttcatctggaaaaaaaataattaaagctttgatgtggtttaaaatttaaatggcagacatggaagcttcgagaacaaggaaggcttttggaaattgttgatccagaactggaagaatacccagaggaggaaatgcttcgtttcatcaaggtggcactcgtgtgcacccaggccacgtcccagcagaggccatccatgaaacaggtggtggatatgctatctaacccaacagaaatcagtctggagaacttagtcgcaccaggtgtgctgaaagaaccccgccatcattcaagtagttcgggtttgacaccggacacaacctcaaacagaagcaccaaagccaatccagctgattcctacagcacacagaccagagacatgaatagctatcagttgagcacgattgaggtgtcgcctaggtgatacggcacactgcgcgctttcttgccagattcagaggggctcccacattgtcagattttgctgcgctgacagagttttacttggaaatgagaaagtgaataggatatgcttaaagccctgatccatatgcatccggattgaggaaatacacaggataggatgggcattgctgtgggttgctgttgtacacttgtacagaacttgtagttatacttttagggatgcattgcaagagtagtgatgtcttcagacacccaaaagaacttcaccattcgaagacgtggtgaagaacagggtgaagagttgtcacgtgatgatcatagttttaaggcttatttggataggcatggattaggtttaatccttccattttgatgcagaattggttcattatctctgcttatctaaaggacttaaacctaaaccccacctatcgagacaggcctttgatgacattaccttctttttaccgcttattggcccaatttttcttacatcgtagctagtgcaaaaacatgtgatttgagacaaatagttggtttctggaaatcctttgtacactgattttttgttcttttgggatattctcatatatgaagtgaccgtctggactctggactgtatccatttgtgataatattatagtgttgttgtattgaattttcaacagcaattattggattcctgatttcgtgcaatcaaactcagcggggaatgtgcgtgtcattaaatatcaagactattgagcttacacaatcttggtcataaggtgtgaattaccatcacaccccttgcttcttgggatctaaaatgttgataattctgccatgaggatgttttgtgagtgtagcataagcgatgcccattcgcttttgggtttcttttgttttctccaacttgctttctgctgtatatatactctgtagctgcaggggattatcatataatgttggtcactgctattgtttctctgctgtctttcttttttctgtaagggttttcatgctaaatgtataatctttggttttgtgccgggtttaaacctatctttatctaaagacgtctaaaatattcaaaatagtctctcttttttttttgaagtcattcaaaatagtctttgttttgatgtgtatcttaatcagcacatttagtgaatggttatcaaatgattcaaagtatagatcgcacataactccacatgaatcgactgcgactgtgtttctgtacagtgcatattatagttattatagttatataatataatgaatctgcaaattaactgaagatgatagggagaagaacttgcacaaccgtgcaccaaagaggatgacaatacccctgttaagcccttgcttgatttagccagagagcgcactatacatgcctccaccaaacaaaacaatctaaaagcatatacctttctaatgaacacagctaataatagctcacgaccataacctccagtttattcgattcacatgacaacataggcttattgcttctctcaactcactgatgatacctttcctgctaaacatgcagcgagaagaaccatgaacaagaactaacaaaatcaactctcttgagagagactctattccttgtctacgaaagctgattcagcaagatcgatggctcgagccagagcggctgccttgttctcgcattcacgttgctcgtcgtctgggctgctatcagcgacaatgccagcaccagcctgaaggtgagcgacccactcccggcgcctctcggtgtctttgtatgagtacatcgtgttgtggcttggcgctgttgagaacacaatggtgcggagtgcaagagcgataagcatgtctccgtcaaatgatatccctccaaggccgccactgtatggtcctcgtcttgtgacctctagctcgtctatcagctccatggctttcacctggttatgtcagacggaattttgttaaacaacggtttgttccagaaaggaatatgaagtcctgatgggtaaatgagatgtatttgttactgtacgcaaaaaggatatgagcaatgtgatcgaagtcaacagagcaaaaaaagaaaaaaaaaggaaaaagttctagcataattctatgcagtagaagacttcaaatagactaccaagaggctacactgtcccaaccatatggcttgtattgcaaaaatgcaaatatgtcaaacaatctctactgacatgagtgtggaaccaaaatgatctacacaaagaataaatttggcaaacatgcttaaaaaaaagacggaatggaggttggacagcacatcactagatccaaataaggagattgtaggcaacatacctttggtgctccactaactgttccaacaggcaacgcggctcgcagggcatcccaactttggagatgatcatccaactctccactcacctgtaaatcattcaaacaatacattgtttttcagtgtaagtacagaagacaagaatctcaaaggcgctcagccagcacacttacgtaaaagagcactacatagtactaagacacaattcatacttttcatagaaaccgagagagagagagagagagattatatccagaaaccaactcattattgtaaccattgctcattacacaatgtatcgtaccaaccctagaaaagatagcagtgaagatcagtcacttgtggtgctactaaaagctttgcactttcatgtctattagacaagacacatttgaaacatagaagcgtcaaaattgcagaaattgttggctgtttataaaacaagccaataaattacttagaaaccacatatccattttgtcgcaataggtaatacatctgatagtgttatgcatactgagttaagatcctagattttcttagcataaaaagacatttgtctgaactaacaatgcagactggaatgctgaaggaaataataatgacgcaacattgccaaggtatataatgagtacagaaccattgtttcacagtatagaagaagagcctaaccgtggaactgatgtgcatgacatgggagtagcgttcaatgttcattaatttctccaccttcacagatccaggtttggagacctgccaagtagaaagtaatcataagaaaagttgttaacacattcctaacaaatctgtcaaattaatgcaaccatgactcagccatcgaaaaaaaagaacacaaacctttccaacatcattccttcccaaatctacaagcataatatgttcagcacactgtttttcatcacttagtagctgttgctcttgcatttcatcttccttctctgtcttgccccttcgaacagtcccagcaagtggacggttaataattttaccctgaaaaagatttaaaaggatgaatgttaatgaaaagaaaaaatgtattccaactatcatcagtaggagagtttacataccttcctcacacgagtaagaatttctggactagatgctaccaggacacagcctcttgcctaagagatcataatagtatattattatacataagagcgtttagtattatcttatacaaatgttagaaacagataccagtcaaaataagcgcatagtgtaaatatacctgtacatatgccatgtatggacttgggttcacaattcgtaaagctcgatagacttcaaatggattggcgtatgttcgcctctcaaacctctggcttaaaacaatctggaaaatatcaccagccataatatgctccttagcctgcataacagcattcttgtactcatcacttgtcatggttgatttgttcaaaggtgtaccaaactgccgagtgtgtaactttacaaatcctggagaaagcttgggtctggagtgaaaatgaaataagatatagaagctgtgagcaccaaagcagaattagcaaaacacaggattgaaggaatgggcacaggttagcttacacatttgaattgtgcactttagatagcaacaggttcagccgggacttgccatcttggaatgcatcctcggtggttgcatgccgatcaagatttacccaatggatgacatatactttctgcagcaaacacatgaaccaaagaatttgaaatggatataggttttccacaagttgtaactcacggtctcacatttgcagcaagttcaaattctggaactaccaatctacaagttattttatgtcacaaacaggatgagctccgtggtttctgctgttgttggcaaccaaagagaagaagcacaggtttgcaatttggcttcaaatttagtgtaggaaatagtgtgttatatattactagctaaattgtgcattgcaacagatttcaaaaaatatatctaaagttcttgactaaaaattatatttttgttggaaaaatgcatatataatttgcaagcaaacatcgaaccacaaaaaccaaaccacattcacagagatatatatttatccagccttagaagatcccaccaaatctaagggatggaagattcaccaccactactaggttcttttataaagagattttttttcttttgttactgaaagagatgctcctactgatagtctgatggtgatgaagaaaatccaaagtataggttgattctatgataatcctcctcccaggcaatcaaataaaatagcccataatgagataaaggaaatgacactgaagaataagcaccttctcgacattgtcgaagacgagaacatcatcataaagcccaaggtgaacatcaggaaggttcctatcgtcctggggagcaccggagaagggcagcttcttcttttcaacataacggactgtatcataggaaaagaacccgacccatccacctatcacaaacaaagaaaccaaatgccatggttcacatttcataaccaacaaaatcaaatattccccatttcttcttcctactgtttgatttcgttagctcaccggtgaaggaatcggggagctgatcgatctgctgcgggtgccatccttccatcatgctcctggggatctgcataggatcatccacgacctgctccgtcaccttgcccttctcgtggtccatgattgtgaccttgtgctcctttgccacgacctccatcactgggtgggctcccaccatgctatagcgacccttcgaagttcgaaccaatcaaggcacgcagtgttatttgccaaaggataagaatcgataagggagcagattggaaggtggaagaacatggaggggaggggaggggagaaggccgtacgacgttggtggtgccctcgggcccctgctcgacggactcgaagaggaagctgggcgtctccatgttgtcctcggggacgaggcagcggtaggcgagcacgggggtgaggtggtcggagacgatgcactcccacatgggcaccaggttgcccttcccgctcccacgctccgccgcctcgaagaagcgcctcctgtcctcctccgccgcccgcgccgccgcgctcccgttgatcaccgcgcttgcctctggcttccccgcggagcacctcacgccgccgcgcctactcgtcctcctcctccctcctgccgctaccgccgccctcgctctaaccggggccgccgccgccgccggagtggcggggcgggcggcgaggcgcgagggcgtgaacgtggcggcggcgatggactccattgcgataggctttttttccacagctcgtcaactccacttccccccactacgatttggagcacacgcgaatgggagagcgcgtatatataaggaagattcagcgaggcgaccccaaaggagttcgattcttgaattcttggattgagacaggccgaagtggtagtcggattttaccaacacggagtgggatttttttttttttcgtcttcctcccgtcgtgaggaatggttgtggccggcggcggctagcgagatgggtttttgggtttactcttcctcgatggggagagggagacggtgccattataaactgggaaaaatacgtggaaacttaaaattacaataaaaaataaaatgtacgagatttgttcacatcatcataagtactcatgagtaaatcgtgatgacgtggataaatgtcggacgtccatttttcgatccaactgtattgtattttttaagtttccactacatatttccccttataaacttacctattttaaaatatatcattgttatttactattcctatttgaattttacaattatttttgatatattactattttatatatctatctggtggattcattaaaaattttgatcagcttacccttctcccttcccctctccactcactcattttcaatgaaatgagcctaaccacgatggtcaccgatccacctccacctctccggcggccatctctccctatcccctcgccaccgtcgcgcgttccctcccctctaccaacccatctcctcctctagcgtgtgtatcagggaaagggaataattcgaggtcaacctcgtttggccaccttattgttcccctcaagccgaacggaacctcatcttgaattcaggcgccacttagagactctgtcgtcgtcaagcaagtgtaggttggcgagccacctaggcatggccagcgtgcttgtcaatgatggaggtggattcgatagtggagtgacgaggaacacaaacgtaggatgtcaatggcggtatcgaggtcgccgattttactctgcccgaagtgagaggggatggagaggaagagaggggaaccgccgacccagacctcgccatgcaccactgccggaatgagtagacaggggagaggaagagggtaagtagtaagtagtggtaagtagtggtatatctcaaatagatgtaaagttgtaatgtcatgggaccaaataggtgaatggtaatgatattttttaagagttgcaaatttgttatgacatggatccaattaacccaaaaaataaaagaggggataagaaacaaccatgctctcactagttactacttcctccgtttcatattataaaactttttagcattgttcatattcatataaatattaatgaatctatacatacatatatgtctgattcattaatatctatttaaatgtgggcaatgctagaaagtcttataacctgaaacggagtgagtagtaatgttctcttcatctagaataagtttattttttatttcctcacgtttgtcccaaaataagtttatttttaagtaattatcgtatcagagtttatgaaaatacgggatgaatgtgttaaaaatagataaaaatagggaataattacattaagatttgataaagtgaaggtatttttttaaaagtttgtattggtatgttgcaggatgagtaaaaaataaacttgttttagaacggatgatgtagcagttgccatcaatagtctctaaatcgtgggcaaaatctgatgtgatttgcctcgttagagacgtggaacaaatcagcataccggcccggacgagaccaggttaacgattgtttcgatcaacacaggaaaaaaacagatcccgactgaaattttagatgcttgtaaggattttaaatttaaaatcgtaaaaccgattatgaaaagttcaatcgaaatttagcaaaaacgatggtaccacagcaacgcagaatacccacgtgcccccaccattccaccaaccactcccgagtaaacaagtccattcaacttcaaatcaaaccacagcgccggtgaattggcggagtctgtcgctcgcgtcggtcgcgcggggacggcgatgggctcggcccgcggagccggacagaccggaccggaccactcacgctcacgcctgaatttgccggtgcatcgcacgttgctcacgcatagtacaacgcaccatagtgcactgtgcaccgctgtagcctgtagctgtagggtggacgagcgaaacagtcgtgcgcaccgtctcgtcgccgtcgcctcgcctgtgaccgtgccaccgtgcgcgaagctgcgcggaagcgtactcgcgcgcccgcgcccgcggcaccacggcgacggcaacggtaggtgggtctcccacctctctctcccgtcccgcgcgtgtccgtttcgttgtgcgccacccgcgctctcggtctctttctctccgcgagataaacaagacgatgacggggaagaaagcgatggcagatgtggccatggcgcatgtgggggcatggtttgcacgacgaggggaggtgcgatggcgcaacatgccggcgtgccgctccctccgtccgtcctcggcgacaccgaagtcttcgcgcttttaggtttttgtgtgttggaaatggaatacggtggtggctcggtgacggagaccatcgaccgagaacagtcaaccgacggccgggccaacggtcagcgtcagccggcgacaacggtctcgagacggtgctgaacaacgcagactcgtccacgcaaaaaccatttgaagttctcaactggattctcccccagatcaataaataaagtttggatcttccttgtacacgagtactaactaacacaaattaggacgacgtgatgttctctgatcgagcccggtacttgactacctgtccggtggccactttgaaccggcgtctcttttattattttgccgttcaggggttgttcacttagacccatcccattagcagcagtgttactgaaaaaactcaataaatcacgggtcagtttcatacatcaaggggacatgaaaaatgtcaatatcaacaaatctaaactgctcagattgatccggatataaacaaaaaggaaggaaacagagagttatattgtttgctcgttttcttcacggatggaaaggctatccatcaatcatgctataaagaaaaggattttgtcacgtctttttcagctaattcaccccatcattgaaatgtactatttggtccaccattaaaatttatgttttctaaaaaaaaatattctactacttacgcctcatgtttaaaacttttaaatttattttttttcaaatatttaatttattcttacgatcaactagctaatctgcgatagtaatccgctcaacaccttaaatcaaagagaggtaagttgctgaggtctacatgagggagcaaggttgctgaggtaagttgcaagtgaagcctatggggaacatggatggagcttcaaaccaagaagattgcaatgaagctgtttgggttgtccttcaaaactccttgttgccttggctctctagggcatgctcaatgtatatagattaccttagtattatggtgggacccactgaaacatattatcatgtccacaatgtatatgtcaagagtggatattaaggtggatcccacaaacccaaaattagctattgagagagggagagagagtaacactaccatgagagaggaagaagtactatattttttttattccttgtgggtagtctttatgcatatggctagctcaagcaaatgccacctataaggattacactcacaatgtataaagttcactttagaggcttaaaaccaacccttatgttcacattgtggttgcccagagactatatgaactcttttcctggagatgtaacccaatgtttgagatgttgcaaaacaattagagtagcgttttggctcatgttggctttagggttgtttagtacttttgtgactcagcgtcacggacaaattgggaataaacaggaaagatacttcttttcatgcctatccttgaggtgaagtgaacttgagatgtattaacgagctcttgttgccactgctttttcccaaatgttacatggcctcgttataggattagactggcttatacaacctcaagaggtacgtgtgaagttacaggaatgtcctcaaaaagcttggaaccctaagggcatatttgtatatttaggcggtccttagggcttgttgcaggtactagcttgcgggagtggttggagcggtccccttgttatcttctgtgataatattctcgtctggtggcgtatctacaaagctccttcatcattcttcatgtaccactcatctcatgtagtatgctcgaattgtatcttcctgaacactcaactcgaacactacttgcctagtttgcacgttgttccctccaaacagcttgatcctcttctagttgtctggttagaactcgagaagtatttacctctggttaaaaaaatgcccgaagttacatttggatcgaataggaggtacaaccctcactccctcctacagtagtgcctaacatgaatctctatccccagtaaacccagaggtacctaaaacatactgggaaaaaaatagatgatcacacgagggaaaggaagtgggggaggcgtttttttagctttcttgttatttttgttaagacctactacctccgttttttaatagatgacgccgttgactttttctcacatgtttgaccattcgttttattcaaaaaatttacgtaattataatttattttgttatgagttgttttatcactcatagtactttaagtgtgatttatatcttatacatttgcataaaatttttgaataagacgaatggtcaaacatgtgagaaaaagtcaatggcgtcatctattaaaaagtggagggagtatataatatcatttctattacatggaaattaggagagtttggttttctttcattcaacagaaaaggacctgtttggcatagctctagctccagctccacctctcctggagctggagctcagccaaacaatttcagctccatctaaaatgggagtggagttgggtggagctctctcacataatgaactagagagatggaattgggtttaggcagctctacaactccactccagacttaactccagaagctaaatttagaagttggagctctaccaaacaggctcagaaattcatctggataatcaagcccaaatcaatgctcattgcggcccatgacgtataaaggctgaacaagtctacgtaggcccactaaagtaaggcccaactgcccgagcgcggtaggttcgaagcccacgagaattaaaaacagagctcaattacacatgccaatcgacagagcagagcaaaactacaaaaagatcaatgtaccattgaaccatattcatcagtcgatagttgacgcaggaccaacaacaacagtagtagcaggtacataagaacatggcaaccaagctacataacttacgaccattgtgcagcgtgtggtagaacccactcgacaatactcaacgtcagtgagaccatcactgtgctggatgatgtgtcgagtgctcgatccgatccagccagaggcaggcaatgtgcagtggcacccagctccatgcattgccgatcgagtacactcatagcttgatgtagccaaaaggaccagaaggccagaacccaaccggtcggacagatcaacgagcagcgagccatgcattttgccgctataattgaaccgagaacgagatctcactgtacgcgccgccgtgaccacagcccaacgtacctaacgagggaaaaagaagggctatacactagtacgacatgcaggctggccgcctcgtgccgctgccgcaactagcaactgtagatgatgacgaagcatgggagcacggcacgggggttgaacacgagcagctcgacgtcgtcgtcgccacgggtagctgcagcgaaggaggaggttggcagtagtggaaccatggagtcgtaggccaccttgtcgtccgcggcgccgcggccgacgcgcccggccacgacgcggcacaccagcatggcgcggcgcacctggaggaacgcgaactcgcgctccacgtcgtcggggagagaggcgtgcgcggcccggccggaggagtaggtggcgatgccgtccacgtcggcctgcttcccggcgaacccgtggcgcaggatgctgcaggtgcagcagtaggggctcccgcacacgcccgcgcccagggtgcagagcatggtggagcagtagaaccgcagccgctcgttgccgtccgcgacgcaccgctcctccaccgccgccgcgccggcgcccgcgcatcggcgggcggcgcgggcgcggacgaggtcgcggtactcctcgaagcgggtgagcacgcgggggttgtggtggatcctgaggatgcgccgcaccgacggtggctcgccggcgccgggcataacggccggcttccacccggcgaggaagatcatgcggatgatgttcatgctggagtcgaggctggagagctcggagagggagtgcttcatcgcctggtggagctccagctgctgcggcttgctcagcacctcgccgcacaccttgcacgggaacacgtcgccgcgggcggcgaacgacctgaacgacgactgcctggtggtcgcctgagggatctgcctgttgtgcggcgacgacggcaccgcaggagtaatgctgagagactgcggcgagagcggggacaggaacggcgacgcgcatggcgacgacggcgtggacagcaccaccgacgacgaggcctggcgctgaggcaggcacgacgacgactgcgcgagcggcgacgacacggtcgtcgtcaccgcctcgtcttcctcctccgcggctggagcgccagcgccgttcttggctccggacgagtaggagaagatgcggtggaggtagaagcggacgctggtggctagagacgacacctgcctccgcctggctctggacctctcgtcagccaccgtagaagacgacaccgacggggagaacgcgagcggcgatatcttcctcctcttgctgccgccgccaccgccgcccctcccgtcggccccatgtccagtgtcatcttcctccagcgtctgcgtggaagatcccgtcgagaagcagcaaccggcatggccaatgtggatgaacaggaggaagaagagtgacacgaagccacggagcagcgagctgcacctgccaccgcccgccatccccgtatccttgccaccgactgagtcttccgcgactcagatcatatgtgagcaaagcaaacaatgggcgcgacgagagagaggaaggaattctccggtgggcgagtggagatgaagcaaggaagcctagccagggaggagggcgacgaaggcggaaagggagggagggaaaagggagcgcaacgtgggctatgtatcgcgcttttgtgttggcacgaagtacgggagggcaaaaggcgatccggcgacagcaacagggtggcctggtacgcagtaatcagcacttcaccagcaacccccagcacgcaccgcagcgtggtgctgccactctacggggacgatcgtgtcagctgtggcggtggaacgtttagccgcacttaaaacgagaaatgtgattagcatttgattaattaagtattaatatataatatttttatgaataaatttgtaggatttttttaacaactttcttatagaaagttttcttatgaaatataccgtttagcagtttaaaaagcgtgctaataaaaaacgaggagaatctaatcctataagctcaaaacgaccgcaccctacaactctgccagcggccagcgccatgcctagttgcattgaataggagagagtgagattgtgacctttgtgagaatgaccgagttggatgtgctatctatagagaccagctaggcgatcggggctagcaggatgaatgactgaactgggacgtgtaggtttggagggcgctatcattgatcataagctctaaccctgaccattatgtcccccccccccccccccaatctcaacaattattcatcaggtctcatgccaccgcattatcatccatgatgcacgctgtacaggaccggtccaggataaaactagcagtttttttactctgcccaacggacttcactcctcgtcagctgggaagcatgcgccatacgctcccaaagagataaaccaggcagcagcaggcggcagctgcgctgaggcgagcgacagagggcgggacaagatacgcctgtgcctgcctacgctcccaaacaagggcaaaacgtgcaggcaacggcggtctgaccgtgcagatccccttgcctgctgctccgtcctccgacttccgtgctcttcatcataccccacgacaaaacaagctggatttggcataaaatacatgcattttgaggtgggcacacaagtcagatgtcgatgtgaatcctactccttatcttaccttgtcaacaattcacgctcatctgccataatggaggttctgaacatccgatgtgcctcaagtctcaacacagcgtagtaaaacagatcggaagccacaatccagcaccggataatcatctatccaggcacaacgtactcatcagttctctggaatccgagaagctgcaaagctcagtccttttctaaagtttggatccaaactttacatcacatcaacctgtcatacacacacaacttttcagtcacatcatctccaatttcaaccaaaatccaaattttgcgctgaactaaacacagccacagcccatagtgccgcgccccaaatctgcgccttgcacaaggaacgaatgatgctggctgtccggcgcacaaagacacagcagcgctcttgagattcgctgtcattacgatgtcatggaggtgactattgtaccgttgtctgcgtttcttttcctaaacgaaatattagctcatgctttatggtacaactcgccatgttctgagccaaaaggaatacttgagcccatgcatagaaacagtgcaaggagacaccagattatgtgttccaggactccatcatgaaacgcaaaaaggtggtcatgggactagagcatatgaactttatttatgaatcatgctagtcatgggaacttaagatgaactcttaacttcctactcaaagtctacaggcataatacaaagataataaagctggaagtacagtacggaatgaattgaagtacaaataacaagcccagaacagtaaacataccaactgctaatttatgatacaacgcaatatctagtggcccatgaaactaaatgtcacacctacccatcaaacccattcggcagactacacatcgcgtacagcccttagccatcaaacctcatactccctttgtcccaaaatatgatgaaggattttggttggatgtgtcacatccggtcaaaatcacttatattttgaaacgggggagtagattccaacaaatatagcgtgaagctgtgtggacaaataacgagctgtaaattaacatcaaataagtgcagcatagaagcaataacatgttcatcatgctctaatgcattacaatatgtttttttttactgtggctactagcctacaaagagagtactggtgcatcacataacattcgaacatgaccaatcaagattaatctatgcctcccattgccgtatgctgatgctaataaaaaaacacctatttgatatcatgcacaaaaaatctctcttccagacaacaagcctccaaagtccaaagaagacaatacgacgttttgaaaaaaaaaatacaccatcattcttcacataacacttctttttttgtggagatcgcaataactttttttgagaggacataacgcaataattgatattgataaagtgagcatgctcatccgattctttccttgtgctactctaagggttatctgagataagttctcttgacatatgacacatccactttaccaactaaactgtacataatctgaacacaaaaaaaacagcacttttgctccttaaaacataccaatgatgttgcaacttgtaacatactgttacgtcaaatgaagcttcaaattcaggcaaggtttatcataaaatcatagttcaggtttcttcacccaaaaaaaaagttcaaatgccatgacctgctgaatcagacatggagcaaaaccacgagaactgtttaaaagagatgatccttcatagaaaagaattgcgatgctagatgtcacttgattggagagaaagtggagaaagagaggatacactagacctctaaaagaaaatataaaatgaggctcatatttgtttttcttgtagaactggggacacaggaatgtactccataagaaatttgatagctctattctaatgttctaagatcctccataagaatcagaataccaatcctaatgttgtgaaaattctacaacaaaaaggaccgtcaataataattcatttatatcaacacatattgtttagaatataagcatctcggccagcatcatagatttttggtacattgaattttggcaagccagcataaaaatagagtacgaaaatgctcaagcatatttgacccaacaaaagattggtacgcaaaattcaagggcaagtcagcggaggaatttacacttccaaaagaacctatccattagctggtactatgttctactattagcttccagaaagatatgatcagctatatcaaattatcaatgcatttttaggaaggtaagaagaaattaagaatgataagttagttctatgtcatgctctttccgtcaggataattaagagtaagctgcataacaatgcctcatagcattgaggatgctaaggtttgcttgaaactatcttgtattaagctgagctcctcaagctaagggattaggaaaagggatatgaaataagcttaccaacatccaagggatttgatcaccacaaaatacagatgcagaagcaagaattataacattaccgcatcatgacttgagaggaattttcagtactgaataatgcgatgctatggtagaaaatgcacactcacgtttaatagaaccacctgaattgccacaggtcaatcatgttcagacaagcaaactgctaagagatagagagatagcaccagccagctgggaggtctcccacacctccacgccttgcatttcttctctggtaacaaataagcggtctccacccccttccatgatgtgtatcataccacggtcagcatcctcttctgtatccacatagcaactcctaaaacagttctcgtttattccttcgttgttgatgttttcctttgctctcgtttgctccgccaagttggctgtgccattgctctgttcttccagtcgagaccaaacctccaatccatccttccggctgacaaacacctgagacttgtagcaatgcagaacactgccatggccccctccactccctctaggtcctgacgacatataaacccaagggtctttaccaaggcatctcaagtcagcggctccaatatctcctgactttgagcacaccttgtatagtatctgttgcttaacgtcaacatccacatctgcaaatggatctccaaaccggctgcttcttccaactccccctggctcgcttgtttcccacaccacatccccagaacgaatgtcccacagcctcatgtacccagagtaaccaaatgcccccgagctcacagatgccgcaaataccagcccaagctcctgcaggtgcactactcggcctggcgccgacgacttagctgcgctgccagtttgccggccaatctcttgaatgggctttagagttacagggtcaaacaccaggatgcaattctcccggtgtgggcactcgaatgtagctaagatgggtgaattcttatcagctgcatcggcagcaggacgggcggcaatggcaatcaccttggccttttgaacgcgaaggtcggtgggatctgaccattggacagaggcgacgtgccgacctttgaggaggtcgtacacatggagccccggggagaggctggacccggcaacagcgaggccaggaggcagctgccggagggaggtgatgcggtggagatgggtccggaaggtggtgaggtgctccagcgcaggggagtagtgggtgagcaggccggcgccatgggcgaggcagagcgagccatcgtggcgcggggcgagcgcggtggggaagggctcggagggcggggagagcgtggaggcgcgggaggcggagaagccgaggaggggcggaggggagagggcggcgaggagctggtcttggaggccgtaggagtgggcctcgtcgaggaggacgccggcggggaaggcgggcgcggcggagggggcgcggatggcggagaggatcgcggagagaagggcggggtcgcggtccacgaagattgggtttggggaaggcgagagagagagggagatcgggagggagcttgcctccaaggcgaagagcttgccgcccacgttgagctgcttcaccgtgccgcgccggccgccggcaccggcggcttccattgatgcttgctctcaccagtcgctagatgctgcctgtcgaggcgacgacttttctgactccgccgactacagtcctgctgtctaggatacggccttggacttgggctagcccagtccgcctaacaacgtcagcccaactgcctctaggcctaacagccccgtactgtttctctttctctctctttcctttgaagaggaagcatatacaccctccatccccaaaaaaaaaaaaaatctacttctatgatgaatttagatatgtatttgttcaaattcagccacagaagttggttttttctaagatggagtagaggttagtggctatcatgctcctccatgttggtgtttttaccatgagatatatttgcaagttcatggggtttgacgcttgtaaaacttgatatcaggaatttatactcacgattttagtcattttacatgcctttctactatagagaattcctcgtgtccgtccaatagcctaatataatcatcagaaatgtacacggggtaaacatatagcgaaacattgactttataacgaagtgcaggggggcaaacagacctagctagagcagaagatctcgaactttcactggtctttttacagcatttgtgaagccctgtaaatgaaaaaaaacttcttagtgacattgcccaagaaacacgagtccaaactctaacgacaattgagtggaagtggacagaaataaaaagggaatacagaggaataactcaaacgccacagcattatgcgcaacattatgtccccattagaaaaagaaccacgtgttaattctgagacaaaatcgagcaggatctgttcataactggggctctgagcaagtaaaaatactcacttcgagaatcaaatgattgtctagtgctgtaagtatatagatttaacagcaatgtaagtaagataacgtaatgaacttcagtaataacaggaaatgtgacaatagcagtttatagttactgtttatttggcactactaagtgcaggtcatgtgggtttccaatgtattccttatagtaatgagcgcacaaagatagttaaagatagatccaaattgtggcatcatgatgaataactcaaggagcaaacctcattgtatttgaagatcagtggacgcgagtctcttagagttgtagctacttgttgccctgcgtcatttcgagcttttgcatccactggtctctcttttctaaacctgtattttttgtgttaacgaggaaaaaaaagcctttattatcaccgtcttgcaataataattgcatcttgatgtctaatgaaattatcagtattaaattacctatcaaagaaattaattccgtggttggagtgcttctttgcaggtgcaggatctttaccactcatactagatgctgagcttaattgcatcttaagtgtagtcgggttgctcttggaggtactcttggtagaaaccaatgcagattttttctcacttacggaaacttcatttctcttatctccttcattggcttggttcaacaatttgccagcactatctttcatgatcttttgcttctctacctgaaaagcaacaacatacattggtcagagaataaaatcttcttttaataggaaatttcccaatatgaaaggcttctggcaatagatatctgtattgagaataaaaattaaaactataatagtaaaagttcaagtagcaaacacatggaagtgaaatatagaactgatacttaagctcagccttccaatgaaaaggaagtaatctatatagatacaaaagaagatttctgctgcatccacacgttctaaagctccaagtacaagttaatgctatttaagtgcttgtaaaattcagaagtcaaaaccagtgctactgctgggacatggttatcctactatggcaagtaactttcatttcaacagctctggcccttagaacttttgcagaaaagtacaattcaaagttgtatagttaaaatcactttgttcaatagcttattaccaccagcacgagatgctaatacttccaggttcaatatagtttgccaagcaattataagtacgtaacagatggctatcagataagtgttgcatagaagcaatgatttttagcctgcaaataggttagaacttagaagttactcctacttaaagcaaattaggtgttgtgaaggtagcaagcactaagcatgagaaataaataaaggaatccactcatagaagttagaaatgccactgacctcatgcaccaagacttgtttcatggccaaagagagaccaatatgctcagattgatatccctaacatgagaagctctgtcatttacagtgagaagagcacggtagggtaaaataggacagaagtttcaaaaagaaccttgaagtttataatatcattgattgcaggatcaagagaaagtgaaggaacatcaggagacaccatagatccacttatcctttcttgaggctctaactttgtgtttctgtatgtaattgagtaagaaaccatggtatcaactagctgcacaagttcatccttttctctctctgacagcaaattcagtgccacctgaacaaatcttataatgtcagcattcagcaacctaaaagagatgataatatgtacaaaaatactagtagtaatagaaagttgcagtgctactttcttgcaaaacctcttacaactcatcagttccaaactaagatctaactcatttttagtggttagtcgctttgttaaattggcaagggtattcactccatccttcatttgtgggggtattgcaggatgttttgggttaatggcatagacattttactatgccatcctttattttaattcttgatcttacaactcaagtgaaattaaacagaaaaattactatgtgcaaacagggaaggtccatatcaatgattagcacacctaagtaagaacttacaggtctcaagctcgatggagaaataatatgtaagaagggagaagcaatgtcctccacaaaagattctactgacaggtgcctagaaattagcggtgacatttggttttgccaggtcttcagtttatccttcttttccaaaagcattgttcggcacctgaaaaatatatccacattaatcctgctaatggatagctgatagctctatcaatgcgcaagaattacctctgcaaagattttggccattcaatatttggtttctcaacttgagcaaccagttggcttatagttatggcaacaggaggctgatatactgaagtacagagtcaaactatgtaagttagtcaagtatttatacaaacaaatacaataaaaaattggatgctaccatgaagtgacatctgctgagtccgataaacatattgcatcaaagaatctgaaactccaagtatatcgagacatttcacctgtaaggtcttttggagttagacaagttcacggatatatttacagaagcagaaaataaaaaataaaactcctgtaatataactagaatcaggatttcatgcacataccgtcttttgcaacatcgggtcatgataattaagtttcagaaagttctcgtgaattccatccatagtaacatcatagtcaccactgtacacatgatgtgatgtgaaaaagtgaagcaattctaagaaacaaagcatgaaatcaaccgcagaaaacttaccggttagaaatgagtgagaagagagaatcgatgtccttgcctctgctaaaattactatc

SEQ ID NO: 9033 - DNA, 24373 bp, Oryza sativa
tttttccccttggttattgttctcttatttaaggcactaaaccgatagtgtggattgtacttgatagggtgatggataaaattaatactagagttgttttactgtctaaggcattgtagtttaggctcactggacaatggattggaacatagttgataggatgatgggtattagatttgtgtttgagacgatgtcctcatatagattgaagacattcaaccttgagttttccagatcacactgagtaggttttggcaaattttcccttctatttactctcttgatcaacacacgtgttcctgtttttgttgtcatgttactgttatattttcaagagccttaccattcgctgagaaaacaatacttatagatgttattattgtaaatattgaaattctgaaattaaaatcataagaaagtatttttaaatataaatccattgatgccacttgtatggtgctgaacatagatattggaagcttaactttttttttgtcaaaaataacaaatgttgatatttctgaatacacgtgtgccctatatttccaacagcgggagtaatatcaaaaatcataaagttattgggttttataaagtatcataatgtaaaattactggtgaaagtttttaaagtttaaccgaatcttgttctgaacgccaaatatttatgaccggagcgagtactaggtagacaattttcccatatgccataattcttgtagattttggctgcaaaaggctcaaggtttttgctttttattgtactaaaactatcagggtaaagcgctttatgcgttcaatttattttaatattatgatacttgattattgtagctgtgagggtgcctgtcgaaggtatttccaccgaaccatttccaatgatgcagattttaactgtgaaactctcaacatgagtcaagaacaagtggtaagtgcatattcctttgcctcttcaacttattcttgtttaagtattccagtattgccatttaccattaatatttttcaacaatataggaatcatcaaagttcatatgcaagaactgtgtgtataagcaacaccaatgctttggttgtggagagttgggatcctctgacatgtcatcgggttcagctgaggtatgtataagaaaaagaaactttgtatgtccttgggatacttcctcttgtatttggtatttccttgatttatcattttgtttttcaattttcttatggaattgaattaaggcactgcttgaaagcaatttttagggatggctaggagtcaatgataactttgaggaatctgagagcgatactttggaattgtatacacattaaagttcaagaactttttttttgtatgtgctcgtcagcataaaccaatttcctttaaattccaacttttccttcactttttgttaggtatatcagtgcagtaagagcagatgcagacgcttttaccatcctaagtgtcttgctgaatttgactctagtaagaacccaccagtttttgaatgccccctgcatgaatgctttgcatgcaagaacaaaggggaaaaatataacgaggaaacatgcaagaacaaggggcaggagagtatcaagaaaaaacaaggggcggaaaacaacaagaaaatgcacctggcattatgcaggcgatgtccaatagcataccatcgcaagtgcttgcccaggtgtgatatgtatttggcactatttgctagtgatagtgcccttctaaaaggatattttgttgacacggtgttctcttttttaggaatatttcctctgttcccaaaggttgtcttccaaggaaatggaaaactaataagggccaagttttcttctattgcctgtaagctttttgcacttcatcctttttgttagcatatgttctccatctccactatattcgtggaacttattattcacatagaactttttcagaaagcatacgatggtagaacatctcagaagtgcaacaagggatcacctcaaatttccaaaagttatggaagagcacatgcagaagtatgttcccaaaagagaagttgaaaacaaaaaacttattgtttatgttaggaaacgacatagaggtgcatctaagaaacaaggagcttccatggtggaagaagttgatcatgggaccatggaaagtgatcatgttcagagaagtagagatattaatctgcgagcacatgaacaaaccgaagcacctcgaaactatatgtctgaccgtaacacaagcactggtttcgtgttgtcttttgcacctaagtccttgttcccactcccatatccaggcaattgtggttggcttgatgattgattcatgatagtatttcagaaagaaaactgaagatttttaagtttcatgtatggcagataactttgtctgtagcatgtaacaccgttgtgttgatgttcgtgatggtagttaattactggtgactgttgagtataaatgtctggatactgtggcagcgacattccttccattgtcaggaatgaggatatattaagtactattatcactgtatgaaatgtttttcgcgaacgcctgtatgaaatgttattaaaatgcttctgttcatacctaggtgaaacaatgcactaatgtgtaatgcaggtatgtaactctctgttgggcagctttgctctggcctctgagactgggagtgtggctgtttccctacaatggtgaatcggtgatgcaggtcacagccttgcatcttgccgatttgtccagctcatttgaggtgacggatatggtggattttgctgtgtgttcattgtttatgcagtactggttcctccaattattttcataattttcttttctgttacgggccggcggaagctgccgtgaccgtggatagcttgatttccagtggacaagggagtataggtggactgtcaattgcaagtttgccagtgggaaactccagtaactaatgcatgcctcagaaagcattcagttgagatggcatgatgaaattattattttttgcaaactagatgaggagatgacgtgatagcctatttaagcgaaagcgatcgggttgtagtccacattacgcagaagcagcagtaaaaaaacagtgtctacctccgtcagccggaataatggccagcaacagggaagttctacaggtggtaacatgctgtgacggtgtatctaattgggtttatattctaagtttgacactgatgtctgctaattttagaaaggaatacacgtgggcacgtcttggtggttacatggatgctcatactctagcgggtgtttgatacgtttgacggtattcatgtatgcgaacgacacacatacttaaaaaaatttccctcttagaaaaagaaaagaattgtctgaagaggattagataagtcataaaccgcggtgaagtggcagcttgacccactagcaatcgcgcacagccgcacggttgttatcatcaaagattcaaagctgaagccttcaaccagggcaatctccattttccactcccggccgggtcggagtcgcgcgacgacgccaccaaggcaccaactccacgtctccgccccttccggttaattcgctcctacgcgcacccacaccaccaccacgccatggcgtgggagtaacgcgcgcccgctccacaccaccgacccgtggcaacgtttctcatctggcatccggctgtcacgttttcccgttcgctacagcccgcaaactcggggtttccccgtcacgccagccgcccaagcacaactgcacagcagcggggactccgccggtgtgcgccgacgcgagccgcatcaaccagttaccgccacccgcgcggcaacggcagcggccgcggcagcgaatcggggccagggcaagggccaatccatcctcaccaaccgcaccaccaccaccaccaccaccaccgcaaccgaacaaaactcggggaggccgcagaataaaggcgaggaggcagtataccggcgcggctggcctagtgtagtgcgcgctgtactgttcccacgtcgcgtcgaggcatcggttcgagcgagcgcgcgcgcgacgcgggcgaggctccggctcgattccgtcgccaccctgtgacagcagcagccaccgcccaccgccgccgccgctttctggaggcttcccgttggctcgtggttgcggggggactcgcggagtcgcggttgcgagttggctgcctgctactctgctagtgtgctaagcctgccttttagttagtctgggagcacgctactgctactttccccaatccaatccaatccaatccaatcctcgccggcgttggttcgctcgatcggcgcggcgcggatggagacgctcaggaagcaggccagcaagctcagggagcacgtcgccaagcagcagcaggtacgggttcctttgcccaattccagtggctccgtctccccactatgccaccaccaccgatcagcgcgtggcccgatgcgcggctaaaaaaccggaatttgggagtgcggggagctgcgtggtcgggttactggagttcttgtttgctccccgcagttaattccgcatacctagtggtaggaatcagggtagggagtggcgagtgcttgggttgggatagcagcaggccagcagttggtggaaggagctgaacatgaactgctcatttgctgcgcatttctgtatatcagatgatttgttccgaagcttgagtttcacttgttccagtagatgtgcttgtttggtaactaataacagaattccttgtgattacaggctgttcggaagcagttcagtgcacgctataaccaggatccttctcttgtcgatgaggcggaacttgagtgccaccagaatcttcagaggctatacaacagtacaagagctgctaaagtatgtgctccaactgtttgttatatgtgatataagaaagttgtctagctcatgatgtaaaagttattgggcatatgtctcattgtatagcatttccaacgaagtattgtacgaggtgtcgagggtttcattgctgtcagcaccaaacagatggagattggtaactgttaccatggaatatctgttcaacatccttccaaattttataatttttgtgtgatcacgttgcgatgtttcttcctgtagtgaaaaagctagctgaggattgttgcagatatggaaacgacaatcaaaattttggttttattcttgcaagggcttcagttgagtttggtaattcccatagccaaatggagaaagagcgggagaatcttcttaaatttcttggagagcaggtgctgtcatattatcattttcctctctttcttaagttttcagaaccaagcaaaaacaaatacattgcaacatgcaacggatatttaaataaatatatcataaattgtatactcaaaaagctttatataaatcctagaggaaaacatatataatctgcaagcacacatcaatccctaaatagcatcattataagcaacatgcacttattttctaaaaaaacacatgcacagatgttatgcttatcctcaaaacatcccactaactcaagatgtggtgtgcgatggcacttactatcaccaacaccactaacttattttatattgcatagaaatttcaatgctgcctagaatcttgtttaatgttcttaacctgaatcttctaggtttccatatatttttctttttgtacccttgacccttgagttacctgaaattaaatggtgttctcctgaaagtaacaaaacagtgtaaaaaacaattggtggattctactccaagagtacatattatatatggaagtttgctacaaacagaaacttattcagctttgctgatgcttgatatttaagttgatggacgtagcatagtttgtttatgcagtgcatggagctggagggaatttttttttattgctgtgtaaaactgagtgccttaattgcttcatttcggctccaatcttgcaggtttttgagcctcttcgagaaatgataatgagtgctcctcttgaagatgcccgcctgttaacttaccgttatcaacggatcagacaagatatggaatctcaggtaattacccgaagtgagacttcctgttcaccagagatgacaaccagatactaaaaataaattttattagatagctgatgtgatgagaaagcaactgaagtccaaggagagtagcggtaatgcagataattctgtgaaactgcaacatgcagaatcaaaattatctgagctccgaactacattatcagcattaggaagagaggcaactgcagctatggaggctgtggaggttcagcaacaacaggttacctttgaccgtctccttgcaatggtatgataagcctcactgttctcataaaaatattgcttaacatcatcaaataatatgtttttgccaatggttaagacttcatgtacatggcaagttgagcctatccatcgtaacaacatggctatttctcttttgctttgagtatggtgtaaccaatacatgtacaccattaggggtagaaaactgtagacatcaaggtcacaataacctttgggttctgagcagaattggtgtttgtggccatgtttggatgttgctttttttttttccctgtcaaccccaatgtgcaggcccctttgttagttagagcatatctttgcaatatgttgacccataatcctagaagtttctgcatatctacgacaatgaaaaatcccactccattgtttaaggccttggttggttggggtggtttgtcccagtccttataaaatttaataccaggaatttgatcggttttcctaagggcctggtattgactcttaagcccacactctcatacagggttccttttctccctgctcaccttagattgtaacaatcttatcttttatatcatgtggttgcttaagttcccatataaatttctcatctggatttccatttagtagttccagtacttataccatttgtccataggatgttcctttcataaagagtcatgcatctccaatttaccttatgacccacttgcaggttgatgctgagagagcttatcatcagaatgctgctgatattctgaacaaacttcacgacgaggtacataactgttgcaaaagaaagaaatggagattcttacacctgttggcttagaggaaattcgaatgccataaacctggaaaaagtgtgtatgtttatgctgaatatcactctgtttttgttctgctaatttgcacagatggtccaagcaaaacaccatgatgagccggaaaaccattatgatgagacatcatcagatcctaaaacagctgcaacacatgagcattcacgtagcacatccgaagatcacatatttactaatactagtgaacctacaaggactgaaaccagtgaacctacaaggactgaaactagtgaacctacaaggaatggtcaggaagtgcattatgttggagaggtatgtgtgccctttgcactgctgctcataatgatcataccagaacttataatgtgtcaccaactcacaacatcactgtctttcatttaattgcagtgcagtataaaatgttagaccttagcttgtattactggcattgtatctgtgctatctgtttatgagatgttttagacatagatacaccctcttacaaatatggtacttcgactgaattttatgtccacatgatatatataaagcggtttgattctgcagccaccttagaagttaaaatttcgatagcatgagcaatacatatgtgattttttagagctactttttttttaactttttaggaatggaatttagagctactgttggtaaagatggtagtctgaaatcatgtgaatttaaattcaaaaggtgcaacttgaacataccggtgtttcttcaacataaccttttaccttaatctttacatttcactttattcctctttacacctggtaaatactatcaccgaatgtcggtatggaagtcacctggtaaaaagaagcaaacatatacaggcaaaggatatcagtatatgccaaaattactagttcaacaattttagcagttacacaatcagtaaaacagatcagcacattattatacaagctgagcagtttgtgaattactcattggtcaggtaatccatccattcgatgctcaggctgatggcgagctcagtatttccgtgggagattatgttgtggtccggcaggtatacatggtttttgcaggttttattcatgccatggggtaactaatgaccaaaattctgaagtaaagaaccatgtactgtataattcactgcggtagcatcctagtgtatacatctgtgaccgctgcaggactatgatcagatgcagtgcaagcatataattgtccccttgttatatttttaattctccaagggtgaccaggggggaccagaatgctaactaagcattccttgtctgtcttcacaggtggctcccaatgggtggtctgaaggggaatgcaaaggaaaagctggctggttcccatctgcctatgtggagcagagggacaaagccccggcaagtaaggtgatagagcctggattgctgactacttaatctctctcatactaatagttgctttcatcgccctgtttcccctgtacatggggtttttcttgagtgaatagcattttgtagaacttctacctttctgtgcatattcatgtgcttctaggcttgctgttacccaataattgtatgtaaaatttattgttttgcctttagcatctcgttttctctttctttcacaatgtatagagctattggtcctgggatgctgtaaccttccctttcttttgtggaaagcgtgcttcctgccaaaattgtgagatggatttcagaacagtctcactggccttgttccttcacttttggacccaaaagctcgtaatctacttccctccaaactctatttactcttcttttttctgttcttatcaaaacagcaaagcaaaggacggattgcagcattcggtatgtctgattgggtagaagaagaaggcatggttgctggattcctggatccaactttatctgaaaccctgaaccttaacgggaacaggagcacttgtttgattgctcccctcctctcatcatttcactgcccacaaagttaatttgccacttttacctacttttggctctgcggatgctgaatttatggggccaagccctgacgcctcttccgttgccggtccgcttcgcggaatcgcggtagcctggccatgagcgcgccaccaccgccgcctcgcttcttgccgcgacacgcacatggagctcggaaagctcgcgtttcccaagccccgcgcgatgagtgcaacgtagcccggattgattcgcgacgttagcccgtagcacgttgcgcgcaccagcggcggcaggactggatttttcacattttggtccttttgaaaaacttatttcgcaaatagacccctgaaaaaacttatcccagaaatggtcctttttgggacgccagagtggctggcgccgtcatccaacgggacggtgccagcctctctggcgccgtcctcctgccaccgtggcgcacgcgaaccgacgtggcaggaggagggcgccagcatggctggcgccgccgcctctattcctgtttctctgtatggagttgcaacggtgtcatttttattttatttttttgatgttttttcacactcaggatcacgatacaaccaaccacaaaaaaaaattaaactcgaactaccacttagctaagtttgaaaatatttagcataccacttagtctactttgcaccttcactaaaattagaccataactcttttagtaaaactctttgatcagcatgttaaacataatgcactctaccactatatgaaattacttaatctaattcaaaatataaccacatgaaatgagatatataagttaaacagtacatagagatgtaatttttttatttttatttcattttttttgatatttttttcacacttaggagaacatagaaaccaaccgtataaaaaataaactcaaacggacaaaatatgtgacatgtagaattttccaaaactctaccgaaacggacaaaatatgtcatctattaaaataggcgtaactttctcatacggactcggaatcaggcaaataatatatgcacggacatctacagaaaaagttacatccgattctccccagctttgccgggttcggcgatattaaaacctccaaattccgcttgcaagattgtgttttcgaggagagaagtttttcggtggagctttggaaaattccacatgccacatatttcgtccgtttgagtttattttttacatggttggttcctgtgagttcctaagtgtgaagaaaatatcaaaaaaataaaataaaaataaaaaagttgcacatctctctcctctgcactagttcggagagaggagaggagaggaaaaattctacatgtcacatattacgtccatttgagttcaatttttctatgattggttcttgtgtgtccctaagcgtgaaaaaaaatatcaaacaaataaaacaaaaataaaaaatttcggggggggcgccagccactctggcgcactccccctagccacctcagcatcgccccgccacgtcggcagggggacggcgccaaagaggctggcgcccccccgttgaacgacggcgccagccactctagcgccccaaaaaggaccatttttgggataagtttttctaggggtctacttgcgaaataagtttttaaaaggaccaaaatgtgaaaaatccaggcggcaggatgggtcttcggtgcgtcgtgcgcaaggggcggcgtgtatgggtggtggtgtccaccggattgattgcgtgcgcttcgcctcaccggtcttgggctgctgggtcctcgtgcagttatggcgcggctcgcctcatcgcccgtgttccgccgatcgctttggggggcaaggtagcagagatggaagagagagaaaatgatgcgtgccggagacttgccagtgtttaccgttcgtctgtctgcctgcctgcctgcctgggtgggtttaacccctagactagtatcttcttttggctaaattttcaggacatgtactaaactaccacgtgattttaacattagtgaagcagctagggactagggagagaaagcatcaaccaacaatcgacaacgaaagattgaggccatgtcttagttcacatcaaacttctgcctgactctcaacttttcatcacatcacatccaaaactttcctacacatataaattctcaattttttttcaaactatcaactttccttaaacttttttttcaatttcaaaaactaaacacagcgtgagaagcttcaacggtagcaggagtacagtaaaacgggagcagtggtgtggaagggtgaaaaaacaggcggtttggcctggccgatgggaggaagggtcacatcgagagcagaggacaccgggtatgagacagcacagctcagcaacctctgggtcgcctcgttggtcagagctccgggcccgccaccagcgacccgtcgtcctgcttcactaggctttgtataattgtacccgtaggtgctgcacaatcaatactttacctaatacctaaatactctaccaatacgatacgccgcttagctcaactgaacatcttcagtatcatggagaagtcgacaccgcgtgtagtttccagtgacagactgacatgctctatctagtttaaagctgatattctgtagaaattttgtcctaatcgcaggtccaaatagctcaaattgaaacaaaacaattggctcaattatctatcttgaggtctatgccgacctaacaaaatgtactgctcctaaccaacatatattgacaagctgcaataactcggcctaccttcgcctatttggaagttgagagcacagggagggccgataggaaagagagaaaaacactgtagtttatcatctgattgttcagaatttaattcgtcccaaaggctaagcacggtccggcatgggaatctatcgctgtcccgtcccaattggcacgtcattttcactcagcatgccacacaagtaccgctacgacgcaaaggcacgcacacctaataaccaataaatgtgaacgaaaaagagaaggaaaggaaaagaaaaaacgggcgaagaagaagaaaaacgtaaaagcagcttgcggtgcgaggcaaaagctagtagacgaggcgggggtgattagctgttcgtcccgtgtcccgttgctcgcccacgccacgccgcacgcggacaaaaccgcattctctctctctcactacactcctcccccacactctcctctcctctctccctctcgcagccacagcacagcgcagcactggccgcctaatctctccgcactctctcccctcgccgctccctccactgccgcttcgtctcggccgacgacctcgtcgtcgtcgtcgtcgtcgtcctcgtgttcgccggtcgccgcgccgacgcggatcgccgtgccgctgtccagtgcgagagcgcaggcaggcaggcaggcgcaggtaaaaaccttgcccccgctccccgtcctcgcgccggatctgccgccgattcgtgcggccgcggtgagcccgtgcgtcgcgtcagcttgtgtgttgctgagtggtgaactggtgatgccgcggcagcgggcgctcaaaactggtgtgctcggtttcgtgtcggtagcgtcgcgggggcttgtgggttgggttgtggctgtaccctactttttgcttagtggcgtcggcggcggcagttgcgacggctttaactctggatgactggatgcgtgcttgcgttttggcggttgcgagctggaattagtaactgctttgttgtttcttcggctaactaagttggtccttttttttttctttttaagaagtaactgaaagatgttgatttacagtaattggggtgactaaattgttttcgaaattaaccgctgtctaaattgtttttgttagaatttttggggaaatttcaaattgcaggttctaggtaattcaaataccattaaacaattttgtggaagcacataattttttttattaataaattgtcatgttttggttcttatggtcgtccattttgctaaagaggagccatgagtgtgtcacaatgtactgcatttgatctgcatatctgattgttgctctgtttatttgataactttgcatgattgctgatatgttcctgttttcacttacagtgccagcaatttgcctccctcaccaggggcacatctacatgtggagttcattcccataaaagaggatgcacatggtatacctcacccatgacctctgtaataagctgcggtgatctttatatgcttcaccaactggtgaaaaatgggctcttttctgagaaaacagcccagtttcctcttaattttgttaattctgcaccttggtgctcgtgaagcaagagcactaagttcagatggtatgtgacatttcatagttatggttggtatttgtgtgctacatttgacaatctgtgctcatttattatgattcttttgacggtttcctacaggtgaagcacttcttgccttcaagaaggcagttacaacttctgatgggatatttctcaactggcgtgaacaagatgtggatccttgcaattggaagggtgttggatgtgactctcacaccaagagagtagtttgtctgtaagaccaaaataaaccctacataaatattgtgaaatgcttagaatttcaacctggctattattttgcttcagtaatatggttttcgtttttaagatggcattttctaataggaagggaatgataacttcatagcttccattgttataaatatatctgaccaccaatatcttttgtttaggattcttgcatatcacaagttagttgggcccatacctccagaaattggaaggttaaatcagttgcaagctctgtaagtgtgtgttgatagcgttctttgcttaacctctttcttttcagcatctgaaattactattttatgtcattagatcactgcaagggaatagcttgtatggctcactccctccagaattgggaaattgtaccaagttacaacaactgtaagtttctaagtattactgtttttccagcatttgtaacaccatgtcttgcaaaaaactattcataacattcatactgttatgcaattttaattgatgcaactttttacgttttgtgttctgacttgtgagatgaccagcaggtatctacaaggaaattatttaagtgggcatatcccttcagagtttggtgatctggtggaacttggtacactgtaagttttgggtggagtttctggttgctttttttaatcatttattacctcaatcaaccaatgtctttcctggctgtccatttcacatcagactgatctcccctgtctgattagttcaatctatgcatcagaaacgtaccatttcactgaaacaatcaacacaaaagttctgatataaaaattaagtgcactggattgcaaatgaattcgtttgtcaatttagaggattactcatatttctggaatatgtttttccccttcagggacttatccagcaatacgttgagcggatcgattccaccctctcttgataagctggccaagcttacatcattgtgagtgttttttatcttgataaatccattgaatttttatgctaactttgtgcggcaaattaaataagaaatttcacctgtgcagcaatgtttccatgaatttcctgacaggagcaataccatctgatggttcacttgtgaattttaatgaaacttcgtgagttatcttctctatgttgtttattcttgtctaattcaatatgtatatttgagcaagtagagtgggggatgtcatgtgatagagtgcttttgtttacctcttcatgatgcgctacactacatcacacttgtaatatatcatatgattttgcatgttgcaatgcagcttcatcgggaaccgtggtttatgtgggaagcagattaactcggtgtgcaaagatgcacttcagtcaccatcaaatggccctctgccaccttccgcaggtaccagatgtttctaaaactgtctacatacctttttttcatgcttcaaacattttttgtaaatagttaaatggttagcaagatttcaatgtttgtatttaatatttatccatcaatatcaatcatcagtatcagttgcttttatatttgactaggaaatatacttctgcagtttggggttctgtaaagtgtaaattgatccctttcttttcagttcctttcatgaacctatgacttatgttcttctgattatcatatggcagacgacttcatcaatagaagaaacgggaagaattctaccagacttgttataagtgcagtagcaacagtaggagctcttctgttggtcgctttgatgtgtttctggggttgctttctgtacaaaaattttggaaagaaagatattcatggtttcagggtggagctatgtggaggtaaccatgtcattgaatatgctatgtgaatcatcttcaatttatgcggtccttataatcttgcttgttttcttttaggctcttccattgtgatgttccacggggacctcccttactccactaaagaaatcctcaagaaactagagaccatggatgatgagaatatcattggagtagggggcttcgggacggtttataaacttgcaatggatgacggtaatgtttttgcattgaaaaggataatgaaaacaaatgaagggcttggtcagttctttgatagagaacttgagatactgggaagtgttaagcatcgttatttggtcaatctccgtggctattgcaattctccctcatcaaagctattgatatatgactatcttccaggtggaaacctagatgaggtgctacatggtgagcatgttcagttttctacttcctatttattttatttgtattgcattcttccaattgttaacagttttagtttgtcttcctcagtaaggagttaagtatgtgttcaaagcccaacattaaattaaggtttgaggtgattcagttaatggatatgaaagaacctagtggtgatggtggagtctgccattccaccaccacctctagggttggtgttatcttctaagggtgcatagatacttttatatgtgtggcttggctatcagtgtggattgatgctctcttgcaaattacatattcttccatgaggagtatacatataatttgaattttagaacataggatagtatagtactatagttacattcaatctacctattggaaagaggtacaagtacaacaatatcttaaggggcatactagctaatgtcagctagacacagaatgcaatagccaagtgggagatgaagactttagtatgtgaaaattgtgccactgtgggggcaacaaagttgttcatttttaagttcttgatcgtcccatttggctattttgtggcatgttcagacctccatgtgaattagcagctacagattccacgatggatattatttctgcctcttgtaacaaaaatggaatgctacttagtagtcgatgggcatgggacttcagctattatgtagtacgagtagagggttgtatataacatactaggacacaaggacagaagatgctgtctactcatggtgattccaattttacattggcagcgagtctgagaattatactttattactttaaatacagacctctgttcattcttcaattacatctggatctaaacaatcgagataagagtgaaaaccttaaccatgatattaccatttatattccatatgcttgtggaatatatgcattgaattttataacaacgtataattaggtcttacattagcagacttcactattttattttttaacatcaagtcctaatatctcatctatcttcaatcttgacagaaaaatctgaacagttggactgggatgcacgtattaacataatacttggagctgcaaaaggcctggcttatttgcatcatgattgttcacctcgaataatacatcgtgatattaaatcgagcaacatcttactagacggcaattttgaggctcgtgtatcagactttggactcgcaaagctattagaggacgacaaatcccatattactacaatagtgcaggaacatttggctatcttgcaccaggtatgttaaaactgttctgtttcattcattgtgggaaaataacagcatataacaaatgcttaccaccttattgcatctctggattttatttatcaatatataatttcatatgctctgagctaatttgcaaaattcaaaatccagagtatatgcaaagtggcagagccaccgaaaagactgacgtctacagttttggagttttgctacttgaaatactaagcggaaaacgacctactgatgcatcatttattgaaaagggattgaacattgttggatgggtatgtatgacctttatgtccttccatttcatatccacagttttctgatatgaattacgtatgccttcaattgatttaatgtattcttgaaataatctacttgctctgtggcagttgaatttcctggtcggtgagaatcgggagagggaaattgtcgatccatattgtgagggagtgcagattgagaccttggatgctctactttctcttgctaaacaatgtgtaagttctttgccagaggagcggcctacaatgcacagggtggtacagatgttggagtcggatgtaattacaccatgccccagtgatttctacgattcagaataggcttcgacttacggctgctcttgaaaacgccacactgccgctggttttcctgtggaggcacattccatttattctttgcagattatgtaaattcattcctgcggtgttcggctccaatcggctagctcaatggggaggacatttttgtgtctatgtatctatgctacgtacaaattattactactacatgtcaagttaataagaaacttaccaggagattactgtacttgtattgaactgtcaatctcggaagaatggaaatggtagggattagggatgccaagtttcctgaatctccatgagctgctgctagatatattaatatatttgagtataaccagctgaatttctcacgcattgtgcgtctcgcgatcgagaaaatatgcacttggaggcttcacatgtgctaatttcttaagacataagaatataagattcatatttacactaatcaaggtgaagaaaattgactaagtagagtagtagtagaacataatatagttcactttcataatgagacaacaggtttaaccgttttacatagcggagtagttcgagcggcaacaacacacttgaaaggaaccagagcacaccaaaaacaccagtaattacacctcacataagtgatcgatacacttgaagccacagataaatcgtttagattagcccaatgctctagccggtgatctggatggacttgacgtcgggcttcttgggctcctccttgggcacggtgacggtgagcacgccgttctccatggacgccttgatctgctccggcttggtgttctccggcagccggaacctgcggaggaacttgccgctgctgcgctccacgcggtgccacttgtccgtcttctcctcctgctccttgatgcgctcgccgctgatctggaggacgttgccgtcctccacctccaccttgacctcctccttcttcagccccggcacgtccgccttgaacacgtgcgcctccggcgtctccttccagtcgatgcgcgcgccggcgaaggccgcggtctcggaggaggtgccgcgggggaaggacgggaagatgctgccgctgcttctgctgccggagccgaaggggaagccgtcgaaggggtcccagaggtcgagggagaaggggtcgaacacgttgctgcggcggatcagcgacattgtgtattgtgtcttgctgttttttggttgtctggtttgtgttctagatggaaagagggtgatctcaattctccagaaaggctggtgatttttcgatcgaagaactgaattccttggcaccctggcggtgggtggtggcaacaatttatatagcagttcgtgatggtccatgggttctactggaagttttgcttccggatagttctcgtttgttcgttaatttgggccgaaattggaagtggtcttctggattgttctaggcctgcttatggcctagattattctggagagtcctggacgctatgggctacagcccaccccgctaccggtggtgtaaacttctagcccaagctatctcgtactaggttctagcccatgcgggggcaaactggaagtttctagaagcttattccaagctccacgatgccctctcgctgccctctataaaaccgcgctccccttcaccggcagaaccacgaagaaaacgcaaagcaaaccaagcaaacatcagagtaagaactcagagaagtccgatcgttccacctccaaattcgcagctattccgacgatgtcgatgatccgccgcagcaacgtgttcgaccccttctccctcgacctctgggaccccttcgacggcttccccttcggctccggcagcggcagcctcttccctcgcgccaactccgacgcggcggccttcgccggcgcgcggatcgactggaaggagacgcccgaggcgcacgtgttcaaggcggacgtgccggggctgaagaaggaggaggtcaaggtggaggttgaggacggcaacgtcctccagatcagcggcgagcgcatcaaggagcaggaggagaagacggacaagtggcaccgcgtggagcgcagcaacggcaagttcctccgcaggttccgcgtgcgggagacaacaaagccggagcagaacagggcgtcatgggagaacggcgtgctcaacgtccccgtgcccaaggaggagcccaagaagcccgacgtcaagtccatccaggttaccggctagtaagaaacttcgggtgtgacatgcacggtggagagcttcgattcgagccttcggtttgtgatcaattgcagtaaataaaagcgtcaaatctggtcctcagtgtttatgctgtgaaaaagttcaaagctatgttggaagtgagcaataaagacttttcttgttttgtgaacgaacctgagattatactagtcctacacttgtttgtttaatctaatctccggtatattctgccatttttatctcgatgtttcagtacttttagcctttggttcttgaatccttctgtcgagactggagagttcatttcggaaattgagagctcaatttccacataagtcccacaaatttcacttgtttcagcattttcacagcaatcgattcgattccaacagaagtcccaaaaatttcacttgtttcgaaagatgcctataggttttacgttttcagatcggactgagaaaaggcctataggatttccgttttcagatcagactaaaaaattattccaatgctaggccatgactgaactaaccaaatataacgaaattgctaatattgtgatttgcgattcgtacttcatgtgttttttcttcaactccaataacctcatttatttctacaacactgataacaacctaaactccggcaaataggtttgggtttaggttggggctgagagagaaggggaaggtggcttagagggatgattgtggaaggtgatggcccgacgatgtacagcgggatgagtgggtggcgaggcaacgacggcaccgccaaagccgtagggtcgataacatacggtgggtcagtgttaggggcaaagtagagcgacgggttaggagatggcgtggcaggggcacctcaccaccattggattgaggtgacaacagaggcagcgatgacgagagccattgagcgttgttcaaggacaaaggaacaaaagataaaagataaaaggattagggtttggatatctgcaccaatccgaaagcgatctaatggctcaaaaattataagaatttttaagtggtgttttctgtcaaatgtgtaatagaaagtctcaaatataaatatgaagctctgttatgattaaggagtttctacttctaataaatccataaaatagaacttttatttatgcgacggtggtagctcatgcagaacatgccatgatattcacaactattaaatctctgacgtataaaaagtggatactttgctatggacacaaacatcttagattttcagccaaaaaaacgcatggccgcatgtctaagggcaatcccactccgaaccttcaatcgaacaaataagggcatcatgtcacaacctgttatagatcaactaatatgagggtattgttctttagcacgagattgtttctagcgcactttctttttctcaaaactttgtttaaacttttttcatatgaaatgattttattgaaaaattcatctgaaaagttttacatgaaaactttcatgttacgaaagcacgtaggctaaatagcaaatccgactagggtaaatagatctaattgtcctaatcctgttccgggaccatgtgcagatggttcactctttgcccaagagaaggtggagcccaccatttggtccataaacggagattgagatcctctaccttcaaaggcaacatgccttatgtcactgacaaagacttcatccatcaccgccaccatccctcgcggcctcgccggcgatcaaatcgcctgcacggctggttccggtagccgttctccatcttggatgctcaagcgggcttggggtcctgaagaggcggcgccaattattttcttctcctccccttccgttctctctcgtggtcccacggcgttggcagaggccagggtgcctcaaccctcaagagtcaagaccctatgcgcctcgcgcagattgttggtgaaggggctcgtgtgcccctcttcctaatcccctgttgtattacttcttggtatttctgtgcagagattaatgatcattgcgctttcgttgggttgtggcaatggcattagtcttaacgctggataagtccatggtgatgcaggagaatgaatccgggaagtgtgccatgccatcagccaggtgcgtacattgttcttgccgcttcttcgtttgtccatacctttgtgattgcgttggtttatgttttgctaattcaccggcatagtattgtgacggtcgattcggattctgctattacgtctcttataagaagaaaatgggagagattcagcgtatattagttatgctggataataatcagaactgatccttctaaatcaaccgagctaccagaacaaccaatgttgtagaaccgaactggccactcccagtttccattccaaaaggctcaagaaaaactcaaacattggtacattaatcaagcttaaagtttatttccgtacataaacgcataggagacaaacacatttgggacccttggaggagaccacacattcataaacacatgatcatatcacacacattttggactgtgtccctcacgacacaagcaaagtaccaaaggaggagatcaattgcagcattgaggagaagcagcagaataaacaaacggggctctagccggagatctggatggacttgacgtcgggcttcttgggctcttccttgggcacggtgacggtgagcacgccattctccatggacgccttgatctgctccggcttggtgttctcggggaggcggaacctgcggaggaacttgccgctgctgcgctccacgcggtgccacttgtccgacttctcctcctgctccctgctgcgctcgccgctgatctgcaggatgttgccgtcgtccacctccaccttgacctcctccttcttcagccccggcacgtccgccttgaacacgtgcacctcgggcgtctccttccagtcgatgcgcgcgccggcgaaggccgccgcgtcggagttggcccgagggaagaggctgccgctgctgctgctgctgccgccggagccgaaggggaagccgtcgacgggatcccagaggtcgagggagaaggggtcgaacgcgttgccgcggcggatcagcgacatggttgacggatttgggcgagaaggaaggctgtgtttgtgaacactaaaacagtgtgtgcttgggaagcttgggatgtgagcacaagggatcgcgatttgcgagttgctttcgatctttgtctgggccgcagagcgggaggggaggccggatttatacgggctgtgggcggcgttgagaggtgggatcctgataattctcgtcagttcaagaatgcactggaaaacacctgatttggagcctggccgcctgggccgaatcatcgagtgccttccagaacttttggccctgtggatccaaacggcatgggactctggttacagatttacaattgccgatttccttctgccatgttaatatagaaattgccatgtatctattgtgaactatagttagatttgttcctatttctatttttaaaaaaatatttaaaacgaagaccttttaaattttggtaatatcaaaatttaacaaggcagcatactaaacatactattaccaatgcaaccatattttagtaattcgggaactttctactctagctactacacaatttagtaatgtgttaaaccaaacatcgtccacatccttaccttattatcttactactaaacttcgattctggtaaaattactaaaatttgataagttttttccaagtgaaaaatgaacaagtcctacatctcctctggcctatagcatagaaacccatcactcccaatttctactttgagtacgcctaagcggtcaaaaaaggagaccgttcacacgttttacaatgtaagcataaacttatatggtcatttcataataatcactaaccttttgtcgataaaaaaacatccccaaatcttagggcctgtttactttaatgccattttcaactataccattttttaataaagttgtcaaaaaaaagtatctacgtttagtttgttgccaaatttagtcaatacataagaaatcatgccaaaattttagcaatattgccatcttgccaaaattttggcattgctaaaatttggtaaggtttattttagctacaatctaaataggcccttatagttttgggtcactagatgtgctttgcgattcgtgctgtagacccttatcttgtagctctggtgatctccctttcttctctggcaccggtgacactgcaaactctagtggagtagcacggattagggccccgggggttgggtggcagtggaaggaggagggggaaaaggggatatccatgcgtttagatggatggaagtaggaggcggtggacacgagcaggcgacgaggcaacaatgacgacgctggagctgtggggatgaaagagagtggtatactg

SEQ ID NO: 9034 - DNA, 27612 bp, Oryza sativa
catgaggagtatacatataatttgaattttagaacataggatagtatagtactatagttacattcaatctacctattggaaagaggtacaagtacaacaatatcttaaggggcatactagctaatgtcagctagacacagaatgcaatagccaagtgggagatgaagactttagtatgtgaaaattgtgccactgtgggggcaacaaagttgttcatttttaagttcttgatcgtcccatttggctattttgtggcatgttcagacctccatgtgaattagcagctacagattccacgatggatattatttctgcctcttgtaacaaaaatggaatgctacttagtagtcgatgggcatgggacttcagctattatgtagtacgagtagagggttgtatataacatactaggacacaaggacagaagatgctgtctactcatggtgattccaattttacattggcagcgagtctgagaattatactttattactttaaatacagacctctgttcattcttcaattacatctggatctaaacaatcgagataagagtgaaaaccttaaccatgatattaccatttatattccatatgcttgtggaatatatgcattgaattttataacaacgtataattaggtcttacattagcagacttcactattttattttttaacatcaagtcctaatatctcatctatcttcaatcttgacagaaaaatctgaacagttggactgggatgcacgtattaacataatacttggagctgcaaaaggcctggcttatttgcatcatgattgttcacctcgaataatacatcgtgatattaaatcgagcaacatcttactagacggcaattttgaggctcgtgtatcagactttggactcgcaaagctattagaggacgacaaatcccatattactacaatagttgcaggaacatttggctatcttgcaccaggtatgttaaaactgttctgtttcattcattgtgggaaaataacagcatataacaaatgcttaccaccttattgcatctctggattttatttatcaatatataatttcatatgctctgagctaatttgcaaaattcaaaatccagagtatatgcaaagtggcagagccaccgaaaagactgacgtctacagttttggagttttgctacttgaaatactaagcggaaaacgacctactgatgcatcatttattgaaaagggattgaacattgttggatgggtatgtatgacctttatgtccttccatttcatatccacagttttctgatatgaattacgtatgccttcaattgatttaatgtattcttgaaataatctacttgctctgtggcagttgaatttcctggtcggtgagaatcgggagagggaaattgtcgatccatattgtgagggagtgcagattgagaccttggatgctctactttctcttgctaaacaatgtgtaagttctttgccagaggagcggcctacaatgcacagggtggtacagatgttggagtcggatgtaattacaccatgccccagtgatttctacgattcagaataggcttcgacttacggctgctcttgaaaacgccacactgccgctggttttcctgtggaggcacattccatttattctttgcagattatgtaaattcattcctgcggtgttcggctccaatcggctagctcaatggggaggacatttttgtgtctatgtatctatgctacgtacaaattattactactacatgtcaagttaataagaaacttaccaggagattactgtacttgtattgaactgtcaatctcggaagaatggaaatggtagggattagggatgccaagtttcctgaatctccatgagctgctgctagatatattaatatatttgagtataaccagctgaatttctcacgcattgtgcgtctcgcgatcgagaaaatatgcacttggaggcttcacatgtgctaatttcttaagacataagaatataagattcatatttacactaatcaaggtgaagaaaattgactaagtagagtagtagtagaacataatatagttcactttcataatgagacaacaggttttaccgttttacatagcggagtagttcgagcggcaacaacacacttgaaaggaaccagagcacaccaaaaacaccagtaattacacctcacataagtgatcgatacacttgaagccacagataaatcgttttagattagcccaatgctctagccggtgatctggatggacttgacgtcgggcttcttgggctcctccttgggcacggtgacggtgagcacgccgttctccatggacgccttgatctgctccggcttggtgttctccggcagccggaacctgcggaggaacttgccgctgctgcgctccacgcggtgccacttgtccgtcttctcctcctgctccttgatgcgctcgccgctgatctggaggacgttgccgtcctcaacctccaccttgacctcctccttcttcagccccggcacgtccgccttgaacacgtgcgcctcgggcgtctccttccagtcgatccgcgcgccggcgaaggccgccgcgtcggagttggcgcgagggaagaggctgccgctgccggagccgaaggggaagccgtcgaaggggtcccagaggtcgagggagaaggggtcgaacacgttgctgcggcggatcatcgacatcgtcggaatagctgcgaatttggaggtggaacgatcggacttctctgagttcttactctgatgtttgcttggtttgctttgcgttttcttcgtggttctgccggtgaaggggagcgcggttttatagagggcagcgagagggcatcgtggagcttggaataagcttctagaaacttccagtttgcccccgcatgggctagaacctagtacgagatagcttgggctagaagtttacaccaccggtagcggggtgggctgtagcccatagcgtccaggactctccagaataatctaggccataagcaggcctagaacaatccagaagaccacttccaatttcggcccaaattaacgaacaaacgagaactatccggaagcaaaacttccagtagaacccatggaccatcacgaactgctatataaattgttgccaccacgcagcgacaggtgccaaggaaatcagctcatcgatcgaaagatcaacaagctctcttgagaattgagatcaccctctttccatctagaacacaaaccagacaaccaaaaaacagcaagacacaatacacaatgtcgctgatccgccgcagcaacgtgttcgaccccttctccctcgacctctgggaccccttcgacggcttccccttcggctccggcagcagaagcagcggcagcatcttcccgtccttcccccgcggcacctcctccgagaccgcggccttcgccggcgcgcgcatcgactggaaggagacgccggaggcgcacgtgttcaaggcggacgtgccggggctgaagaaggaggaggtcaaggtggaggtggaggacggcaacgtcctccagatcagcggcgagcgcagcaaggagcaggaggagaagacggacaagtggcaccgcgtggagcgcagcagcggcaagttcctccgcaggttccggctgccggagaacaccaagccggagcagatcaaggcgtccatggagaacggcgtgctcaccgtcaccgtgcccaaggaggagcccaagaagcccgacgtcaagtccatccaggttaccggctagtaagaaacttcgggtgtgacatgcacggtggagagcttcgattcgagccttcggtttgtgatcaattgcagtaaataaaagcgtcaaatctggtcctcagtgtttatgctgtgaaaaagttcaaagctatgttggaagtgagcaataaagacttttcttgttttgtgaacgaacctgagattatactagtcctacacttgtttgtttaatctaatctccggtatattctgccatttttatctcgatgtttcagtacttttagcctttggttcttgaatccttctgtcgagactggagagttcatttcggaaattgagagctcaatttccacataagtcccacaaatttcacttgtttcagcattttcacagcaatcgattcgattccaacagaagtcccaaaaatttcacttgtttcgaaagatgcctataggttttacgttttcagatcggactgagaaaaggcctataggatttccgttttcagatcagactaaaaaattattccaatgctaggccatgactgaactaaccaaatataacgaaattgctaatattgtgatttgcgattcgtacttcatgtgttttttcttcaactccaataacctcatttatttctacaacactgataacaacctaaactccggcaaataggtttgggtttaggttggggctgagagagaaggggaaggtggcttagagggatgattgtggaaggtgatggcccgacgatgtacagcgggatgagtgggtggcgaggcaacgacggcaccgccaaagccgtagggtcgataacatacggtgggtcagtgttaggggcaaagtagagcgacgggttaggagatggcgtggcaggggcacctcaccaccattggattgaggtgacaacagaggcagcgatgacgagagccattgagcgttgttcaaggacaaaggaacaaaagataaaagataaaaggattagggtttggatatctgcaccaatccgaaagcgatctaatggctcaaaaattataagaatttttaagtggtgttttctgtcaaatgtgtaatagaaagtctcaaatataaatatgaagctctgttatgattaaggagtttctacttctaataaatccataaaatagaacttttatttatgcgacggtggtagctcatgcagaacatgccatgatattcacaactattaaatctctgacgtataaaaagtggatactttgctatggacacaaacatcttagattttcagccaaaaaaacgcatggccgcatgtctaagggcaatcccactccgaaccttcaatcgaacaaataagggcatcatgtcacaacctgttatagatcaactaatatgagggtattgttctttagcacgagattgtttctagcgcactttctttttctcaaaactttgtttaaacttttttcatatgaaatgattttattgaaaaattcatctgaaaagttttacatgaaaactttcatgttacgaaagcacgtaggctaaatagcaaatccgactagggtaaatagatctaattgtcctaatcctgttccgggaccatgtgcagatggttcactctttgcccaagagaaggtggagcccaccatttggtccataaacggagattgagatcctctaccttcaaaggcaacatgccttatgtcactgacaaagacttcatccatcaccgccaccatccctcgcggcctcgccggcgatcaaatcgcctgcacggctggttccggtagccgttctccatcttggatgctcaagcgggcttggggtcctgaagaggcggcgccaattattttcttctcctccccttccgttctctctcgtggtcccacggcgttggcagaggccagggtgcctcaaccctcaagagtcaagaccctatgcgcctcgcgcagattgttggtgaaggggctcgtgtgcccctcttcctaatcccctgttgtattacttcttggtatttctgtgcagagattaatgatcattgcgctttcgttgggttgtggcaatggcattagtcttaacgctggataagtccatggtgatgcaggagaatgaatccgggaagtgtgccatgccatcagccaggtgcgtacattgttcttgccgcttcttcgtttgtccatacctttgtgattgcgttggtttatgttttgctaattcaccggcatagtattgtgacggtcgattcggattctgctattacgtctcttataagaagaaaatgggagagattcagcgtatattagttatgctggataataatcagaactgatccttctaaatcaaccgagctaccagaacaaccaatgttgtagaaccgaactggccactcccagtttccattccaaaaggctcaagaaaaactcaaacattggtacattaatcaagcttaaagtttatttcccgtacataaacgcataggagacaaacacatttgggacccttggaggagaccacacattcataaacacatgatcatatcacacacattttggactgtgtccctcacgacacaagcaaagtaccaaaggaggagatcaattgcagcattgaggagaagcagcagaataaacaaacggggctctagccggagatctggatggacttgacgtcgggcttcttgggctcttccttgggcacggtgacggtgagcacgccattctccatggacgccttgatctgctccggcttggtgttctcggggaggcggaacctgcggaggaacttgccgctgctgcgctccacgcggtgccacttgtccgacttctcctcctgctccctgctgcgctcgccgctgatctgcaggatgttgccgtcgtccacctccaccttgacctcctccttcttcagccccggcacgtccgccttgaacacgtgcacctcgggcgtctccttccagtcgatgcgcgcgccggcgaaggccgccgcgtcggagttggcccgagggaagaggctgccgctgctgctgctgctgccgccggagccgaaggggaagccgtcgacgggatcccagaggtcgagggagaaggggtcgaacgcgttgccgcggcggatcagcgacatggttgacggatttgggcgagaaggaaggctgtgtttgtgaacactaaaacagtgtgtgcttgggaagcttgggatgtgagcacaagggatcgcgatttgcgagttgctttcgatctttgtctgggccgcagagcgggaggggaggccggatttatacgggctgtgggcggcgttgagaggtgggatcctgataattctcgtcagttcaagaatgcactggaaaacacctgatttggagcctggccgcctgggccgaatcatcgagtgccttccagaacttttggccctgtggatccaaacggcatgggactctggttacagatttacaattgccgatttccttctgccatgttaatatagaaattgccatgtatctattgtgaactatagttagatttgttcctatttctatttttaaaaaaatatttaaaacgaagaccttttaaattttggtaatatcaaaatttaacaaggcagcatactaaacatactattaccaatgcaaccatattttagtaattcgggaactttctactctagctactacacaatttagtaatgtgttaaaccaaacatcgtccacatccttaccttattatcttactactaaacttcgattctggtaaaattactaaaatttgataagttttttccaagtgaaaaatgaacaagtcctacatctcctctggcctatagcatagaaacccatcactcccaatttctactttgagtacgcctaagcggtcaaaaaaggagaccgttcacacgttttacaatgtaagcataaacttatatggtcatttcataataatcactaaccttttgtcgataaaaaaacatccccaaatcttagggcctgtttactttaatgccattttcaactataccattttttaataaagttgtcaaaaaaaagtatctacgtttagtttgttgccaaatttagtcaatacataagaaatcatgccaaaattttagcaatattgccatcttgccaaaattttggcattgctaaaatttggtaaggtttattttagctacaatctaaataggcccttatagttttgggtcactagatgtgctttgcgattcgtgctgtagacccttatcttgtagctctggtgatctccctttcttctctggcaccggtgacactgcaaactctagtggagtagcaacggattagggccccgggggttgggtggcagtggaaggaggagggggaaaaggggatatccatgcgtttagatggatggaagtaggaggcggtggacacgagcaggcgacgaggcaacaatgacgacgctggagctgtggggatgaaagagagtggtatactggagcaaatttatggttaggaggcagtgaggagccactaaagacgaggaaaagggcagagcggggcacctcacggccggcagccaacgacttgagtaggagaagaggttggtaacggggaggctggctagggagggaggggggattgggctcgccagtgttattaacgccttccggccagccggcgaggccgggctgcagggcggtggcgacggaaagcatcgagcgagcgggtgattcaatcatgtctggtgacactagagtgagaagggaggagaggaggggcggggtaaggtttagggatgtatgcaccaatctatacctatacttattataaaaattgaagatgtttccgcggttcgtcatctgtgtttgtgtcggttataaaaattgaagatggcatcatccgtgtttgagtcggttttaattttatgttttggtttatactattataaaaattgaagatgtttccacggtccgtcatccgtgtttgagtcggttataaaaattgaagatgtttccgcggtccgtcatccgtgtttgagtcggttttaattttatgttttggttttaatctgtatatcttctctactattataaaaattgaagatgttttcgccggtatttttgtacgtcatccgtgtatgagtcagtttttaagttcgtttgctttcagtaatacagaaggaatcatataagaaatctgtttaaaaaaactcgcatgctaacttgagacgattagactgctaactgcagctcatgattttctaaaaatatatatatccaagggaattcccacagtaaatttcatcttaactaaaccatataacaataataagattaaaatagacttcacccgttgcaacgcacgagcatttttttttctagtcttaaagaaattcaactgttcaaaattcgacagttccctttatatattgtaacgtcttacatatgcgatttttatggttcagagtttctgacatgagtttcttatgtatgtctcacatgaattgtctgttctgatcgatacatgtaagttttcatcctaagggcacccgtaatggttatctataggctctctacaagatatctatgtcagcatattttcctacttgaaagagattaaatgaagagatagagcaaagctatctactaacctggagatagtctatagagaaaaacgaggcaatgaattagagagctatagatacccatgtagacatactattggggtagtttactattaatctagtctattgctgagatgtacatgttttatagagagcaccttactttactattgcgggtgctctaacagttccattttcaatttccaatattatctttgttttggcctctaccgtttccgtgaaaaataaatggctacagaaatgctttaggctgtttgtcgactgttttcaggactagtgagaaggagcctcgacctatcaacagtagggatgaaatccttcacaatgggtttaattaattcgccatcagaaaagaaaatttctacaaatatattataatttagttacaatacttttttttttagaaacacccccgtatatgaaacttgcagtcaagccaagaacttctcgaccttctccacttcctccacgctcccgatgtacagcggcactctctgatggatctgcacggcacattcacaaacgaatcaattatatagacacatttcgatttctaagtctactcgtagattaatccattaataacactgcgcatataatgtgtgcgcatattttacctccgtaggcatgatgtcaagtatcctctggtggccatcggagcccttgccgccggcctgctcgacgatgaagctcatcggcgcgcactcgtacagcagccgcagcttgccgttcttgctcttctggtccctggggtagccgtagatgccgccgtagagcagcgtgcggtggaagtcgccgacgaggctgccgatgtagcgcgcggagtatggcttcccggacggcccgggctccttgaggctgtccatgtagctcttgagcttgtcgtcccagagcgcgtagttgccctcgttgaaggcatagatcttgcctgccttggggatctgcaccttctcctgcgtcagcacgaactcgccgtacatcgggtccagcgtgaacacgtacacccctgtcccgatggtgagcacgaagatgaccgagctcgagtacatgcagtagccggcggcgagcaggttgctccccggctggcacacgctcacgatgcacctctgctccacctggtcaagctgcaggcacacgcgcgcggacagaggcgtttcgttctgttagcaccgtgtcagtgtgtgcatgagcgattgctaggcgatcgataacgcgttacattttggtcgtcggcgatgtcggctaggcactcgtcgttggggctgtagatgccgaagatggagccggtggagacggcggcgtcgatgttggaggagccgtcgagcgggtcgaacaccacgatgtagttgcccgagtagctctcctccacggccaccggcacgtcctcctcctccgacgcgatcacgccggtgcgcccgctcgatttgaggcagttggagaacacctgcggtgcgcatagcgctcagcttatggtcggtcgcgcttgttgcggtggttcgcgcactaaccacgacgagctactgataatttagtcgtttacctcgttggagacgacgtcgagttttttctggtcctcgccctgcacgttgacggcgccctggacgccggtgaggttggagatgggcgcgcgctgcaccagcgaggcgatctgcttgcacgccgtggagatgctggccagcacgatggtcatctcgccgtcgatggtcccggcctgctcctgcttcagcagccacgtcgtcagcgtggtgatctcgtagctgctcttcttgctagcctccgtcgcggcgggcgccgaggccgtgtcgacggccgccatgcaccgcacgctcggggccgacgacccaccggcgagcctgccgggctgcctccggaaggagaggccgcattggagcgaggccgccgcctgctggcgggagagcaggagcaggtgggaggatgtcgtggctgcggcggccatcgctgctgctgcttggttgcttgctctgctcgcgctctcctctcgctgcggctacctggtcttggtgccgatggcttcttgttttgttccattggttttagccgcggtttgtgtggccggagagagggcgggaggtgagtgtgtggattgggggagaattgtgaggatggcgttgcctcagatactagcctaattgcaactccttgtccttcagccagcgtcacgtacagtcacatacaagtagcatcgccttgctcaggggcagtatatacttgtgcttttgattaggcagatctattattcgtacctatgaatatagatggtcatatgacccagcccaaggccaggtgatttgacccggcccaggcatggcaggtcgggccatgccggcccagcctaacagccatgtcgtgcttgggctgccacctcggcacgttgggtcggcatggcccggcacaaagttcagtgtcgattggaacgatgagcccagatccacatagttccggaggacaaaggagcaaaacggtggtcagctgtcgatgatgaggctgctggctcatatgggtttgccagtagaggctcaagcatcagtgacgtgcgtggcccaatgagagagatggtgtcagaccactcccctaccgggatcacggacggcaaggtaggcagcgactgtgaaggactgaagcaggcgaggatggggaagatgtctgaaggggaagatgaggaggggcggctttctctgccgtcatcatcgcgccattgcctactattgtccccactcgagctcgtgtggcggtgtggaaaaggagaggggggtgagaaagagaggggttgctcgcaacattggtagcgatggcgatgggaggggaggctcatgtcgtagtgttagagggtcctgccaacaggatgaggccacagagtcgtcacctccatccctagtgagttccacaacctcctcgagctgttgttacctatcggcctactgatacatactcactgacatgtgacccccacatccggttggaccaacttgccacgttggtgaaaaccatttttaaaatgggacaattgcatatatgcccccaatttcaaacccaattgttgttttaccctcactttttagggtttgcggttttagccccactttttgaatctgaaccggccgtctacccctacttgtaacaatcgtttggtgggtcccacgttttgtgttaaaggaatacaaaaggaaataaaaaaaggttttaggaaatatgaatttacgtttgtacccctgagagaatgggtagggactaaatcctctcaacctgtgcgtgcgtgaatcagggactcgagggcgggcggctgcgagggcgtacgcgcggcggcggcaaccgtggagagggcgggcgtgcggtagccaggcggccgtggggctttgacacggggattcgcagttctagttgccacacgagttcatgctctccccgatcgccgccctctcccttgccgcgaggtatgccgccatcgagaggtctgtacgaccgcttccccctaccgcaccctcctcgcactactacgcagccggcgacgaccccatcctgctcgacgtcgatggcaatggcaacgccgccttcatggcggtcctcggccccacccacccaagcatactctccccggtgccctccgcgctgccccccatggcatcgtcaccgtcgaggctcttctccccgctcgaccaggcctccgtctcctagctcagcgacctcagccccttcgtccactccgccggcgcaacccctcccccccaacccatgccgccgttcgcgccgagcacgcatagcctgctgctgtccacgcccaccgtcgccgatgaccttctccatcaaggaattcttcagtagcaacttcccggacctgtcgaaatgctgtctaaattttgttcaaagtttggtcagattatgtacttggctagtatttgtgatttttttattaaagtacaaaaacatcacaagagatgctcatatttgaattatttataacaatcacacaataggggcaaaatcacacaagctgaaaaaaataggagcaaaaatgcaataatcactaagggtataaatgtccttttgctgtacaactaacaccgttaaaccggatgttagaagtggaggtagtcggatggttcaaattcaaaaagtgggggtaaaactacaaaccctaaaaagtgaggataaaacaacaattaggtttgatagtgggggcatagatgcaattgtctcatttaaaatagtcaagataattaagttacatcaattttaatagttggggggttagaacatcctctttcacgaatgaggaatagaatcagaaggactttaaaggaaaggagtgccatccaacagaaggccctataactacttacgttcagcaaatcctgatatgtagcctgagccgagctgctctttcttgggcttcttacttgttatactctgtgggccgtggcccaatttgacaactccttaccgttttacttttgcttttctatttctctaggggtataaaacagctgtaccaaatcaatagaaaaccaatgctgcatttcttgtgtactagaaacaaaatgtccatgcgttgcaacatttttttctttctgtggtacgacggctaataggagctaagcaatatattgaaacattggaatcactatacattgccccattcctttattttcagccccagcccaatccacgcctcatatctccctccgctcggcctgcctctctccagcgcaccctacaaatggagttgcaagagcccagctagcacaatcggttgcctcctccaaacactacagtagcgtcttcaaacctctagatgacagtcatgtgcccgtatcatgccggagctaatcatccccatcaagtccggtggaatctttctcgatctctcaaaattggttgagggttttaatccactcgatctcgatcctctttccatttctcccaaaatcagagcgtcgcatccaaatcgtcgtagcccaattttgtaaaacttgggataaaaacacgcgcacggtagcgctacggacattgacgagcccaaaaaactacaaaagccttacgtatttttaattaagatatataaaaaaaggaatcttggtctcgattagactcttgatcgtgtcgcaggtgcagcgatgatgaaacgaagcggagggacgaacggaagccgaatctcaaagggatttaagggaatcattgatggatgaaaatttcaacagaagctttacgcattttttaaataggtatatatagatatatgaactacttgtacaatacttttgtatcatctaacattttatgcaagatggacatgacgcagacatcagaacatattcttaaaagaacatatcagaatactaacaaattaagcaataatcacctcctccagcttaatccttttttttgctctttccacgacaccaaccttttgaacaagaaatacaatatttttgtagaccaaataatataattctcttgcagagtccaatcctcgtattgtttaagctttgagtttagcaaactctactcttaatttgtaccattgcgtggcaggattccaatcaaatactagtagaaaacaactcctatgcttacaaaaaacaggacattccaaggcaacctacctattcaggcgcgcacgtcgatgtgctatgctttacattgacatgtccagcaatcttgtcctatcctgttccaagacggtggcaatttttgtcagctaccgattgggcaggggagcacagctacctcctgcctcatcggagacagaaacagagtcgtaacccatcaaaagcaaagacaaaatacacttgtcgagaactcttggtttgtttggtttctcttcacgggcaacggaatcttcaaggtgtcattggcagaatggcaggcatgctaatttgttcagaaggtctctaattcatttgacgagttagcgtgtatactagcaatcaccctcttgattatctcatgctgtgctcgtcgtcttaggaaatgccatgtctggtagggtcaaagccaaaccgagtcaggtcagtatgaaaccaaatgcatttcggttagtggcgggagaaaaatatcgatgtcacaattagtcaacgagcaagcctactctgttctatctagcacatggaagaaatgggacctaacagtagacttctgattgttcttctagctctttgtgttttataatacatatctgaacgctcaaactaacctgtagctatagtcgtcggttcaaaccagtgtttgattcgaccacactctatgaacccaactacttccaccactccatctcttgatcctgaaagtgttaacatttcataattaggagatcatgctgggagattctgccaaaccacatttgcataccaacggcctagattttctatagcttaccagctgccactccaagcttgacttctgaacccgaataggttcacaacaaaggctgtatttagatctaaagtttggatccaaacttcagtctttttccatcacatcaacctgtcatatacacacaacttttcagttacatcatctttaattttaactaaaatctaaactttacgctgaactaaacacagccaaagccagattcgccgcgcttgccctctccggcaggcggcagcttgaccctacgcaccaaattaaactgaacagataggataggataggatgacctcattggagcgccagcatgaataacacagtaacctttttttctcgacacgaaaggagccaatgacctatatgagcgcttgcttttgctgaaactgtactttcacacggcagattaacctaacgtagatatatcctactgaaaagcatctcacgaccgacctgtactgctgctgtcctttctctatagacgatcactccgcagcaataattctggtccagtcggagacatcgaccccccacacacaatagctagatcgctagctagcccaaggacacccaagaacagcgagatggggcagatggcgatatcgccacgttctcgtttcattcgtttcagcggccgtcactttcactgcaaatttttcgccgcagatcgtgcagctaattataaaagctgataacaatcgatctgaagccgcctctcttcgtcccgttcacagaaattcatcttacctaattaccagaggagacactagctccttttgactttgcgtgtcgctgcacctgatcactctctctcacacacgcacatccattagctgggcatggctgctacttgcagctgagtgcccagctcacgtagcacgtcgcatacagtaatacacttacaggtcatgggctcatggcagtgacaaaaacaaggccgtcttcccaggctcgcacactggcaccggcagcctcgcacactggctagctaggtgacggagacggcatcgctttacaactcaaaagggcctccgcacctcggcacgcctcgttttctattgctcggccgcctttgcgcaccaaccggccgggtcggacaaaacacgagggcgtctcgcggatgattgggaggcggtctcgcagatgattgggagggacggggttggttgcgcgcactcgcgcgcggggcagtggccggttgtggaggaaacggtgctcctctcctatcccgacgtccccgcggcagctgatgttgaacgggctccaatccgatcgatgcgatgcatgcatggcttgactgcatgcgacgttaggtaccaaggctggctcagatcaggaccgggacgtactgtctcctcgcagctgtaatgaaaacttgcaaagcaacctggtactactaaatttgtcccaagatacaaaaatttttagagataatacagttattaagaaaataagtaaaattaaacggaagaggttatgattggatgagaagtgacggtagattaagaaattaaatggtgaacagttataattggttggaaagagaacgttgatagataagctattatattttgagacaaattctgaatactaaaaattattatattttggtacggataaagtaatagtagtacagtaggttattaagctgctagtaacatgatggattggaatcgccgtcgccgaccgtgcatgatctaacatcgatgccttctttgttttcaaaaagagaaaaaaagggtagaagaggattcggtggttctgttaatttgcagcccctgtcgttttcaggttctgtggaagcatagaagttatttcctagatattgactttgttattcttttttctttgacctcttacagctttcaatactttggatccattccaccacagctagcctaactccaattccttcgttgtataaacctattgcgctcttgacttttttagcatgagaattaaacaaactggaagtcttagcttagctgctgaacagcagtgcatcaccacaatttttttccgttattgtggtcattgatagtagcatctttgatctaagggatgaattgtcggtaacgtacaaaggaggcccattttccatgcagatgtgaccaccggaaccaccatcgtcagtgggcacggcaagccaagcggtaataagattcgcaagaacgtggggggtttgcctcccgtacgtgaagacggtgcgagcgtcagcatctgacaagtccagtggtgtcgggccttggcgcgaaattagcaagcaatgcttcgatcagaaattcagttatactataaacatgaaagaatcaccctgctcaccgggttttattttgttttgaaagggaaatctgctcaccggatttcgatcgcagtgtcaggttgttggggataccacgtcgagcaaacaataatattcccgtctctgtggcaactgcttccaccagcaagcccaggctcaccaatcgtgaaagcggccggccggcggcgatcagtctcctgtaaaacaccggaggagcaacatatatggctcggcactcacccactcacccagctcagctgtgtaacctctaaaaatactagcaatacttttaatttggaccatatcttatctgccttcactgacacctcttatccagtacttatgcgtatctagatcgtgctaatcattgacgctccgtaataatgtctgtgatccggccatttgattggagagtatgcaaaatatgcatagtattacagacggatggatcggatcgaatcagtgtactgtaaatgatgagtaaccctggcctgattgatccgtggatctcccatgtcgagcggcagccgggcaatcacaatgatgagacccgatctcacagagtggtacgtggtgtccatggcctttcgatctccagcagcagcggcagcggcagaaacctggttggcacgtcggaggaaacggacaggatctccacccccacgaacgcgaatacaataatcccgcgcgacgcgacgcccgcacgcacggggcgggggcggagcggacgacgctagcgtccagccacagcgcagcgcagcgtggacggaaccccgacccgccgatcaagccgtccacccgcgccggcgccgcgaatggcgcggcccaaccaccgggagcgtgaggataaaccaagccgagacaccgggaatctggcgcgcggcgtgcacagcgaagcggcccgatatcaagcgacgatcatggcggcaacctaacacgggggcccgggtgcacggtgcgtgcgcgcgaacgtcaacagcctacgactacaactagtactgttcgcgatcccctcctcctaatcgtttgaagccagtgccgcgcacgtaggcgccctaccggttatggaaagggactcgcgggccgttcggaacggattagctagtcgtaactcgtacgtactcaggcgtcatgcctatggttcgtgacttgtacgtactgtgttacatctcactccacggatgcgcgatcaggatcgagagagaaaaaaaaaaggcaatcgatcaattgcttcccaacaactccaggttcccattatcaatctgaacgtgtcgatgcttccatcgaattgactactcgtgcagcaacactccgtacgtagtatcatcttcaacagcgaagaatcggttaaatgcaagtttaactgataaagtgagtgtgtgggaacactgcagaacggcacaaaggctgaaagttgaaaccaggaaagggcaacgcatgatcgtgcgtatatgtgtatattactgtttggacgatgagcacaaggatatctcttgagaaaagaaatgttaaacaagatcgcagagtgcgtgcggccacgaccaaattttgggggggcaaaaataatgtaagagcaaatcttggaccccacctgccagctgcccgcacgactcatcaaaaccggtacaaacccaccgagacagggtaggcgtcataacgcaacacaaaaggaaccgcgcggcggcaccaaagcgagcagaagcagcagccgaaggcgatcggagctcgcgcaacaggagagctgtctccatgaggaagctgtgcccgaacctggagcgcgatgacgcgctggacacggtgctcgaggtgcccatcccggaggagatgttctcacgcggcagcggcggtggcggctcccgcggctccaggttcggctgcaccaacgtcaagtcgtgggtgcggccgaacgcgtccgaccgctccggcggcgccggagagccgtgctccatgagccgcggcgagctgcagctcatgctcggcgtcatcggcgcgccgctgataccgctccccgtcgaccacgccaagcagtcgccctgctccgtcctctgcgaacagctcaaggccgatcccattgtacgatcgccatcatcggattcttctccgtttcgtttgtccatcgccgcgcgctgattggctcatccatttatggcgtgtcccctttcaggagtcgtccacggccaagtacataatacagcagtacatcgcggcgtcgggcggggagtgggcgctgaacaaggtcacgaacatgtacgcgatggggaaggtgaggatgaccgccgcggagctcaacagcagcgacgccgacggcggcggcggcggcggcggagggcaccgcggcgggaagaagagcagcaagaacggcggcgaggttggcgggttcgtgctgtggcagaagaagccggagctgtggtccctggagctcgtggtgtccggctgcaagatcagcgccggcagcgacggcaaggtcgcctggcgccagacgccgtggcatcagtcgcacgcctcccgcggtccgccgcgccctctccgccgatcgctccaggtataatataaaccgcgagttcttcgttagttccatataaacgcttaccgtattcgcacgacttgactgcaatactgcatggtcgcgtagcatcatagaaaacacgctcaactctcagttaaagtttccaacgactaggagaactgcgtactgaattggatcctgtttatgagacggacgactacgagaaccaaatttggtggcacatattttcttttctggttcgacgtcaaaacgagtagtcctttgtgtttgggtcgatccaacgttgctgttggccgaacttacgtagcgagtccattgttgtcatcgttcctagtggtaggtactaataggcatcggtatcatgacatggaacgcatacgtccaaagtcgcaaagttctcatcttaatgggaacttactttctgtagttctttgtcccaagaagctctgtttttccccttcgtcctgctcaaaccggcctgatttgggtactaggtggccatcagtacgcgccgtaccgagcgtgcgtagtacgagtagagagtagagcatgcatggcaacttggccagtgtcacgtacctggatcttccctgcatactgtcggtaggacaggacagatcggtcgagtacccgcacggccgagcgacatgattacgcctttgccgcactcattgggccgttggcattagctgtggtcaaggtcagtccagggcggtgtcgggatagggctggccgatcgctcgctcgtctcatcatgaggcttgtacacttgtgccgttgcgcgagagatctggtccagggcacccggtacacacagatatgggggacgtactcatcatccatcgtcagtagcggtggctgcacgctgtcgctgtggagtgggggcgaatcatggcaaggggagggcgattagcgggaacaaagcgcggagcagcgggattaggggggacgggttttcaacaccgtcaccgcaacgtgccgccatgtgctgcagcaacgcggcgggacacatcacgtggacatgggcctaaaccgggacgcgacccacgccatcaatcggttggtggctcgcggtttgtcacccggccggttccacccgactcttgaactctccccgctaatcgcgctgcaccaaccagcccgatttaatttgaccgcggtgtcaactatcataccatgttcttttttcataacagctataaatagtactagtatatagtgtccacgtggattaaattaagtgactggagaaattaactaacttgtgcatgcatggtgtgtttggtacgcagggacttgacccgatgctgacggcgagcctgttcgcggacgcggtgtgcatcggcgagaggagcgtggacggcgaggactgcttcgtgctcaaggtggaggcggaggcgtcgagcctgcgggcgcgcaacagcagcagcgtggagatcatccggcacacggtgtgggggtacttcagccagcggacgggcctgctggtgcagctggaggactcgcacctgctgcagatcaagtcgagcggacacggcagcgtcttctgggagaccaccatggagtcgcacctccacgactaccgcgccgtcgacggcgtcaacatcgcgcacgccggccgcaccgccgtctcgctcgtccgcttcggggacagcagcgacggcaacacgcggacgcgaatggaggaggtgtggaacatcgaggaggtcgacttcaacatctggggactctccatggactgcttcctgccgcccagcgacctcaaggatagcaaggaggacaaggacgtctccgccgccgtcaagcccgcgcggccgccgccgataaggataccggcggtggccgtccgcgtcgggccatcgcaggtcgccgccgtcaacatggacgattccgactcgctcattgcgaggtcatgacatacatagcgggcagtgttacaccgtatgagtcgtgtgtgtttacgtgccttatcgccataagttacttatggtaagatctgtaaatatattgcaggttgagatatttttgttttcggggagtggattttacctcagatagatgctcaggggtgagtagtaaagcgagtaatccgggatagatgttctaattagcggtattgtaatttgcttatgacgccccttcactgtaaagttgaaagaatctccagttctgctagtcacacactgggcttcagcatgttttccacttctcctgaacatacttgtgctacaggtggctgcaatccaaaacgcacataacttgctgcaagtgttttcaagagtaaaaacttaagcctcagtcctcagattaacacaatgcagttccaggctttcagcccccagaacatgtacagagagtggcacaaacgtatcacaacatcggtgccatttctgcaaggggttgagtgacagaagctttgcgaggatctgctttgcttgcatataaaaagggtagctaagcactgagatgagccttgcagcaacacacctagtcattttacatgtacagttagctaccccgctaaagccgattccataagattcatcacatttcgatgtgagtcgcatatggatcatggcataagattccacgacgcaactcgagttacagaagaaaacgaaaagaaacaaagaaaaacatacatttttatcacaggaagctaggctcgccctacaggagatagcggcggccggtgtggcacatagcttgcctgagctctaccttgactagctgccatgatcttgttgagcttatggtcagcgagggatgcgtgctcttgcgatgcgtgcacacctgcttgcgtcctggtagggcgcctgccgtgaagcatcactatacacatagcaaaagcctgaagtaaagcaatggatgatctgaattcaactgtgtataacccttctctgaatgaaaccatactgaaagcatgcttgtcttctcgtgatcgaccctacaaatacagatttatataagcatcaactgattaggtcgtcatagattagatacataaggacataggcaagaacagagaagcacaaggacgcacctgaacaaacaagtcaaaccgttgacttccatccgtcgtctggtttgcttgagtggatttatcacctttgttttctcgggcgtcatcgctgaggacactgagcatgcagccttcatcccacccaccacagtcacacgctcctcctgatttccacctctcaatcagaggtagtggctgtcctgaggttgatgtaccatggaagccattaggaagtacggcaagaacactggatgatgcacaactatcatccctcgtattaggatggaaatttcccaatgggcaagaacagtcggttggtgttgacatgcttcggctggaatgctgtgaggatgagtgacgagaagtttctggttcttgctgagacaccgcactaataaaagccgcaaactctctgctaacatgtgaatcacctgattcttcagaagatggtagctgctctgagccaaccagaacaaattctctatgcaaatggtttttttctgcctggtagcatcttgattttcgatgtgaaaccctcatttccccaacaatattataaacaagctgatctttcttgttcttattacctgccttgatccaagccccacctcttttcttaggttcttcaacaccaaacagagtgtatgtgctctccagatcattgttatcggagatgcccttccttctcacggtagccaccaggatatcagaaccacaagaaagcatgaaaaaaggcaggccattcttccacgctagctgcagaagcgcatgccttgttgttgttgaatctatatcttgctggaggtacctttcactgttcaggacctgaggaggctggtttgtattagtttctgttcggcaatttgaatttaccactgaatcaactgacctacgttgaacattctgcaaagcagatcctcccaagctcagagattgcttatcaatatggccaggcagatgacactttggaacaaatgaaggttgaattggaccagaagtggatgactgacgtggctttaatattggatctaacatcctcctcaatgggctgcgtctactgcctttgttgcctgatgacttatctccatttatcttatccacagaggtgcttgcttcaggttgtcgaggacatggtccatccttcaggcttgaacagcggttcactcgattcagtccagaaacaagatgtctatgtggtgacgcatccatatcactgaactttgcactgatccgaggagttctctcagaggcacccctggaaatttgcttttggttgcgattttcacctatagttacagcagcaccaacagaatcaccttgagtcccagttctgctggtgccaagctcttcagatgaatccatgataggaagtggacatgagtatggaattcgaggaaattcatggtgttgcccaatatcttttgagaaaccaacaggtgacaaactggcatttctttccatttccatcaccgcactagacactagagtctcaaaaacctcaccagtcacgccactgctctgctgaaaatcaccacatgcagaatcattgttatgtgaggtgaagaaactttggccaatgttatcatcatctgtaaaaagcctgcgcgaacaatgatggacggcctcctctatattccttgtagtctcctcatcatcaaccatttcatgtcgcatggaactcccagtggcagtaagaagagggtccgagagtggagatatgtttctgagattcaagtcaccgtatttgccagtgttctctggaaagtgttttccatgaacaggcaacaagttcaacactgcagaatttgggctaggtgaatatctggccttcccatggtatttatcctcaagatcactttgctgaaactccatagaacaatgctgatggtcattgagtgtaggagattgattgctttcaagagatttgctgctgggacttgcagatgactgggatggagaagagaatatcagggacctactagtattagatggagaggcaccatggctgctagaaaactcatgcttttgttggtgagaccacctggctaggaggccccactcgagaactccaacattcaatgccttgtcctgaagatggcctgatgtctctttacgctgcaaatatgaaggaacatttgacatatgcttgacaagctcatcaaccgtagtggcctttcgaccaggccatggttttgagcctttcaaggatccacccgcatctgcactccgaggttcccgttgccttcgaaacttctcatttttcacaactctgattctatcttcaaattttccatcaatgttcccaccgactactgcaatcttctcttttggcacttgtacagattgatcttgtgaatttcccctttgacgtccatcacgacctaatgtggcctttacattcctttctctgctaaactgtcctttcgttggcatctttttttatggtttaacatacgccaacaagcagagcttttcacttgattcaaattgaatcgtcaagtttcaacaggatactacacttccttgaacctgcaacttcaatattagcagaaaaaaactcagatatgtagcttctgatatttccaccagagcactaatgaacagaaagaaaatagcaggcagcaccacagaaccaacataactacagtattgcagtatctcaattcagaactaagtatttgtcggtggacaatggcatcattttgtctcccgggaatcctggatttatgaaacattatgtttctacatgtacttagtggggttgggagttggccaccgacagttttgacacaataatgttctaattaggatatgtcaataaccatgcaaacaagactgaaaaaaaaagggctcccactaatgataaaaggtgcaaataattatagatatttgccctgatgctataccgtgtgtggcttgtatataaaaatagtttgcacattgttaagggcccagccatccataaatagttcagtcagtcctgataaatgtatatcaactatggctatggggcatctttccccgtttccctcaagaaaaagggcacctttctccacttgattttgttgggtggcttacaaaatgaaaatttagccgtgcaagcctagctactcacaaaaaaattaaaggtctaactacaagcaagaggggaaaaaactaaagttagttgcccggcaaaaataaaataaaatctggagttgcatagacaacaaatattttaccatatggattaggttgaaaccattttttccctttgcaaattagcctacaaaatgcatcatcatcaacgatggtcgttatagcggcagaacgggggaagttggagaaaacttgctgaactgaataagatggaacaccagctgcggcattaaacccaacagaaacccaccactcttcagcatctctctccaatcgagccaaccaaccacattacccaaacattgaaacagaagaagaaaagaaaaaagcacacatacgacgaagtcacgaagataacataccaagatgctcccaagaaccacttcaagaacagtccccccagctcatcgagatcccatatggaggtcacgcacccgcagatccgccacctcccctacaaccagaacacagatcagtgaacctcgaccaagcagagaaagaatgccaccccaagaaagatgcgccaccttgggggataaagcgagagcgagatggaacgagagcgcgcagcagagtgggagcgaaagaaagcttcggaggtggactggactggatagagacctggagcacggcgacgcgcactcggtgggtggtagtagtagtagtagtaggattgggagtgaggcgcggtggtagctaggagcctcctacttcttctactactcctgtcccctctccgtgacccgccaactggttaggtgggtggattggctttaggcgggtgagcgcccagtcgccagcgttctcgcaccccccccgccgccgcctactcccctcccctattgacagcccccgctttacttctaccgcgccgcggaggagggggagccggttataccaagaggagg

SEQ ID NO: 9035 - DNA, 15114 bp, Oryza sativa
ctgtaccactagtatggaccaacatgagatgccactggatcgaaaagaccaccatttatggtggatgtactgctgcaaatgttactttagaagtgcaagctttggactttcgattatgctactccttttattagtgctagtatttttttttccatccgtcaaattggcgcgtacggtttgattagcgaaaggggcgaggtcgcgtccttaggcagtgttataaatggattattcgtggatgaaagttgatggatttgctatctgattatacaggggaaattaagtagtacctccgtcccgtcccaaaataagtacagctatataaatatctgtgtttagcgctttgaccatccgtcttatttgaaaaaattatgaaaaatattaaaaaaattagtcacacataaagtactattcatattttatcatctaataataataaaaatactaatcataattttttttcaaataaaacgaacgatcaaacgttgaacatgaatagtactaaaattgcacttcttttgggacggagggagtatatattatgaacctaattactccctcattctctaaatgtttgacaccgttgacttttttaaacatatttgaccgttcgttttattcaaaaacttttgtgatatgtgtaaaactatatgtatacataaaagtatatttaacaataaatcaaatgatagaaaaagaattaacaattacttaaattttttgaataaaatgaacggtcaaacatttttaaaaaagtcaacggcgtcaaacattttgggatggaggtagtaacaaataacttagaataagttgtcttagcaatacattagcatttaccaacaattcagaataaagttttttgaaaaaaaaatgttttttgttttaaacgtgggagtaaataattcacccaatagtccggtaaatgagcataaaagaacgtgcttattcgcctagagtaaggttgaagtttcatatgttctctatgcttaaagcaagtttaatagtatagcccactactagctccaaatcatatatatagccaatttatataatagttgcttactatactattaatatctggtcccacctatcatacgcacattacgttttggagtccgtaatgcagctggctacagatctgtagctcgctgcttttctctctcttcctttgtgtctttaaaatatgtttatagttggcttatagcatgctattttacctgctcttataattccctataattggcttactcttgctataaatccaacaataaaatgtaaatcaagtaggtttattttctatggtggaactgttcttgttgacagtacgcttgagagtgattaatgcagaacttggaggagtaccatgataatattaacacatcgagtcatatcaagctgtattgcttgagaaatactcctacttgcattttttagggtgagaatttggcccctgcagaggacagttgccctttgctctccacatggagtcatggacataaaggtctacatttttcacccagggaggtcttgcaatttatcaaaatgtatactaaatagtcgggatatgtgcttttgtaaaccataaacatttcaaacaaagttgcgtgaaatgtaaagcagcctcggttatatcattttcagtggttctttgggagttctggtataacctgagcagctttaaacttgtgttctttttaggtggagtggcatgaaagtacaacgatgcaacccaagcttacaaatgcattccacatacatttcaaatttagttgccgtacacgcatagcaaacattggatccgcactttacatctaatcacctgctatcttcggtaatctccggccggattacggacattatgacctggtggttagcaaaaagccccctcaagaagtatctttcaagcccagcaaatcgattgctctcgctgggtgtctgttgtttctattatttcatggcttgatggggactccattggtgaggaaacggcagacctgttctggctacagatatatcatatccagctgacagtgccttccggggtcatatacaaagccgtggccagtagccccttgcaaaaaggaagcttcaacatatcaattattaaacagaacttcaacgctacaaaatatttaaataaatgaatctcatagctgtcaagctctaataactactatacttaaaaaaaccaatgtctcattttgattttagataataacagagaaaacattccttgtggtacggcgtactccctcccaacccacctttgtccagcggtgttgacgcctcccaaatccaaattaacggtccccaactcccaacgatgctgccggaccacgccagccagcgtaacgcaccaactcgctcgccacgatgaatgctcctcccctcctcgctgcctcgctagctcctcctctccccctaccagcaagcacccaccaccagtccactccacagtctcccacagcgccaccacggtgtccgaccgtgcgagagcccaagagcgagagcgaccgtgcgcgcgcgcgtatgtggctcgaaatcgcgagatatccacgtgagattgcgcagcgagacgcgagcggtcggcgcggccgtgccagccagctaagccgatgaaccgatccccctccctcccacagcccacacgccgccacccaaagcagcaatccaccaccatcatcgtcatcataacgatcgtctcctctacatagcccacaaccgccgggccgccgctcctctctcctcttcttccaccaagccaccctggtcccacccgtccgcggctcgagccccccctcaaaatcccccaaccccgtgcgtgcccgtgcccgtgccccgcccgcccgcccgcgtgccggatttcgccgtaaatcggcagcgtttccccgtgcgggggggcagcggcggcggttggatggcgctgtccgcgtcggcggcggcgtcggccgggcggggggcgcgggcggagaaggtggggaggatcttcgagcggttcgatgccaacggggacggggggctggaccgcgacgagatggcggcgctcgtcgtcgccgtcaacccgcgggtgaagttcagcgaggaccagatctccgccatcctcgacgaggtgttccgcacctacgccgagttcatactccccggggggcggggcctctccctgccggggctgctacgcacctacgacgacggcgccggggacgtcgaccgcgacttcctcgcgctgtcccttcccccgctcgagtccggggagtcctccccggagatcgccgcgggggacccggccgccgcctcgtccccgccctccggcgccgccgccgccgcgtcgctcctggacgaccacatcaagccgcttggagcagccggtggggcgccctcgtccagctcacgcgccgcggcggccgcgccggcgtgggcgacgtcgcccagccacgggattgcgttcgactcctcctgggcgctcctcgacgacctggagatactagtgaagcgcctccgctccaagcagctgcggagaacatcctccatcgacacgatcaacggcagcggcggcgcggggaacaacaatttcgactccttctccgaggccgggtggtcaagggagatctccggccaagcggattcggcttcgaccgccgcgccatgggacgagacgagccgcgactacctcaccttcgtcaaggagctcgccgtgctccgcacgcgcgcggacgcctcccgctcacgggaggaggccttcgacaatcacatggtcatcggcagggcgctctccgagcaccgcctcttccgggacgcgcttagcagcttccgccgcgcctgcgagctgcagcccactgacgtgcgcccccacttccgcgcggggaactgcctctacgcccttggccgccactcggaggccaaggaagagtatctcctggcgcttgaggcagcggaggcaggtggctcccagtctgcggacatcctcccacagatccatgtcaaccttggcattgccatggaggctgaggggatggtgctcggtgcctgtgagcactaccgagaggctgccatactgtgtccttctcatgcccgggcgctgaagctcctcggtagcgcgctctttggtgttggtgagtaccgtgcagccgagaaggcactagaggaggccatcttcttgaagccagactatgctgatgcacactgtgatcttgggtcagccctgcatgcgatcggggatgatgaccgtgcggttcaggagtttcagaaggcaattgatctcaaacctgggcatgttgatgccttgtacaatcttggtggattgaatatggatgcagggcgctttgtgcgggctgcggagatgtatactcgtgtgttgagcatccgaccgaaccattggcgtgctcagctaaacaaggctgttgctttgcttggccagggggagtctgaggaggccaagaaggcactcaaggaggcatttaagatgacacaaagggtagaggtgtatgatgccatatctcatctgaagacactgcagaagaagaaaccaaagcctcccaaaggaaaagatgatagtcaaggagaggaggccttcgttgtagtggagccatccaagttcaagagggttggaagaaagactaccttgcggcaggaccttgctaatgcccttgatataagagcctttgagaaaacgacaaagcttggccgctgtgacgcggagcttctgaggaaagagatgaacgagactgatgtccccatatcctactcaggcgctggcaacccagagaagtcaatacggaaagcagctctcgaggttattctccacaggctcctatctttcctcaagccagatacctttcagggttctgtgaaggcgattaacgaaagaatcctctccgtccttgatgcctctggttctggccgtgttgaccttgggatgttctttgctattatcgccccaatttgttctggtcctgtggataagcgcaagcgggttgtctttgatgcacttctttggcgtccggcaagtgaaggaagcaggggtcagattaggaggagcgatgcactgtcctacatcaaacttcttcgtgctgtttatatacccacccatggggctagcgacatgcttgaaatgcatggggagtctgaccccactatggtatcatacacggagttcctcgaaatgttcaatgatcccgattggggatttggaatcctaagcacattggtgaagcttgaggacagcgatcacattcgtcacggccgccacacctgctcaatttgccgatatcctatcattggttcccgattcaaggagacaaagcactcctttagcttgtgcaatcgatgctacagtgaagggaaggttccatcagcattcaagttggatgagtacaggttcaaagaatatggtaacgagtctgaggctcttatcgataagtgcatgtgctttaatttacattctaagaagctcgaagctgatacttgatcattcgatctttggtgtcgattgctcgagcatgaatctgtgtatcccctttctaggtgcaaagatctctagatagtctcctgccctcttgtaaactaaggtgctgttctgttcggagttttctgaatgtgttccaactacttgaaaatcctaatcaattagctattgttcgtccaagtgtatgggagtgagaacatgtgaattccaaacacactgttgttacaatccccaatgctcttgtttaatagagatccttgctgatatccatgaggttttatttgaaccaaacaattttgggctatttttttctttaatcacacttgtatgatttatagcttgggttgcaggaatagatggtaaaatcactatgtacattcagttttaaacttctttgtaagttggtctaacaaagattattttctaaggcagtcatcatgctggccactcttcatcatttcattccggatcgcttgcatggcaccacttgagctcattgattcttttctgatggctgttgccgaatactacaccctatcttatacggctcatatattgatcaagctgagacagatcagacgaagggaggacaggctggattatctgggtacgcatatgcattcgaatatttatcatgccataccgcccctgttcctttttcctggtaggttgaactatggaggtgtttttctgactccatttgactgctcttcaggttattgtttctgcattcttgtgcttccactccgtaccgctgaatgctgaataataatcaagtccatgtcacatgcgtctcaattcaatttgtcgccttcaagcatcccagctcttgccgcaaccctctcaagtgtgatatcgatcttcgctgtcaaagcagttgtttaatagagattcttgctcctcgcatgctttccttctcgtcagaaagtgccctgttgcgctggtaccccatgctgtccaagtaggtctcccccgtcaaaccgcatgaggtccaacccagcagtgacttctgctacctttacactgtcttccctccttgctttcacagatcggtccctttttctgccttgttcccccgcggccaactggaaaagcagaagctccgtggcacagcgtcacgtgggcagcgcgggctgcggagacgattgcagcgagccaggcgtcacgccgtgtttggttggctgcgatgggtggtagcaccggtgtgtggcaggctggcagcgcatcgtgcccagatagcagcaacagtgcgaccgggcggcaatccgcgattttgcgagccacgcgcggcagcgctcacacggggttcgttcgtgtgagcgctcacaacgtctttggcatgggcgcgcatcgcatctcgggtatggcgcgtccaacccttctcgggttgttcagagttgataagtaagattaggttagcaataaactggacatacatatgttcatgttgataagtaagattaggttttttttttggatggaggggtaggtctgaggtgtttgttcttcgctgtaggcaatctcagctcgagggattgcaaccgcgtgaacacgatagcttaatgatgtatcggccagcggttggaagtgttcatgaaatgatgcatacggcagttggcagtcttcaggattcaggaaaatatgcatgcgctttagacatcaggagattgacatattgagttcgatttgatgacagcatttttaaaggggatgtggcacaatgagcttgctcaacagtttgacttttacagttgtaagacttccaaaagattggacctgtaataatttagcacacatccaaacccaaaattgagaaaacccaatgctgtccaaagaaaatgtttgcagctgcatgaaactcttcacaccacatgacatcattgagatgctagccagaattactcctggtagaaaaaatcaatttattcccatgaattagaactaaacctactcacagtcaaagtatacaaaaacattgtacagaggggtctgtaagcattgggagaagctacagaaaacgacctctcatgcctttttctaataacaaagaaagacggaccaaaaattatgaagggatcttcaagtaagttgctagctatacccgttatgtatagaacctgctctgttcttggtctagccatttctgataccacagggcaatatacagaggcaaatctttcttatctatgctccaagcttgccaagaccaaaacaatttagtaccaaaagcaggcacagaaaagtatcagcaatgaaatggcacacatcacagttgtcaaagaatcgctccatcactcttcatcctcagaatctgcattatgatagcatccgataattttagtgataagatgcagtaagaaaaaccttagctattagaattcctggttcaatgaatgttcgattttgtatgttcttgtaacggaagggagctcctaacatttgcaccacaacgacttgccacagggtgatctaatcaacatgtgatttgtttatcacatattgcccatgctcatgtgaaaaaattgaaggccagtgtttattatttcaatatgtaagccattgggatctcccctattgaggcagattctcttattttttatttatggatgaaaaaaggtaaaacataaaataacgaatatagatcaccaacgagtgattaaaccaaaggttttcttacctgatcgaacatcctctccaacctgtcctttattgttcaattgtttcattatcattaagcatatgagtttccaccagtaaatatggaacacaagtaaagtgaggagcattgtgttgaaaatgtaatacaatgttgttgggaatttctccagcttcctcaaagatatgatggactgatagctgcacattgcaagaaaagacacaaaactgtaagtttgaaccttagttggtaaaaggaacagaagatattatgtcgagaagtacaaacagaccttgatgttttgattatccaaaatgggaagtaaatcagtcgtaacagaagccaggagagagcaaaaaggccaaaaaacaagctagccccgagctccttttctgtgtatttgcacagtttggcggtctcaagaaacacatcactcgcatcatgcaaagccagaataattgtcccaatccgaaaaaatctacaatataaaaaggatttaattgtcttagagccatgcttatactgcccttatgttttatagtgcaaaaggtaataaatatgttgcttaatagctcagaatcaacagaaacatggtgaacaggactaaaaaagaacatgtctaataaagcaaagtggtttcaaaacatctatgtattgttagatgacatagctatgctgcaagcaagaagggtagctgatatgtcaacactacaaatttcgtttttatatctatgtgttttcagataatcttactgttcttcaatttatccaaggaatcaaactactagattgcttttatgtctatgtgtttttttcagagataattttttactgtttttcgaaccactaggacttaactcagtcacagaaagatttggataatcgctgtagtccagtttacatccgaacataagagaaggaagtagttgaagtgcaaaactagcaaatatatcatcaaaggggcttgaaagaaattacccagtcagatatgcatatccgatcagaatagatgttacaacatgatgagacatcatcacagcaaaatcttttctgcgggtctcccaggcaacgagagcaaaaatgctgtagatataaaatccacactggcacatgtagaaaagcatcaatgaggacctgcaagaaaaggacagcatatatataaggaaaatggaggtaaatcacttactccctccgtcccaaataaaccaacctcgtactgggatgtgtcacatcctaatacgaggttggcttattttgtgatggagggagtaaccccaaataacaggtttatgagaactctaatcctgggacattttggtcagcatagcgatgaaaacaggggtttggtattactacaagtgcatgattataagtaattaaaatggctcggaatatgagtttcatgtataaaacagaaagagcaaaactaaagggtgctgacaacaacagttttatgtttttttccctagctaccttccttctgcagtatactagcaatgtatcaggcatagagcgcatgccatacaggtatgctcatagatatgcagaacgtacgtaagagtagtttacactcacgtcatgtattgatttggccagccctcgaagtattgcattgtatctaacgaccagggttcctgctttattatcaagaggacccatgcttgaacagaaccatagtatgtcagcttccaaatcgactcagagaacttgacaatctttgcttgcctgacctcatcattcatcagcttagaagccttgctactgaaacagtaagctgccagtggctgaaatgaaacatacatagggactatatgtaaggcgtaaattctcaagtgcaactgatagttattctgaaatttcaaaagcataattttatacaggcaattcggaaaattgtggacagaaatgaaataaaaaacatacaggaaccaaagctgtggttatctaagggcttagctatatagctaccactttatttgcaactgtacatatttttagctaaaacatgttataaggcttttccgaagttcaaacaaaagagaagccaataggtagccaaacaacatatggacatatggaatttacacttggatccaaaattgaaggtaaaaattaatgtacaagcctaatgtgagtatcaactcccttgatccgaaagattgtgagagagtacttcaaccaccataagacaccataagagttcaaccaccataaaacaccataagaggacataggaaccaagggtggcagacaagctcatgtctttaaagtagagtactagcaaatgacaaccacattgatcataaatagccgccatagccaatataatgcaattaatgacatttctattttggaaaaaaaaagcagggcacagacagcacttcacatgcgcatcgtcgatacatcgaattgtccggatcaaactgatcgggtacgagtacggccataaaggctcgcagtgccagcgagatggacgagcaccgctgccacccagcaccttgcgtcacccccccgggggagagcattggggaaaccgagtggagaaagagatctcgcggaacccggcacgaatctggcagggggtccgagagctgattcggttttaccttgtagacgaggcggtcgaggaagaagcgggcgcagaagaagccgacggagaagacgagcgtgagggggaagaaagacgacgcctccgggccccggatcgccatcgccgacaacccaacagagccccctcgccgtccgcaccaccacggcgaactcccgcggcagggcgccccccctctcgcgcgcgcgcgcaccgataatgtgaagggttcggcggttggggagggggagcgggaggaggcccaggcggcacgcgctgctcctgtttcccttcctatttctacctctcgcgcagggcgaggcgaggcgaggcgagacgagacggggtttggctttggtttggacacgatggaggaggaggagatcgagccgagggagagggagagagatggaggtggtgggggtgcgtgctactgttcctctcctctctctcccttgtgtttgtgtacgcgtgtggaatatgtgatattgggatctctctcggtgtctccgtgtctcggctgattcggttcttttaatcgtggggttcagatgggaactctctcgatctgtagttatggacttatggttcgaattaattggagggtcttccaagtagtcccaacatccaaagaatgttggcactggtagtgtttgtataataattttttcaacccataaaaaaatgtgtatacgttccgatcacaatttcctttcaaacccaaaattacatcatatacaagttctaaagccggcatgaattttataattttggtgataggattataggattgttttgtcttttggtcaatggcgtggcagatattcatttggttttaactaacgttagtttgaactcccttttcttcacggtgcatcctacctcggcacaccaaaagcgtgatgtctcctgtaggttgcttaattggagagaaaaaaataaaatcaatgaatttgccaactgtcatccgacagaaagaataaaatactttaactgagcttagtttatccaatctttcttgtatttgagtaatcttacaaagcttaaagcatgttcagatactgcttcaaacatagaaattgaattgattcatgtaaaattactacgttggaacttggaagcgactgacttagccaaattgagttaggccctatttattttgggagcatatcaggtggaaaccagggagcctgtgcaaccttggaaactctcaatcacatccacaggatgagcatccgatggctagggatagaggtgggctaaatttgcaaataaccgcccgccagcccctctgtctgttttgcaaaacaccccctgcgccatccgcctcccatcacttttacacccgagcccctacgccagtatcgtctccccacgactcgcgatccagccaccgcctctgatccgctgcgccgtctcagatccagccgcgccgtctcatgagtcccgcattgggcttcgccagccacgcagtggtggtcggaggtggccttgctggcggccgccagggagatgtcctcgacggtggtggtccggttcaggatgtcctcgacagtggcacctctgtccagttctgtagggcacgaattggagccacgggcagcagcgtggcgcatcatcggcagcaacgcttcaccggcacctgcgcatcaccggcaaaaaatgagaaggggcttcactgccagcaattactaggactccatcagcagtgagaggcagcatgacaacttcctacaggtcaggctcgatgtgtggcaggatgagtacctcaaggttcatggtcagtggtttgctattgtcacacatgtgcagcaggcacccaagggcagtcctgccactgcttcagtcagtaccggatcagaaactgagtaatggcaattgtgcctgaacaaaaggcgtcctcgtctgggactgtaatgcctgaacaaaaggctctgcaatggcaattgtgcctcctgtgtaatgaacttgtgtgtggagcattgtgtgtaaaatttattgaaaaattgtatctcagttgtttgtaccagaagactcatatcattgaaaattcatgctaattttttagtgattcagcaatggtgcctcctatgtaatgaacttgtgtgttttaatgattcaacaattgtgtgtgaaattgaaacactgaaacattgaaaaattgtatctcagttgcttctactagaatttttacaaggtgtttacaatcactaaaatactgaaacattcatgctgttttttccgagcactgatcagcactgaaactgagaaacattgaaaaacgtctcgctggcgtcgcgggcgaggactccatgccgactcgctagcgtgcggctgtgacttgagggccaggtcggcggcgactcgcgtaccacggcggcagccactcacgggtgacacgcggacgatggcggcagcgactcacgggcaactcgtggacgggacgggagaaacgaacaggcggcgtgcgcgctggggattagggggagggggtgatttgaaaaaagcaagattagtatggctaatggtgggcgcttaagtgcaaaattagcctacctctatccctacccatcagatggtgattatgtggtcttgattgagagtttgcaagtttgcacaccttccctggttttcacatgatacgttcccatttattttagcttaagattattataatctagattattgagctagattactgtaaactgaattataataagccgacataaaataaattgttagctgtttgtttatctggattattagctgtttgctagttgttatccacccaataattaaaaaaagcacatttaggccctctttttttaggcttataagccaacttataagtcgaaaagtctaagccaaaacaaacaagcagccttttcatttggcttttttgaagctataagccactctaacactattaagccaaaagctagattggagaagcttttttggcttatatgagatagatatatgactccaccactaaacttaggacattaaatccactggcttataaatcatataagccaataagctgacttaaaagtctaggccaataagcctaagcctaaacaaagagtgccttagagtggattaccatattatagtaatctggctttatagattgtaataatctatcgtaataagctatttgtttatttcagcttactcctaataatccagattataataatcttaagctgaatcaaacagagctatactcccaagtttcattatactgaacatgtttagacactgctacaaacatataaattgaatgaactggttatgtaaaattattttgcattccaagcaattttccgtcgcaaattgagttaatactctcattttgtaatattcattaatatagggcaccttcattacgttcattaggccgtgttcgacaccccttgttaccacccctctccctcgttttccacgcgcacactttttaaactgctaaacggtgcattttttttgcaaaaaaaaagtttctatacgaaagttgcttaaaaaatcaaattaatccatgttttgaaaaatagctaatacttaattaatcatgcactaatggatcgcttcattttccgtgcatactgtttcgattgggaagaaaggatgccgaacacagccttagtgtggttttggaactggcaccaagtctataaagggttgtatcattgttggtttttatatgagccaacactcatgtttgccatttgtgttgccttttatgtttaactagtaatgttgtgactgtctagtatatataataaaggaaaaagtacgaattactccccgaactatcgcggtcatccgaattacccccatgaaccataaaaccagatattctccacccccaactatgcaaaccggacgaattacccccccgacccaatccacggtggtttggtctatgtggcgtcaaaaagtaagaattaccccccccccgaactatcgcggtcatccaaattacccccatgaaccataaaaccagatattctccaaccccaactatacaaaccggacgaattacccccctccccgacccaatccgcggtggtttggtctatgtggcgtacatgtggcatcccagtcagcattttttaatacacaaaaatggtgggacccacctgtcatactctcccacctctctctcttccccactttcctctcaatctctctctctctcttcccctcttcctctcaatctctctctgtctcagatgtggccggtgctaggcgcggcggggcacggcaggcgtggtggagaggcgggcgacgtttggcggccggcggccggaaatccactgcgagcggcgggcgccgtcgccctcgcgcaccaccgggagcagctctagctccacgcgcaccacgggcaccacggacacggcggggtgc

SEQ ID NO: 9036 - DNA, 61644 bp, Oryza sativa
  unsure (1)..(61644): unsure at all n locations
ctgcacttctctctctctcctcgtcctacaggctacagctgctgcctattgatgacacacctctactgcaatggcggagccgtagaaggctcgatgccatgtggaccccctcgtctccgggaccccacttgcagcgagacgagtggccgctttgtaagcaagccgctgcgtgcgcgtaggctaagccgcacggggacaccactaatggcagtaataattgcgtatttttgttaatgagcgctgcacctcgcggggcccatcggtctcactgacccgctctctcctttttcctttccgtcgcggcaaaagtgaggcggcgtcgacgcgagttgagacttgagacgcccaaaaaatcctcaaaatcccattgctcacccgcgttatataaccgcggccggccattgggagggacgccgcgaggggtgctcgtttcagcgcgggaggagatcagatcgggctcagatcttccagctcgccgcgccgcctccgccgccgcagcaggaagagagagggtgaggagaggaggaggctacgatgtttagcgggacgcagcagaagtgcaaggtgtgcaccaagacggtgtacccgatggaccagctctccaccgacggcgtcgtcttccaccgctcctgcttcaagtgccaacactgcaagtccaccctctccgtatgtcccctcctcctccctgatcgcgcgcatatatgctttttcttttttctttcgcttcctacctgttcttttgttctggaggtgaaaaaaaaaagcagaagagggaaaaagacgtttttatggccgggggaaaagtaaagatggatctgtaggatagtgcaatctgtaatgtcgcaagcagtagtagtagatctgtggattgatgtcgtgaatggatctggtgcttgggttttcctgctcgaatttcgtgtttgagagatcatggttttgtccgtttcacatctgctgacttggtaaaagaggatcatgagaaaagtcggcttttgattaatcagttaggagtagtcgtgcttgttcaggcaaagatttgcgtcagtctgacaatcgttctggttatctcgctttgcgattttacagcttggcaactactcctcgattgaaggagtgccatactgcaagccccatttcgagcaactgttcaaggagaccgggagctacaacaagagcttccaatcacgtaggctactattgaattccaaaattgcgaacattgacaacctgtttattttgttgataaaatgtgttatgaattctgatgctctggccctgcttatttgttcaattttatgcagccgcgaaacccgcatcggagaagttgactcctgagctggtgagtgccattggctgcatgcattgcttgtctgttttcattccaaagtacttctatgtttctatgtgatgctacctcgcttttcaactaattttgtctgaaacattcatttcagacaagatcacctagcaaagccgcacgcatgttttcagggacacaggagaagtgtgccacttgcagtaaaacagcgtatcctctagagaaggtaatgccccataatttctgctcttttcatcttagtttcatactgtagtgttgttaggtcatttcttccaaaattgcattgttagatgttgaaatagggatgaatgatcagagggatcttttaggtacattattccgcctaattgtattgttctactgtaacaagttgtaaggttctgccttgattgtacttatttaccaagaatttatttcaattatgctcctcaagtctttggaacatgcagtggttgtgatgataagcttttatttgcaggtgacagttgaaggacaggcctaccacaagtcctgcttcaaatgttctcacggtggctgtgccatttcgccatccaattatgcagctttggaaggtatcctatactgcaagcaccatttctcccaacttttcaaggagaaagggagctacaaccatctgatcaaatgcgcatcagtcaagcgcgccgaagcacagccggcaccaccaccggccgctgcagattcctcctgaatgtaccatatctccagtgaggcttgagggcgaaaattcggaagccctctgttttacaacctgcttgtatgccatgttccagttctgaggataccgggacctatcaatttcgtgtcctctgctgtgctagactcgatcacattggtgaaccatgaatatcatgtccctttcaaagaaatcgttgtgcaagtactgatataccgtactctattttgttgattgctttttgagcgtgtgtttatctgttcagtcgtcttgctctcttttttttttttttggggggggggggggtgggggtggatttttcataaaattggtatgcggcactaacgatcatgatagcgtcgaaagaacacgattcggtttattagccccgaaaattatctccatttttctttttaacattttggcggctgtcatgcaaaattgcgcaggaaattagactagttagtttaatatcaaaattggccacatttgagtattactttttgttccccgactgcatggtaaaaagaaagatataaatatacagaaatacttctgaaaatctactgacatgattttcattttttttccatacgttaacacacgaagtttaagaacctctcttaactgctagcgttccaaagcaagaaaaggacaaaccgcattttaaaacaaactccatgttattttcaaggaccaattaatttgcatatgtgagtgcattcgatgatcatgtttacgctacctccaattttgttgaaatgtgtgatagtagcttaaggaggtagcaggacccaaagtgggtgtgcgtatccacaagtgcgtgtaattgtgttcaccttgtactaggggaaaaaaaaagaagagcaagacggtatggggtaaactgagaagaaaaaacggagaaaacctctatttcttaaaatccctttctcaactcattttactcacgtccatgctcaccacaaagaaatgaattcgcagtcaaacatcactaaaataggtaatgctccgcaagttcatccactacacctacggaaaaaaaaaatgtggtgcccaaatgcccaataatacaaactgttcccctcccgtttctttggctgtcctgttccatgctctttgccgagccagaacaaaacacaattgagcaagccaaccatggaaagctcagcacattaaggcaggtcaagatggaacctgcacctcatgtacctacgctgtaagtcagcttgtgcttgcggtggttctccaattttcccctgcataaacaccgtcacttccaagttcttcctctattctaagcagctgcagagaagatgagcacgataatcagaaaccatcccatcgacaacaaaaggctattgtactatgacttatcaatttctatagcagatgccggtgtgcaaatatgtgaatggtaatggtatatttcaaaaccataaaagttgctctggcatgaatctaactaacccaaaaaacaaacctgattgtatttactgagacattctccacggcaaggagcacccgctttgatctgtccagcagcagcaccaacagccaagtcagcaatgaaagaatcatcagtgtccccggacctatgtgacaccattacgccccaatgagcatcctttgcctgtctcacaacctctatggcttccgtgacagtgcctacttgattagcctgcatatcatacacaagcacaattcaggtatatactaaatgacctttgaggttgagagagaaatcagtgatcaaggaagattccagaaaataaatacttcatacttcatttgcatgcaaatatcgtttgcacctctatgtctacaacatgctaaaagttaaaaagtaaattcctccagtggatagttaatcttgaattattatcatattaatttatgtaaatgcctattcaagtactaaatgccaaacgtgtgaattgactatttgtatgctagcctattaacgattggttttcattgcattgtttgtaaatgccttagaaatcaactcatatgacacaaaacttgaactataatcaacactggaatggcagtgtcacttaaataagattcaaagggagcactgagcgtcccggcacaaagatgacaacaactattaatatagtaatattaattccaaatctttctttcagatggtattaatcttggatagttccaataatacgagtaagatgttgcacaaagtagctctaatcagtttcggtgcattaaaaatagaagtataacttatacttcaccttgagaacaagagcattgcaggtatactcatttactgcccgcttaatgcgttcgggatctgacatcaataagtcatcacctacaacctgaacaaatgttatgtcatgagatactgaacaagaagaataaaagctcaaaagaacatattagccacctggcacagctctagggtggtaaacttcttcgaatgctcccagtcatctttatcaaagggctgttcgattgagacaagtgggtactctagcgtataataaagaaaaggggaaatataagcctcatgaatgaaatcaaaagatgtaacaaaaagattttaatccagacatgtgatacctgaacaaagctggctataaatctcaatcaaatcatctgcagttttgaagccctgccctgatttctctgcaaacttgaactccatgtcatacttatttcctgcacaaaatgcatgaatatagccagaaatttaggtcatcgatatatcaaaacaaactaaccatagcatacaacacattctaattgctgttcaagttctctgcttctatggttcaaagttgtacggttaatataagccattaggttgacggctgaccagcaatactgaatggcataattccactgatgacacaaagaagaatgaatactaggtggccatgaaaaatagtactccctccgtcccaaaatataacaatttttaccacttaggatttgttccaaaatataacaacttctccaccaacattcccttcccaaccaatcacaaccccttcctattcaattttacctactttcttaataaccgtgcccaactctaaaactctctatattctgggatagagggagtaaaatcaagagatgacacaagaagagtgaacagaaatgccataggtacataagctgaaaaacatggaaataatgaaaaatgagttatcaacagagtcatggattttctcaaataataaggaactctttctttaatgcatgagagatcagcagagagcttgtattcgatcaatcagatatcattcacatgattctttatttgatcaagggaactgcatattaaacaatcacacaaccaatacccaagaaatcactctttctatccttacccatgcaaaaatcggtagcggcgacatcaattgctagcttgatccttccattatatccagctctatttattgcctcaatgacaagatccaagccttcggttatgctgaacattgacccaacggatacggcacattgatatcaatatgcaggtgaccaaaagggaaacaataatagaaccacaaaaaggtacagacgattccttacttgcctggaaatatttggagcaaatccaccatcatcacctatgttgcagctgtttgaaccatatttctccaagatgatatcctatcaaatcaattggtaagaagctattcacgaagatagtaagcttctcttcgcactataaaaacaaaattttggaacatctgaaagaataaatttatctaaggaggaatccacccaaacaaattaacactaatcagagtggacagaaagctgaaaagggcatcaaaagcagaatacaatgccagttaagttttgtggacagaatcttaaactatttgaataacaggttggtcaacatatcagagtggagcagatgcatgccatgggaaggtaggcccagcatgcaagttatagtagtctagtgatagtaccttcagatgatgatatgtctcagaacccatctgcattgcttcttcaaagtttttggcaccaacaggaaggatcataatttcctataaagaagcaactttacttgcaggtctcaaaaaaaatatatgacaacatagcaagatgttgatctacctggactatcttaacatgttcccagagaaaaagaaaacttcaaacaatgaaagaaacatgggaataacaaatttaaactttgcagatttcttaatggaatctgcagaaaagagtgatccagtaatttgcagagaaatgttggctaagaaaggtaattctacaggtttagtgagaatacttgaatagggagactgtttccagcatgtgttcctccattaatgactgtaattgcagggatgggaagtgtcgtagcgcttttcccaacaagttctgctatatgcttgtacaatggaacctgcacagaaataagcaaccaactataagaatgcattgccatatccaacaccttcttttaacccagaaccgtggtgattttatacagaactattacctctttttcagcagcacctgctttacaagctgcaattgatacagccaacatagaattcactccaatctcagcctacatgatgcagtgtcaatagttattaaagcaggacaattacaagcgatagaagctgtactgagctggctgctacaaagttaggcttgacagtaaagtgagatggtagtaaagaggagtagacattaaaaaaaaattatagaaaacaacacatcaattattttcatcattaaatctacatggaacaaaccaatgttaagaactgtcatgtggctgattatacagatcgatcgactgtttgtggtaaagcacaacccttgaataatctctcattataactctcatcaaatagagctcagcaatgtaggatcaggttaattccatagagtgagaagagatatcgattggggttttagggatttaccttgtgatgcgccttgtccaagtccatgatggcctggtcgatctgcgactgctgctgcggatccattcccacaagcgcctccgacaccttgtcgttgatcacccgcaccgcatcggcgaccgccctggcgagcagcttccgcttctcggcgtccctgacggcgtcggcggcggcgccctcgggggcgtccgcggcggccgcggaggcgcggtgcacggccttgttggtgtggaggctgacctccacggcgggctccccgcggccgtcgaggatctggcgcgcccgcacgctcgtgatcacggccggcgccgcccggcgcatgtggttggagatgaagagcaccgggtcgggggccttggcgcggaccgccgcgttcacggcctcctcgatcttgcgcgacagcaggtgcttctccaggtactcctgcaccgacatggctgaggctgcggcggtggcggcggcgtcccgcgctgctcctcctctcgccacgcttcccccctctctctggctctctcctcccgcgccctctgcctctgctcgtcggctcgtcgcctccagctgccgggatcgctaggccgtggacattggccgaactcgaggaaggggaggctcgagacgagaagtcgagagtcctcggaccagtgcgtgcgtttgggtaggcgtgggccagtttcacgatgggccggagcccatttgtgtaagcttgtaccatgggctgagtacacactgtgtctatgggccactgactaggagaagcccagcccggtggtcatttccttcccattgtcttcaaggaaaaaaatcggatcaagcactccaattttggactggaagttgctggatatctcgagtttggaagcagagaattaactgcacttgagtcagtcactgatatgtgggccccattttactatggcccacatatcagtgactcaactacacagcagttaagtcagagcatcctttccctcgagtttgttctggacgattcgggtcgtgctggtaacctgaactgttccgttcgtaatctaccgagcccagaaccaagtccagcattttcgagtctatccaggaatagaagagaactatcgagaagctgctttcctctccatccttatcattcccccgccgcatataagaacgccatcccctcctcgacagatatccaagcaaagcgagaaaagaagccagcaatcgaaagcccaagcttccaaaaatccgcttccaattcgcgaaactacactagtcgtaagcgccaaatccaaccgacgatgtcgctgatccgccgcagcaacgtgttcgaccccttctccctcgacctctgggaccccttcgacggcttccccttcggctccggcggcagcagcagcggcagcatcttcccgtccttcccgcgcggcgcctcctccgagaccgcggccttcgccggcgcgcggatcgactggaaggagacgcccgaggcgcacgtgttcaaggcggacgtgccggggctgaagaaggaggaggtcaaggtggaggtggacgacggcaacatcctgcagatcagcggcgagcgcaacaaggagcaggaggagaagacggaccagtggcaccgcgtggagcgcagcagcggcaagttcctccgcaggttccgcctccccgacaacgccaagccggagcagatcaaggcgtccatggagaacggcgtgctcaccgtcacggttcccaaggaggaggccaagaagcccgacgtcaagtccatccagatctccggctaggcatcgccggcgtgccgcgtgcgcgacggagaggagcacggcggggttttcgctttggcctggtttgtctgtcgtgaaggagcaaataaaatcgggtccggttgagtccagtgtgtgtccgtgtctgtcttgaacagtcgtgtgtcgcgtcgtgtcactgggtcagtgtgttgttccagtgcgccgttcatcagccgatcagcgtctgtaccggtcttttgcaactagttaagtgatgaatactataatctgttaatacgtgatctgtctgatgcattctgtgctttaatttgattgagtttgggtattactacctgacaagattagaaaccatacaagcacctttcgaatttcgtaactctcactggcggatttaacccctctagccgccaatgctcgttgccgaaaacctaaagtttttttatatgttttcaatgattgaagagtttttctttagcaatatatagaattctgttttttttcaatgatttaaaaatagtttttctttagtaaatgctctatatagctagaggctaggtttgggttggactttttctgtatctatctaagattatggtagcttgcagtgactttagaatattactctctctgttccttaatatagggcgtggctgttgtagttgcaaagaccaataaaaccgtttaaatatcagttacgctgattaattctctctgttcgaagagcgacgtttaggtagttgcgcggtagatacgctagcattaaccatcatgcagcgtgcgctcgacctgtactttccgcgcgaatagccagcatgcatgcagatgcatttttgctagcgtgctttgctcgcctggcataacgccatgtatggattgttttgattcaaaaatttggaaagccccatgcatgcatgcttgatcgaaaatttggatggcgccatcagcgataaaaaatgaatagaaaattttcacttggcgccactatttgccagcaaaattttctcctataaatatgggcaatgcaccacacatttttttccatctctcttctttcctcccatggttcaacgtacgtaatggctggttttgatctaaatctacccatcatcaattgggacgaagttgaggatttcgatggagatatatctgatttgaactatgactttgtttgggattatgacaatgaaggtgttcataggagcttcttctcttgctttgtcttcttttttttcttgtgcatgtgtgactataattttgtttcaacgcacagatggtgaagatggcaatggccgcggcagtggcaacgacggtggctgcgacggcagcgacgacgatggcggcggcagcggcggcggcggcgatgacgacggtggtggcgacgacggcggcggtggcggcgatcaaaccaccgatggagcagtcgatgcaggtaatacacgttcattttctttttgttgctgtgtctttttgctgcacgagttgaaggcctttgcatgtacacatgcacagtgccatgcttaagcaaactagccgatgcatgccaaccatagtatagcctgcacgttctcagccatcatccaccatgcatgtgtaggtatcaatatcaagaggaggagacactaccctcctgatatgaaacgagccatatatgcattgtgtttggagagatcggatcctggtatgatgaaggagggagtgacaaagtcagttgctactgatatgggggttccatggagagttgttcagcatgtatggcgacatggacaaattggaggtggaattgaagctttcgaatcgaagaagaagaataactgtggccgcaagaaactttcttttaaccctgatgccatcaaagatgtaccgcttaggcaacgccgaacactccgtgacctagctaacgctttgcatatgtcaaaaaccacattgtttaggcgtttgaaggaaggaaggtttaggcgccatacaaatgccataaagttcaccttgaccgaagataacatgaaggcctgtgtgcaattttgcatacaaatgcttgatagccaaagcataccggacgagccaactttcaaatctttgtacaacattgtgtatatagatgagaaatggttttataggacaaagccggacgaaaattattacttgtcacttgatgaaccgaaccctcgaagaaatgtgaagagcaaaaatttcattgataaggttatgtttctagcagcgaaagcccgtccaaggtttgatgagtatggcgaatgtacatttgatggaaaaattgggatttttcccttcacttactgggaggcagccaagaggagtagtcgcagtagggagaggggtaagttgtttaattatgcttagttactccacatatgacaactctactaattttgtttaattgcatgatttaatacaggaaccatggagctcaaggccatgacatctgtcacgagggacattatccggaactatctcattgaaaaggttttgccggccatcaaacataaatggcctaatgaggaacgaggacttccaatattcatccaacaagacaatgcaaagacccatattgcagttgatgatcctgcatttttaagtgttgcacaagaagatgggtgggatatacgacttacatgtcaaccaccaaactctccagatcttaatgttttggatttaggtttttttgcagcattgcagtcattgtttcagaagtcatctccatcaaacatcgaagaaattgagacaaatgtgatcaaagcatatgaagaatatccggcgaatagatcgaatcatgtgtttcttactctacaagggtgcatgagagagattatgcttgcaaaagaagggcagcactatgcaatcccgcatatgaagaagagatcattagagagaaatggtcaacttccaataaggttgcaatgtgataagcaaatttatctagatgcggtagatttcatcaatacatagttaggatatttctcttgtaactttgcatcgttcaacaattagcaagaaaaagaggagtattcatgtttgtttttctctgatcttcacgaaaaagacattgcattaaattgaatagaacaatcaagtgcatacacattagctaaaccatctagcaatgacaacaagcagcaacattggcactgattatacctctagtgaatcagttgtttttttcctcggcgttagtctcctctagtgaatctgcaacaaatgtgttgttggccagtgagtcaacaacgtacccaatgttgtcagagtcagtgaaacgatcggcgccggccagtgagtcgaccacgctgccctctcggattccggcatcccctgccttctctccgttgtcacccttgccgtcgtcggtgttgcaacagcgaacgagctctgcttgcgctcgcagccgcatgcgaagggcatgcacacggagcgtacgagcatgagcgatatccatctgcgcctcctgccgcatgcggacggcggcgtcgcggagcactcggacacggccaagctccacttgagcacgacgtcgcatgagcacggcgtggagacgaagtgatcgcgcgcggccgaactccacctgcgcctgctgccgcatgagtcgtgtagatgcaatcttctcctctgtcgtcgccatcgtcggcatatgaagtgtgagcagtgtcacagaggggcggtgtgtgcagtgagagagagagaggaagcagtgagagcgagagagagagaggggccaggagctgagctttttaaaagccaaaccgagtcatcagttaattctctgcatgcatctgcatgcatcagtacaggagccgaggagtactcatcaattcctgcatgcaccgaggagttgccaccctatattatggaatccaattgaaaagaagttacgccctatattaaggaacggagggagtacgactgtagtataaatggatgcttaacaaggttagaattgcctaaatatagtctctgatgatcattttctatgtttttaagataaacggttaaaatagaagcagaaactaggagtgtttatgctagagctccagtttacacgttggttaaaaaatgtaaataaatagtacgagtgcaaaatgtaaacaaagtctctacttttggttaaaaaaagtatgagttcttatgcagggacttcagtttacaggtttttatatatataaaaaaaaccaacgagacaatgaccacacctcaattagggatagtacagtcaaaaagataaacatgaagtgtagtaaattcaacacctaaatacactaagctatcaggcggtcaggcctaaagcaaagataacaaaagtactagagagtactgtagggatgtcagcccactcttcatgatttcagccatcagggcctttaggagctgttgttaagtatgatgcagaaggttcctccgttgtagaagaaatcacgagaggtgttcataattttgttcctaaaaatcatatcattcctaacattggaaaggtcccaacaagccttcgcaagtaaacctaatatttgctttttcaataatttaacatccccaatgtttggcttagttgtgaaataagtcaaacatcatattgcaaaccagaagtaatttgttaataaaacttttatatacgtgttcttagcgacttaaaagcgaaggccgaaaaatatagtccgatattaaaaaaaaaacctaaaatcagcttcaaatttaaaattaaaaaaagaatcaaattttgactgataagtataagtatagatgaaaagatgagacgttttcctttaataactacttaatatagttagaattgtctgggctattttttttatctaccaactctgtgtttattacttgtgcatttaaaacccacacagaaaagccctcacaatgtggcactagttttagttaacttgtttcactgatgaattagcaaagcttagttaacaaaaactaagcccctaagcaagtacgctcatcgactcattatctagtaaccctacgcacatgagtgtttagttgagtgataaactttgtcatgcttggaccattcctttgactagtattcggctacaactgtagtgtgtcacactttcttttaaaagaaaggtcttgttcgatagccctaaactatagcgttttttgctgtgcaggactgtgctgcacagcccagccgaacggctacattcggcaatctgctgtatcatgtgaagctcaaccgaattgctacagccggccatctgttgtatcatgtgaagcgtgtcccaccgcaattggccaacagttataactgttatttgcagtgctgcagctgctaggcctaccgaacatgttgaaattaggcccacttgttattggtggttactaacaattattttaaggattatatttgaaacaataggaagtaatgtatacaaatattatatttatggtgtgccatatttttaaaagaaattaggcccactctctcctaggtggttgctaataattatttcaaggatattatttgaaaacataggaattaatgtatataaatattttatttgtcaaacaggtacactcatttagccaatatcataaaaggaatgttatacatgcgtcattatttacaacaaattccaaaatgatacctagtgggaatatgtgctaagggccaacatattataaaaagggccccattgccctcttcccctcatccaactccatcgccctggcgtgcaaccaagttgcatattccccttgctctccttgtcatccctctcaataaggcaacgccggatgtagatctagaagcggaggacctcaattgagcgcaagctattctagatctgaacaacgtaagtactctatttggtttttatcttctccttctccctctgtgttgtagtggatctagatctagggttcgttctatttggtgacattatccttcctcatggtgacgcaccctaatctaagggagcatcacaagtgaaatggtgtgtgctaaacaacacgatggtcgtcggttggtgatagtgaaatcgatgatgacaaaggtggggaagactaagagaggttttgtaggtgggttaaattgcatgttttgtctatttgatttatgcaatgcaagtagacaaccatttgaatgttaatttcacccccaagtgcttttgggtagttccggttgttagtcctcttcggaccatcctggtcattttgcacaacagtataagtgagccttttctattatacgtgtattcgttaatcttcaagtgcgctatttgattcaaaattgttacacccccaaatcgtttaggttcgatttcaaacatccttttgaaatagcacaaaaaaattgctactaatgcacatatgcctaagtaattacacattaccttttgctttaaaaaaactttacatttgagtcatttgagtcagactttaaccttttccattcagccttgagtgctgatggttatggcggactagtagccatagaccatagctgaccaatacatgcaagatatttctagctatacggaggatagacatccgaattatccattcactcgatatttcaagtataatatatagtttatatttaaacttatgttagggaacaaaccaaaatgctcaagtgcccgattcacgaaaatattattcgtagtggttgtgtgtggatcatgagttcatcacctatttgccattctttgtgatctctgaaagcttgagccaccatggccttatgcggctgtgatctcatccctcgtgtgaccccttatgctcttgcagtctagcccagtgcgtcgcttgccaatcctcaagcttcattgaatgcaaaagagggctttgtgaactccaaagttgtgcttcctccacgcctttaattctccaaacacaacttccatatggttggtggcaccacagagtgattggttttgtgcatcgcacatatggctgtggcatagtgttgacaaaaaaaaatcgaacacactggcctgggagatctgcttagctcctgtacaggtctaaaaattgatgagatgtgggcgtgccagtcagtttgatcctgcaactgacaagatatgcaaatagtagatcaaaacagccgatcaactgacaagccgatggagtagttccagccgatagccgataacagccgatgccgataccagccgatagagatagggtttaagcaatcggctatatgtccaatgtagataatgatataaaggcaatcggctgatgatgctataataaaataacaatatagtcatgtataaaccaatcggttagcaatgatatgataaataagcatcgatccgagggttaaagcacacatcggctggaggtccgatatcatgaaatccataagattagattaaacagtgaaacctttgttgtcatcggctaaatccaacttatatgtatatgcaatccttatgagccgatgcaacatccagataactcaccagctgaaaccccgatgaaacccttattggcaatcaagaggcaggctagagattatggttctaagcacgacttagtagatcaaacttaactgatacaacactaagtatgaaaagaaacacaatatctagacaatcaagccgatgactgattttcagggtggtagatgtctaagctaaactaatctagcaatgcgatttagccaataccggcagaaaccctaaaacgagaagcagccgatagagctaaattgatatgctaagactatattaacagagacatatgataaataggtaggcaaatatatcattcaaaccagatcaatccaagaggtcgaatgtactgatgcagccttgaatgacgccgacgtagacgatacaattgcctggaccgacggaacattggacttatcccttcgccagagatcgaagacgatgcagcctcgcgtcgggtgccaagtttcgccggaacgtaaaaacaaaagtagaaataaaaagggtggcgatgcgccgaattgtattgatcgtggagatagattacatagaccccgggtgtacatatttatacccataggttgatacaattccttgtcggacaagaaagaaactaacctaaagataaaaggaaaatataaagtccttatcggacactaaacacactttcctaaagataaaaggaaactaacaaactattcctaattaatagataaactgccatgccgcatcctctttaaactcggtcacttagggataagcttcctttagtagattgatttccttaaccgaatatagcaggaattcgactattggcgacttgataactcccatcagctgattccgagatgctgcaaccgataatgattctaagccgatgacgtctttgccgattaccaaattttactgttaacacatagggctccttgtgtcgtgtgtgcatgtctctcatcagctctgagctatgcggtgataatgttgccttgctactgcgcggccacttaacaaccataggccggtctcatcccacaacatgcttgatggattgggtggccaggtgtacaccggggtactggcccctacaacttatatctgaaaatctagtaagtgggtccggggtctagtttctggtcactttcacttatagttgaaaatctagtaaaaaaaatgttgtcacctctatagcttattctaaatgattccatgagcatccttgagaaaatgttaactttggagctccgatcagataacgactttcactgcactatgttgttgcattttctactggtttccttactcctccgacccttaagtgtttactaaatgtttatgcagttgaagcaactatggtggagaatcatgtgtcaaaagaggattcaaagaattataaattgaggatgggctttgtggtaaaaaaaatccatcttcttaaatatccttgttgtggtacttgtcgttagtttccggacaaataaaaaggcatatgttagaagaaaaataatattttgtttgagccttgatcagatatagatctggtgttttatgacgcgattagttgattcctacctttagttgcacgaaagagttagcttgccgattttgcatatagaatcttctccgtggcatatcagctctaaattgtaaatctattttcatccaatataacaaaacttacattctttatgcaggatggccatatttgtgcaatttgtgatgatggtggtaatttgatacggtatgcctattctttgtctagttatcctatttctttttcatatatttgtttagttgtactattttttcccctttgttattgttctcttatttaaggcactaaaccgatagtgtggattgtacttgatagggtgatggataaaattaatactagagttgttttactgtctaaggcattgtagtttaggctcactggacaatggattggaacatagttgataggatgatgggtattagatttgtgtttgagacgatgtcctcatatagattgaagacattcaaccttgagttttccagatcacactgagtaggttttggcaaattttcccttctatttactctcttgatcaacacacgtgttcctgtttttgttgtcatgttactgttatattttcaagagccttaccattcgctgagaaaacaatacttatagatgttattattgtaaatattgaaattctgaaattaaaatcataagaaagtatttttaaatataaatccattgatgccacttgtatggtgctgaacatagatattggaagcttaactttttttttgtcaaaaataacaaatgttgatatttctgaatacacgtgtgccctatatttccaacagcgggagtaatatcaaaaatcataaagttattgggttttataaagtatcataatgtaaaattactggtgaaagtttttaaagtttaaccgaatcttgttctgaacgccaaatatttatgaccggagcgagtactaggtagacaattttcccatatgccataattcttgtagattttggctgcaaaaggctcaaggtttttgctttttattgtactaaaactatcagggtaaagcgctttatgcgttcaatttattttaatattatgatacttgattattgtagctgtgagggtgcctgtcgaaggtatttccaccgaaccatttccaatgatgcagattttaactgtgaaactctcaacatgagtcaagaacaagtggtaagtgcatattcctttgcctcttcaacttattcttgtttaagtattccagtattgccatttaccattaatatttttcaacaatataggaatcatcaaagttcatatgcaagaactgtgtgtataagcaacaccaatgctttggttgtggagagttgggatcctctgacatgtcatcgggttcagctgaggtatgtataagaaaaagaaactttgtatgtccttgggatacttcctcttgtatttggtatttccttgatttatcattttgtttttcaattttcttatggaattgaattaaggcactgcttgaaagcaatttttagggatggctaggagtcaatgataactttgaggaatctgagagcgatactttggaattgtatacacattaaagttcaagaactttttttttgtatgtgctcgtcagcataaaccaatttcctttaaattccaacttttccttcactttttgttaggtatatcagtgcagtaagagcagatgcagacgcttttaccatcctaagtgtcttgctgaatttgactctagtaagaacccaccagtttttgaatgccccctgcatgaatgctttgcatgcaagaacaaaggggaaaaatataacgaggaaacatgcaagaacaaggggcaggagagtatcaagaaaaaacaaggggcggaaaacaacaagaaaatgcacctggcattatgcaggcgatgtccaatagcataccatcgcaagtgcttgcccaggtgtgatatgtatttggcactatttgctagtgatagtgcccttctaaaaggatattttgttgacacggtgttctcttttttaggaatatttcctctgttcccaaaggttgtcttccaaggaaatggaaaactaataagggccaagttttcttctattgcctgtaagctttttgcacttcatcctttttgttagcatatgttctccatctccactatattcgtggaacttattattcacatagaactttttcagaaagcatacgatggtagaacatctcagaagtgcaacaagggatcacctcaaatttccaaaagttatggaagagcacatgcagaagtatgttcccaaaagagaagttgaaaacaaaaaacttattgtttatgttaggaaacgacatagaggtgcatctaagaaacaaggagcttccatggtggaagaagttgatcatgggaccatggaaagtgatcatgttcagagaagtagagatattaatctgcgagcacatgaacaaaccgaagcacctcgaaactatatgtctgaccgtaacacaagcactggtttcgtgttgtcttttgcacctaagtccttgttcccactcccatatccaggcaattgtggttggcttgatgattgattcatgatagtatttcagaaagaaaactgaagatttttaagtttcatgtatggcagataactttgtctgtagcatgtaacaccgttgtgttgatgttcgtgatggtagttaattactggtgactgttgagtataaatgtctggatactgtggcagcgacattccttccattgtcaggaatgaggatatattaagtactattatcactgtatgaaatgtttttcgcgaacgcctgtatgaaatgttattaaaatgcttctgttcatacctaggtgaaacaatgcactaatgtgtaatgcaggtatgtaactctctgttgggcagctttgctctggcctctgagactgggagtgtggctgtttccctacaatggtgaatcggtgatgcaggtcacagccttgcatcttgccgatttgtccagctcatttgaggtgacggatatggtggattttgctgtgtgttcattgtttatgcagtactggttcctccaattattttcataattttcttttctgttacgggccggcggaagctgccgtgaccgtggatagcttgatttccagtggacaagggagtataggtggactgtcaattgcaagtttgccagtgggaaactccagtaactaatgcatgcctcagaaagcattcagttgagatggcatgatgaaattattattttttgcaaactagatgaggagatgacgtgatagcctatttaagcgaaagcgatcgggttgtagtccacattacgcagaagcagcagtaaaaaaacagtgtctacctccgtcagccggaataatggccagcaacagggaagttctacaggtggtaacatgctgtgacggtgtatctaattgggtttatattctaagtttgacactgatgtctgctaattttagaaaggaatacacgtgggcacgtcttggtggttacatggatgctcatactctagcgggtgtttgatacgtttgacggtattcatgtatgcgaacgacacacatacttaaaaaaatttccctcttagaaaaagaaaagaattgtctgaagaggattagataagtcataaaccgcggtgaagtggcagcttgacccactagcaatcgcgcacagccgcacggttgttatcatcaaagattcaaagctgaagccttcaaccagggcaatctccattttccactcccggccgggtcggagtcgcgcgacgacgccaccaaggcaccaactccacgtctccgccccttccggttaattcgctcctacgcgcacccacaccaccaccacgccatggcgtgggagtaacgcgcgcccgctccacaccaccgacccgtggcaacgtttctcatctggcatccggctgtcacgttttcccgttcgctacagcccgcaaactcggggtttccccgtcacgccagccgcccaagcacaactgcacagcagcggggactccgccggtgtgcgccgacgcgagccgcatcaaccagttaccgccacccgcgcggcaacggcagcggccgcggcagcgaatcggggccagggcaagggccaatccatcctcaccaaccgcaccaccaccaccaccaccaccaccgcaaccgaacaaaactcggggaggccgcagaataaaggcgaggaggcagtataccggcgcggctggcctagtgtagtgcgcgctgtactgttcccacgtcgcgtcgaggcatcggttcgagcgagcgcgcgcgcgacgcgggcgaggctccggctcgattccgtcgccaccctgtgacagcagcagccaccgcccaccgccgccgccgctttctggaggcttcccgttggctcgtggttgcggggggactcgcggagtcgcggttgcgagttggctgcctgctactctgctagtgtgctaagcctgccttttagttagtctgggagcacgctactgctactttccccaatccaatccaatccaatccaatcctcgccggcgttggttcgctcgatcggcgcggcgcggatggagacgctcaggaagcaggccagcaagctcagggagcacgtcgccaagcagcagcaggtacgggttcctttgcccaattccagtggctccgtctccccactatgccaccaccaccgatcagcgcgtggcccgatgcgcggctaaaaaaccggaatttgggagtgcggggagctgcgtggtcgggttactggagttcttgtttgctccccgcagttaattccgcatacctagtggtaggaatcagggtagggagtggcgagtgcttgggttgggatagcagcaggccagcagttggtggaaggagctgaacatgaactgctcatttgctgcgcatttctgtatatcagatgatttgttccgaagcttgagtttcacttgttccagtagatgtgcttgtttggtaactaataacagaattccttgtgattacaggctgttcggaagcagttcagtgcacgctataaccaggatccttctcttgtcgatgaggcggaacttgagtgccaccagaatcttcagaggctatacaacagtacaagagctgctaaagtatgtgctccaactgtttgttatatgtgatataagaaagttgtctagctcatgatgtaaaagttattgggcatatgtctcattgtatagcatttccaacgaagtattgtacgaggtgtcgagggtttcattgctgtcagcaccaaacagatggagattggtaactgttaccatggaatatctgttcaacatccttccaaattttataatttttgtgtgatcacgttgcgatgtttcttcctgtagtgaaaaagctagctgaggattgttgcagatatggaaacgacaatcaaaattttggttttattcttgcaagggcttcagttgagtttggtaattcccatagccaaatggagaaagagcgggagaatcttcttaaatttcttggagagcaggtgctgtcatattatcattttcctctctttcttaagttttcagaaccaagcaaaaacaaatacattgcaacatgcaacggatatttaaataaatatatcataaattgtatactcaaaaagctttatataaatcctagaggaaaacatatataatctgcaagcacacatcaatccctaaatagcatcattataagcaacatgcacttattttctaaaaaaacacatgcacagatgttatgcttatcctcaaaacatcccactaactcaagatgtggtgtgcgatggcacttactatcaccaacaccactaacttattttatattgcatagaaatttcaatgctgcctagaatcttgtttaatgttcttaacctgaatcttctaggtttccatatatttttctttttgtacccttgacccttgagttacctgaaattaaatggtgttctcctgaaagtaacaaaacagtgtaaaaaacaattggtggattctactccaagagtacatattatatatggaagtttgctacaaacagaaacttattcagctttgctgatgcttgatatttaagttgatggacgtagcatagtttgtttatgcagtgcatggagctggagggaatttttttttattgctgtgtaaaactgagtgccttaattgcttcatttcggctccaatcttgcaggtttttgagcctcttcgagaaatgataatgagtgctcctcttgaagatgcccgcctgttaacttaccgttatcaacggatcagacaagatatggaatctcaggtaattacccgaagtgagacttcctgttcaccagagatgacaaccagatactaaaaataaattttattagatagctgatgtgatgagaaagcaactgaagtccaaggagagtagcggtaatgcagataattctgtgaaactgcaacatgcagaatcaaaattatctgagctccgaactacattatcagcattaggaagagaggcaactgcagctatggaggctgtggaggttcagcaacaacaggttacctttgaccgtctccttgcaatggtatgataagcctcactgttctcataaaaatattgcttaacatcatcaaataatatgtttttgccaatggttaagacttcatgtacatggcaagttgagcctatccatcgtaacaacatggctatttctcttttgctttgagtatggtgtaaccaatacatgtacaccattaggggtagaaaactgtagacatcaaggtcacaataacctttgggttctgagcagaattggtgtttgtggccatgtttggatgttgctttttttttttccctgtcaaccccaatgtgcaggcccctttgttagttagagcatatctttgcaatatgttgacccataatcctagaagtttctgcatatctacgacaatgaaaaatcccactccattgtttaaggccttggttggttggggtggtttgtcccagtccttataaaatttaataccaggaatttgatcggttttcctaagggcctggtattgactcttaagcccacactctcatacagggttccttttctccctgctcaccttagattgtaacaatcttatcttttatatcatgtggttgcttaagttcccatataaatttctcatctggatttccatttagtagttccagtacttataccatttgtccataggatgttcctttcataaagagtcatgcatctccaatttaccttatgacccacttgcaggttgatgctgagagagcttatcatcagaatgctgctgatattctgaacaaacttcacgacgaggtacataactgttgcaaaagaaagaaatggagattcttacacctgttggcttagaggaaattcgaatgccataaacctggaaaaagtgtgtatgtttatgctgaatatcactctgtttttgttctgctaatttgcacagatggtccaagcaaaacaccatgatgagccggaaaaccattatgatgagacatcatcagatcctaaaacagctgcaacacatgagcattcacgtagcacatccgaagatcacatatttactaatactagtgaacctacaaggactgaaaccagtgaacctacaaggactgaaactagtgaacctacaaggaatggtcaggaagtgcattatgttggagaggtatgtgtgccctttgcactgctgctcataatgatcataccagaacttataatgtgtcaccaactcacaacatcactgtctttcatttaattgcagtgcagtataaaatgttagaccttagcttgtattactggcattgtatctgtgctatctgtttatgagatgttttagacatagatacaccctcttacaaatatggtacttcgactgaattttatgtccacatgatatatataaagcggtttgattctgcagccaccttagaagttaaaatttcgatagcatgagcaatacatatgtgattttttagagctactttttttttaactttttaggaatggaatttagagctactgttggtaaagatggtagtctgaaatcatgtgaatttaaattcaaaaggtgcaacttgaacataccggtgtttcttcaacataaccttttaccttaatctttacatttcactttattcctctttacacctggtaaatactatcaccgaatgtcggtatggaagtcacctggtaaaaagaagcaaacatatacaggcaaaggataatcagtatatgccaaaattactagttcaacaattttagcagttacacaatcagtaaaacagatcagcacattattatacaagctgagcagtttgtgaattactcattggtcaggtaatccatccattcgatgctcaggctgatggcgagctcagtatttccgtgggagattatgttgtggtccggcaggtatacatggtttttgcaggttttattcatgccatggggtaactaatgaccaaaattctgaagtaaagaaccatgtactgtataattcactgcggtagcatcctagtgtatacatctgtgaccgctgcaggactatgatcagatgcagtgcaagcatataattgtccccttgttatatttttaattctccaagggtgaccaggggggaccagaatgctaactaagcattccttgtctgtcttcacaggtggctcccaatgggtggtctgaaggggaatgcaaaggaaaagctggctggttcccatctgcctatgtggagcagagggacaaagccccggcaagtaaggtgatagagcctggattgctgactacttaatctctctcatactaatagttgctttcatcgccctgtttcccctgtacatggggtttttcttgagtgaatagcattttgtagaacttctacctttctgtgcatattcatgtgcttctaggcttgctgttacccaataattgtatgtaaaatttattgttttgcctttagcatctcgttttctctttctttcacaatgtatagagctattggtcctgggatgctgtaaccttccctttcttttgtggaaagcgtgcttcctgccaaaattgtgagatggatttcagaacagtctcactggccttgttccttcacttttggacccaaaagctcgtaatctacttccctccaaactctatttactcttcttttttctgttcttatcaaaacagcaaagcaaaggacggattgcagcattcggtatgtctgattgggtagaagaagaaggcatggttgctggattcctggatccaactttatctgaaaccctgaaccttaacgggaacaggagcacttgtttgattgctcccctcctctcatcatttcactgcccacaaagttaatttgccacttttacctacttttggctctgcggatgctgaatttatggggccaagccctgacgcctcttccgttgccggtccgcttcgcggaatcgcggtagcctggccatgagcgcgccaccaccgccgcctcgcttcttgccgcgacacgcacatggagctcggaaagctcgcgtttcccaagccccgcgcgatgagtgcaacgtagcccggattgattcgcgacgttagcccgtagcacgttgcgcgcaccagcggcggcaggactggatttttcacattttggtccttttgaaaaacttatttcgcaaatagacccctgaaaaaacttatcccagaaatggtcctttttgggacgccacagtgcctggcgccgtcatccaagggggcggcgccagcctctctggcgccgtcctcctgccaccgtggcgcacgcgaaccgacgtggcaggaggagggcgccagcatggctggcgccgccgcctctattcctgtttctctgtatggagttgcaacggtgtcatttttattttatttttttgatgttttttcacactcaggatcacgatacaaccaaccacaaaaaaaaattaaactcgaactaccacttagctaagtttgaaaatatttagcataccacttagtctactttgcaccttcactaaaattagaccataactcttttagtaaaactctttgatcagcatgttaaacataatgcactctaccactatatgaaattacttaatctaattcaaaatataaccacatgaaatgagatatataagttaaacagtacatagagatgtaatttttttatttttatttcattttttttgatatttttttcacacttaggagaacatagaaaccaaccgtataaaaaataaactcaaacggacaaaatatgtgacatgtagaattttccaaaactctaccgaaacggacaaaatatgtcatctattaaaataggcgtaactttctcatacggactcggaatcaggcaaataatatatgcacggacatctacagaaaaagttacatccgattctccccagctttgccgggttcggcgatattaaaacctccaaattccgcttgcaagattgtgttttcgaggagagaagtttttcggtggagctttggaaaattccacatgccacatatttcgtccgtttgagtttattttttacatggttggttcctgtgagttcctaagtgtgaagaaaatatcaaaaaaataaaataaaaataaaaaagttgcacatctctctcctctgcactagttcggagagaggagaggagaggaaaaattctacatgtcacatattacgtccatttgagttcaatttttctatgattggttcttgtgtgtccctaagcgtgaaaaaaaatatcaaacaaataaaacaaaaataaaaaatttcggggggggcgccagccactctggcgcactccccctagccacctcagcatcgccccgccacgtcggcagggggacggcgccaaagaggctggcgccgtcctgttgaacgacggcgccagccactctagcgccccaaaaaggaccatttttgggataagtttttctaggggtctaccttgcgaaataagnntttttaaaaggaccaaaatgtgaaaaatccaggcggcaggatgggtcttcggtgcgtcgtgcgcaaggggcggcgtgtatgggtggtggtgtccaccggattgattgcgtgcgcttcgcctcaccggtcttgggctgctgggtcctcgtgcagttatggcgcggctcgcctcatcgcccgtgttccgccgatcgctttggggggcaaggtagcagagatggaagagagagaaaatgatgcgtgccggagacttgccagtgtttaccgttcgtctgtctgcctgcctgcctgcctgggtgggtttaacccctagactagtatcttcttttggctaaattttcaggacatgtactaaactaccacgtgattttaacattagtgaagcagctagggactagggagagaaagcatcaaccaacaatcgacaacgaaagattgaggccatgtcttagttcacatcaaacttctgcctgactctcaacttttcatcacatcacatccaaaactttcctacacatataaattctcaattttttttcaaactatcaactttccttaaacttttttttcaatttcaaaaactaaacacagcgtgagaagcttcaacggtagcaggagtacagtaaaacgggagcagtggtgtggaagggtgaaaaaacaggcggtttggcctggccgatgggaggaagggtcacatcgagagcagaggacaccgggtatgagacagcacagctcagcaacctctgggtcgcctcgttggtcagagctccgggcccgccaccagcgacccgtcgtcctgcttcactaggctttgtataattgtacccgtaggtgctgcacaatcaatactttacctaatacctaaatactctaccaatacgatacgccgcttagctcaactgaacatcttcagtatcatggagaagtcgacaccgcgtgtagtttccagtgacagactgacatgctctatctagtttaaagctgatattctgtagaaattttgtcctaatcgcaggtccaaatagctcaaattgaaacaaaacaattggctcaattatctatcttgaggtctatgccgacctaacaaaatgtactgctcctaaccaacatatattgacaagctgcaataactcggcctaccttcgcctatttggaagttgagagcacagggagggccgataggaaagagagaaaaacactgtagtttatcatctgattgttcagaatttaattcgtcccaaaggctaagcacggtccggcatgggaatctatcgctgtcccgtcccaattggcacgtcattttcactcagcatgccacacaagtaccgctacgacgcaaaggcacgcacacctaataaccaataaatgtgaacgaaaaagagaaggaaaggaaaagaaaaaacgggcgaagaagaagaaaaacgtaaaagcagcttgcggtgcgaggcaaaagctagtagacgaggcgggggtgattagctgttcgtcccgtgtcccgttgctcgcccacgccacgccgcacgcggacaaaaccgcattctctctctctcactacactcctcccccacactctcctctcctctctccctctcgcagccacagcacagcgcagcactggccgcctaatctctccgcactctctcccctcgccgctccctccactgccgcttcgtctcggccgacgacctcgtcgtcgtcgtcgtcgtcgtcctcgtgttcgccggtcgccgcgccgacgcggatcgccgtgccgctgtccagtgcgagagcgcaggcaggcaggcaggcgcaggtaaaaaccttgcccccgctccccgtcctcgcgccggatctgccgccgattcgtgcggccgcggtgagcccgtgcgtcgcgtcagcttgtgtgttgctgagtggtgaactggtgatgccgcggcagcgggcgctcaaaactggtgtgctcggtttcgtgtcggtagcgtcgcgggggcttgtgggttgggttgtggctgtaccctactttttgcttagtggcgtcggcggcggcagttgcgacggctttaactctggatgactggatgcgtgcttgcgttttggcggttgcgagctggaattagtaactgctttgttgtttcttcggctaactaagttggtccttttttttttctttttaagaagtaactgaaagatgttgatttacagtaattggggtgactaaattgttttcgaaattaaccgctgtctaaattgtttttgttagaatttttggggaaatttcaaattgcaggttctaggtaattcaaataccattaaacaattttgtggaagcacataattttttttattaataaattgtcatgttttggttcttatggtcgtccattttgctaaagaggagccatgagtgtgtcacaatgtactgcatttgatctgcatatctgattgttgctctgtttatttgataactttgcatgattgctgatatgttcctgttttcacttacagtgccagcaatttgcctccctcaccaggggcacatctacatgtggagttcattcccataaaagaggatgcacatggtatacctcacccatgacctctgtaataagctgcggtgatctttatatgcttcaccaactggtgaaaaatgggctcttttctgagaaaacagcccagtttcctcttaattttgttaattctgcaccttggtgctcgtgaagcaagagcactaagttcagatggtatgtgacatttcatagttatggttggtatttgtgtgctacatttgacaatctgtgctcatttattatgattcttttgacggtttcctacaggtgaagcacttcttgccttcaagaaggcagttacaacttctgatgggatatttctcaactggcgtgaacaagatgtggatccttgcaattggaagggtgttggatgtgactctcacaccaagagagtagtttgtctgtaagaccaaaataaaccctacataaatattgtgaaatgcttagaatttcaacctggctattattttgcttcagtaatatggttttcgtttttaagatggcattttctaataggaagggaatgataacttcatagcttccattgttataaatatatctgaccaccaatatcttttgtttaggattcttgcatatcacaagttagttgggcccatacctccagaaattggaaggttaaatcagttgcaagctctgtaagtgtgtgttgatagcgttctttgcttaacctctttcttttcagcatctgaaattactattttatgtcattagatcactgcaagggaatagcttgtatggctcactccctccagaattgggaaattgtaccaagttacaacaactgtaagtttctaagtattactgtttttccagcatttgtaacaccatgtcttgcaaaaaactattcataacattcatactgttatgcaattttaattgatgcaactttttacgttttgtgttctgacttgtgagatgaccagcaggtatctacaaggaaattatttaagtgggcatatcccttcagagtttggtgatctggtggaacttggtacactgtaagttttgggtggagtttctggttgctttttttaatcatttattacctcaatcaaccaatgtctttcctggctgtccatttcacatcagactgatctcccctgtctgattagttcaatctatgcatcagaaacgtaccatttcactgaaacaatcaacacaaaagttctgatataaaaattaagtgcactggattgcaaatgaattcgtttgtcaatttagaggattactcatatttctggaatatgtttttccccttcagggacttatccagcaatacgttgagcggatcgattccaccctctcttgataagctggccaagcttacatcattgtgagtgttttttatcttgataaatccattgaatttttatgctaactttgtgcggcaaattaaataagaaatttcacctgtgcagcaatgtttccatgaatttcctgacaggagcaataccatctgatggttcacttgtgaattttaatgaaacttcgtgagttatcttctctatgttgtttattcttgtctaattcaatatgtatatttgagcaagtagagtgggggatgtcatgtgatagagtgcttttgtttacctcttcatgatgcgctacactacatcacacttgtaatatatcatatgattttgcatgttgcaatgcagcttcatcgggaaccgtggtttatgtgggaagcagattaactcggtgtgcaaagatgcacttcagtcaccatcaaatggccctctgccaccttccgcaggtaccagatgtttctaaaactgtctacatacctttttttcatgcttcaaacattttttgtaaatagttaaatggttagcaagatttcaatgtttgtatttaatatttatccatcaatatcaatcatcagtatcagttgcttttatatttgactaggaaatatacttctggcagtttggggttctgtaaagtgtaaattgatccctttcttttcagttcctttcatgaacctatgacttatgttcttctgattatcatatggcagacgacttcatcaatagaagaaacgggaagaattctaccagacttgttataagtgcagtagcaacagtaggagctcttctgttggtcgctttgatgtgtttctggggttgctttctgtacaaaaattttggaaagaaagatattcatggtttcagggtggagctatgtggaggtaaccatgtcattgaatatgctatgtgaatcatcttcaatttatgcggtccttataatcttgcttgttttcttttaggctcttccattgtgatgttccacggggacctcccttactccactaaagaaatcctcaagaaactagagaccatggatgatgagaatatcattggagtagggggcttcgggacggtttataaacttgcaatggatgacggtaatgtttttgcattgaaaaggataatgaaaacaaatgaagggcttggtcagttctttgatagagaacttgagatactgggaagtgttaagcatcgttatttggtcaatctccgtggctattgcaattctccctcatcaaagctattgatatatgactatcttccaggtggaaacctagatgaggtgctacatggtgagcatgttcagttttctacttcctatttattttatttgtattgcattcttccaattgttaacagttttagtttgtcttcctcagtaaggagttaagtatgtgttcaaagcccaacattaaattaaggtttgaggtgattcagttaatggatatgaaagaacctagtggtgatggtggagtctgccattccaccaccacctctagggttggtgttatcttctaagggtgcatagatacttttatatgtgtggcttggctatcagtgtggattgatgctctcttgcaaattacatattcttccatgaggagtatacatataatttgaattttagaacataggatagtatagtactatagttacattcaatctacctattggaaagaggtacaagtacaacaatatcttaaggggcatactagctaatgtcagctagacacagaatgcaatagccaagtgggagatgaagactttagtatgtgaaaattgtgccactgtgggggcaacaaagttgttcatttttaagttcttgatcgtcccatttggctattttgtggcatgttcagacctccatgtgaattagcagctacagattccacgatggatattatttctgcctcttgtaacaaaaatggaatgctacttagtagtcgatgggcatgggacttcagctattatgtagtacgagtagagggttgtatataacatactaggacacaaggacagaagatgctgtctactcatggtgattccaattttacattggcagcgagtctgagaattatactttattactttaaatacagacctctgttcattcttcaattacatctggatctaaacaatcgagataagagtgaaaaccttaaccatgatattaccatttatattccatatgcttgtggaatatatgcattgaattttataacaacgtataattaggtcttacattagcagacttcactattttattttttaacatcaagtcctaatatctcatctatcttcaatcttgacagaaaaatctgaacagttggactgggatgcacgtattaacataatacttggagctgcaaaaggcctggcttatttgcatcatgattgttcacctcgaataatacatcgtgatattaaatcgagcaacatcttactagacggcaattttgaggctcgtgtatcagactttggactcgcaaagctattagaggacgacaaatcccatattactacaatagttgcaggaacatttggctatcttgcaccaggtatgttaaaactgttctgtttcattcattgtgggaaaataacagcatataacaaatgcttaccaccttattgcatctctggattttatttatcaatatataatttcatatgctctgagctaatttgcaaaattcaaaatccagagtatatgcaaagtggcagagccaccgaaaagactgacgtctacagttttggagttttgctacttgaaatactaagcggaaaacgacctactgatgcatcatttattgaaaagggattgaacattgttggatgggtatgtatgacctttatgtccttccatttcatatccacagttttctgatatgaattacgtatgccttcaattgatttaatgtattcttgaaataatctacttgctctgtggcagttgaatttcctggtcggtgagaatcgggagagggaaattgtcgatccatattgtgagggagtgcagattgagaccttggatgctctactttctcttgctaaacaatgtgtaagttctttgccagaggagcggcctacaatgcacagggtggtacagatgttggagtcggatgtaattacaccatgccccagtgatttctacgattcagaataggcttcgacttacggctgctcttgaaaacgccacactgccgctggttttcctgtggaggcacattccatttattctttgcagattatgtaaattcattcctgcggtgttcggctccaatcggctagctcaatggggaggacatttttgtgtctatgtatctatgctacgtacaaattattactactacatgtcaagttaataagaaacttaccaggagattactgtacttgtattgaactgtcaatctcggaagaatggaaatggtagggattagggatgccaagtttcctgaatctccatgagctgctgctagatatattaatatatttgagtataaccagctgaatttctcacgcattgtgcgtctcgcgatcgagaaaatatgcacttggaggcttcacatgtgctaatttcttaagacataagaatataagattcatatttacactaatcaaggtgaagaaaattgactaagtagagtagtagtagaacataatatagttcactttcataatgagacaacaggttttaccgttttacatagcggagtagttcgagcggcaacaacacacttgaaaggaaccagagcacaccaaaaacaccagtaattacacctcacataagtgatcgatacacttgaagccacagataaatcgttttagattagcccaatgctctagccggtgatctggatggacttgacgtcgggcttcttgggctcctccttgggcacggtgacggtgagcacgccgttctccatggacgccttgatctgctccggcttggtgttctccggcagccggaacctgcggaggaacttgccgctgctgcgctccacgcggtgccacttgtccgtcttctcctcctgctccttgatgcgctcgccgctgatctggaggacgttgccgtcctcaacctccaccttgacctcctccttcttcagccccggcacgtccgccttgaacacgtgcgcctcgggcgtctccttccagtcgatccgcgcgccggcgaaggccgccgcgtcggagttggcgcgagggaagaggctgccgctgccggagccgaaggggaagccgtcgaaggggtcccagaggtcgagggagaaggggtcgaacacgttgctgcggcggatcatcgacatcgtcggaatagctgcgaatttggaggtggaacgatcggacttctctgagttcttactctgatgtttgcttggtttgctttgcgttttcttcgtggttctgccggtgaaggggagcgcggttttatagagggcagcgagagggcatcgtggagcttggaataagcttctagaaacttccagtttgcccccgcatgggctagaacctagtacgagatagcttgggctagaagtttacaccaccggtagcggggtgggctgtagcccatagcgtccaggactctccagaataatctaggccataagcaggcctagaacaatccagaagaccacttccaatttcggcccaaattaacgaacaaacgagaactatccggaagcaaaacttccagtagaacccatggaccatcacgaactgctatataaattgttgccaccacgcagcgacaggtgccaaggaaatcagctcatcgatcgaaagatcaacaagctctcttgagaattgagatcaccctctttccatctagaacacaaaccagacaaccaaaaaacagcaagacacaatacacaatgtcgctgatccgccgcagcaacgtgttcgaccccttctccctcgacctctgggaccccttcgacggcttccccttcggctccggcagcagaagcagcggcagcatcttcccgtccttcccccgcggcacctcctccgagaccgcggccttcgccggcgcgcgcatcgactggaaggagacgccggaggcgcacgtgttcaaggcggacgtgccggggctgaagaaggaggaggtcaaggtggaggtggaggacggcaacgtcctccagatcagcggcgagcgcagcaaggagcaggaggagaagacggacaagtggcaccgcgtggagcgcagcagcggcaagttcctccgcaggttccggctgccggagaacaccaagccggagcagatcaaggcgtccatggagaacggcgtgctcaccgtcaccgtgcccaaggaggagcccaagaagcccgacgtcaagtccatccaggttaccggctagtaagaaacttcgggtgtgacatgcacggtggagagcttcgattcgagccttcggtttgtgatcaattgcagtaaataaaagcgtcaaatctggtcctcagtgtttatgctgtgaaaaagttcaaagctatgttggaagtgagcaataaagacttttcttgttttgtgaacgaacctgagattatactagtcctacacttgtttgtttaatctaatctccggtatattctgccatttttatctcgatgtttcagtacttttagcctttggttcttgaatccttctgtcgagactggagagttcatttcggaaattgagagctcaatttccacataagtcccacaaatttcacttgtttcagcattttcacagcaatcgattcgattccaacagaagtcccaaaaatttcacttgtttcgaaagatgcctataggttttacgttttcagatcggactgagaaaaggcctataggatttccgttttcagatcagactaaaaaattattccaatgctaggccatgactgaactaaccaaatataacgaaattgctaatattgtgatttgcgattcgtacttcatgtgttttttcttcaactccaataacctcatttatttctacaacactgataacaacctaaactccggcaaataggtttgggtttaggttggggctgagagagaaggggaaggtggcttagagggatgattgtggaaggtgatggcccgacgatgtacagcgggatgagtgggtggcgaggcaacgacggcaccgccaaagccgtagggtcgataacatacggtgggtcagtgttaggggcaaagtagagcgacgggttaggagatggcgtggcaggggcacctcaccaccattggattgaggtgacaacagaggcagcgatgacgagagccattgagcgttgttcaaggacaaaggaacaaaagataaaagataaaaggattagggtttggatatctgcaccaatccgaaagcgatctaatggctcaaaaattataagaatttttaagtggtgttttctgtcaaatgtgtaatagaaagtctcaaatataaatatgaagctctgttatgattaaggagtttctacttctaataaatccataaaatagaacttttatttatgcgacggtggtagctcatgcagaacatgccatgatattcacaactattaaatctctgacgtataaaaagtggatactttgctatggacacaaacatcttagattttcagccaaaaaaacgcatggccgcatgtctaagggcaatcccactccgaaccttcaatcgaacaaataagggcatcatgtcacaacctgttatagatcaactaatatgagggtattgttctttagcacgagattgtttctagcgcactttctttttctcaaaactttgtttaaacttttttcatatgaaatgattttattgaaaaattcatctgaaaagttttacatgaaaactttcatgttacgaaagcacgtaggctaaatagcaaatccgactagggtaaatagatctaattgtcctaatcctgttccgggaccatgtgcagatggttcactctttgcccaagagaaggtggagcccaccatttggtccataaacggagattgagatcctctaccttcaaaggcaacatgccttatgtcactgacaaagacttcatccatcaccgccaccatccctcgcggcctcgccggcgatcaaatcgcctgcacggctggttccggtagccgttctccatcttggatgctcaagcgggcttggggtcctgaagaggcggcgccaattattttcttctcctccccttccgttctctctcgtggtcccacggcgttggcagaggccagggtgcctcaaccctcaagagtcaagaccctatgcgcctcgcgcagattgttggtgaaggggctcgtgtgcccctcttcctaatcccctgttgtattacttcttggtatttctgtgcagagattaatgatcattgcgctttcgttgggttgtggcaatggcattagtcttaacgctggataagtccatggtgatgcaggagaatgaatccgggaagtgtgccatgccatcagccaggtgcgtacattgttcttgccgcttcttcgtttgtccatacctttgtgattgcgttggtttatgttttgctaattcaccggcatagtattgtgacggtcgattcggattctgctattacgtctcttataagaagaaaatgggagagattcagcgtatattagttatgctggataataatcagaactgatccttctaaatcaaccgagctaccagaacaaccaatgttgtagaaccgaactggccactcccagtttccattccaaaaggctcaagaaaaactcaaacattggtacattaatcaagcttaaagtttatttcccgtacataaacgcataggagacaaacacatttgggacccttggaggagaccacacattcataaacacatgatcatatcacacacattttggactgtgtccctcacgacacaagcaaagtaccaaaggaggagatcaattgcagcattgaggagaagcagcagaataaacaaacggggctctagccggagatctggatggacttgacgtcgggcttcttgggctcttccttgggcacggtgacggtgagcacgccattctccatggacgccttgatctgctccggcttggtgttctcggggaggcggaacctgcggaggaacttgccgctgctgcgctccacgcggtgccacttgtccgacttctcctcctgctccctgctgcgctcgccgctgatctgcaggatgttgccgtcgtccacctccaccttgacctcctccttcttcagccccggcacgtccgccttgaacacgtgcacctcgggcgtctccttccagtcgatgcgcgcgccggcgaaggccgccgcgtcggagttggcccgagggaagaggctgccgctgctgctgctgctgccgccggagccgaaggggaagccgtcgacgggatcccagaggtcgagggagaaggggtcgaacgcgttgccgcggcggatcagcgacatggttgacggatttgggcgagaaggaaggctgtgtttgtgaacactaaaacagtgtgtgcttgggaagcttgggatgtgagcacaagggatcgcgatttgcgagttgctttcgatctttgtctgggccgcagagcgggaggggaggccggatttatacgggctgtgggcggcgttgagaggtgggatcctgataattctcgtcagttcaagaatgcactggaaaacacctgatttggagcctggccgcctgggccgaatcatcgagtgccttccagaacttttggccctgtggatccaaacggcatgggactctggttacagatttacaattgccgatttccttctgccatgttaatatagaaattgccatgtatctattgtgaactatagttagatttgttcctatttctatttttaaaaaaatatttaaaacgaagaccttttaaattttggtaatatcaaaatttaacaaggcagcatactaaacatactattaccaatgcaaccatattttagtaattcgggaactttctactctagctactacacaatttagtaatgtgttaaaccaaacatcgtccacatccttaccttattatcttactactaaacttcgattctggtaaaattactaaaatttgataagttttttccaagtgaaaaatgaacaagtcctacatctcctctggcctatagcatagaaacccatcactcccaatttctactttgagtacgcctaagcggtcaaaaaaggagaccgttcacacgttttacaatgtaagcataaacttatatggtcatttcataataatcactaaccttttgtcgataaaaaaacatccccaaatcttagggcctgtttactttaatgccattttcaactataccattttttaataaagttgtcaaaaaaaagtatctacgtttagtttgttgccaaatttagtcaatacataagaaatcatgccaaaattttagcaatattgccatcttgccaaaattttggcattgctaaaatttggtaaggtttattttagctacaatctaaataggcccttatagttttgggtcactagatgtgctttgcgattcgtgctgtagacccttatcttgtagctctggtgatctccctttcttctctggcaccggtgacactgcaaactctagtggagtagcaacggattagggccccgggggttgggtggcagtggaaggaggagggggaaaaggggatatccatgcgtttagatggatggaagtaggaggcggtggacacgagcaggcgacgaggcaacaatgacgacgctggagctgtggggatgaaagagagtggtatactggagcaaatttatggttaggaggcagtgaggagccactaaagacgaggaaaagggcagagcggggcacctcacggccggcagccaacgacttgagtaggagaagaggttggtaacggggaggctggctagggagggaggggggattgggctcgccagtgttattaacgccttccggccagccggcgaggccgggctgcagggcggtggcgacggaaagcatcgagcgagcgggtgattcaatcatgtctggtgacactagagtgagaagggaggagaggaggggcggggtaaggtttagggatgtatgcaccaatctatacctatacttattataaaaattgaagatgtttccgcggttcgtcatctgtgtttgtgtcggttataaaaattgaagatggcatcatccgtgtttgagtcggttttaattttatgttttggtttatactattataaaaattgaagatgtttccacggtccgtcatccgtgtttgagtcggttataaaaattgaagatgtttccgcggtccgtcatccgtgtttgagtcggttttaattttatgttttggttttaatctgtatatcttctctactattataaaaattgaagatgttttcgccggtatttttgtacgtcatccgtgtatgagtcagtttttaagttcgtttgctttcagtaatacagaaggaatcatataagaaatctgtttaaaaaaactcgcatgctaacttgagacgattagactgctaactgcagctcatgattttctaaaaatatatatatccaagggaattcccacagtaaatttcatcttaactaaaccatataacaataataagattaaaatagacttcacccgttgcaacgcacgagcatttttttttctagtcttaaagaaattcaactgttcaaaattcgacagttccctttatatattgtaacgtcttacatatgcgatttttatggttcagagtttctgacatgagtttcttatgtatgtctcacatgaattgtctgttctgatcgatacatgtaagttttcatcctaagggcacccgtaatggttatctataggctctctacaagatatctatgtcagcatattttcctacttgaaagagattaaatgaagagatagagcaaagctatctactaacctggagatagtctatagagaaaaacgaggcaatgaattagagagctatagatacccatgtagacatactattggggtagtttactattaatctagtctattgctgagatgtacatgttttatagagagcaccttactttactattgcgggtgctctaacagttccattttcaatttccaatattatctttgttttggcctctaccgtttccgtgaaaaataaatggctacagaaatgctttaggctgtttgtcgactgttttcaggactagtgagaaggagcctcgacctatcaacagtagggatgaaatccttcacaatgggtttaattaattcgccatcagaaaagaaaatttctacaaatatattataatttagttacaatacttttttttttagaaacacccccgtatatgaaacttgcagtcaagccaagaacttctcgaccttctccacttcctccacgctcccgatgtacagcggcactctctgatggatctgcacggcacattcacaaacgaatcaattatatagacacatttcgatttctaagtctactcgtagattaatccattaataacactgcgcatataatgtgtgcgcatattttacctccgtaggcatgatgtcaagtatcctctggtggccatcggagcccttgccgccggcctgctcgacgatgaagctcatcggcgcgcactcgtacagcagccgcagcttgccgttcttgctcttctggtccctggggtagccgtagatgccgccgtagagcagcgtgcggtggaagtcgccgacgaggctgccgatgtagcgcgcggagtatggcttcccggacggcccgggctccttgaggctgtccatgtagctcttgagcttgtcgtcccagagcgcgtagttgccctcgttgaaggcatagatcttgcctgccttggggatctgcaccttctcctgcgtcagcacgaactcgccgtacatcgggtccagcgtgaacacgtacacccctgtcccgatggtgagcacgaagatgaccgagctcgagtacatgcagtagccggcggcgagcaggttgctccccggctggcacacgctcacgatgcacctctgctccacctggtcaagctgcaggcacacgcgcgcggacagaggcgtttcgttctgttagcaccgtgtcagtgtgtgcatgagcgattgctaggcgatcgataacgcgttacattttggtcgtcggcgatgtcggctaggcactcgtcgttggggctgtagatgccgaagatggagccggtggagacggcggcgtcgatgttggaggagccgtcgagcgggtcgaacaccacgatgtagttgcccgagtagctctcctccacggccaccggcacgtcctcctcctccgacgcgatcacgccggtgcgcccgctcgatttgaggcagttggagaacacctgcggtgcgcatagcgctcagcttatggtcggtcgcgcttgttgcggtggttcgcgcactaaccacgacgagctactgataatttagtcgtttacctcgttggagacgcgtcgagttttttatggtcctcgccctgcacgttgnnnnnnnnnnnnnnnnnnnnnnnnnnnnnnngacggcgccctggacgccggtgaggttggagatgggcgcgcgctgcaccagcgaggcgatctgcttgcacgccgtggagatgctggccagcacgatggtcatctcgccgtcgatggtcccggcctgctcctgcttcagcagccacgtcgtcagcgtggtgatctcgtagctgctcttcttgctagcctccgtcgcggcgggcgccgaggccgtgtcgacggccgccatgcaccgcacgctcggggccgacgacccaccggcgagcctgccgggctgcctccggaaggagaggccgcattggagcgaggccgccgcctgctggcgggagagcaggagcaggtgggaggatgtcgtggctgcggcggccatcgctgctgctgcttggttgcttgctctgctcgcgctctcctctcgctgcggctacctggtcttggtgccgatggcttcttgttttgttccattggttttagccgcggtttgtgtggccggagagagggcgggaggtgagtgtgtggattgggggagaattgtgaggatggcgttgcctcagatactagcctaattgcaactccttgtccttcagccagcgtcacgtacagtcacatacaagtagcatcgccttgctcaggggcagtatatacttgtgcttttgattaggcagatctattattcgtacctatgaatatagatggtcatatgacccagcccaaggccaggtgatttgacccggcccaggcatggcaggtcgggccatgccggcccagcctaacagccatgtcgtgcttgggctgccacctcggcacgttgggtcggcatggcccggcacaaagttcagtgtcgattggaacgatgagcccagatccacatagttccggaggacaaaggagcaaaacggtggtcagctgtcgatgatgaggctgctggctcatatgggtttgccagtagaggctcaagcatcagtgacgtgcgtggcccaatgagagagatggtgtcagaccactcccctaccgggatcacggacggcaaggtaggcagcgactgtgaaggactgaagcaggcgaggatggggaagatgtctgaaggggaagatgaggaggggcggctttctctgccgtcatcatcgcgccattgcctactattgtccccactcgagctcgtgtggcggtgtggaaaaggagaggggggtgagaaagagaggggttgctcgcaacattggtagcgatggcgatgggaggggaggctcatgtcgtagtgttagagggtcctgccaacaggatgaggccacagagtcgtcacctccatccctagtgagttccacaacctcctcgagctgttgttacctatcggcctactgatacatactcactgacatgtgacccccacatccggttggaccaacttgccacgttggtgaaaaccatttttaaaatgggacaattgcatatatgcccccaatttcaaacccaattgttgttttaccctcactttttagggtttgcggttttagccccactttttgaatctgaaccggccgtctacccctacttgtaacaatcgtttggtgggtcccacgttttgtgttaaaggaatacaaaaggaaataaaaaaaggttttaggaaatatgaatttacgtttgtacccctgagagaatgggtagggactaaatcctctcaacctgtgcgtgcgtgaatcagggactcgagggcgggcggctgcgagggcgtacgcgcggcggcggcaaccgtggagagggcgggcgtgcggtagccaggcggccgtggggctttgacacggggattcgcagttctagttgccacacgagttcatgctctccccgatcgccgccctctcccttgccgcgaggtatgccgccatcgagaggtctgtacgaccgcttccccctaccgcaccctcctcgcactactacgcagccggcgacgaccccatcctgctcgacgtcgatggcaatggcaacgccgccttcatggcggtcctcggccccacccacccaagcatactctccccggtgccctccgcgctgccccccatggcatcgtcaccgtcgaggctcttctccccgctcgaccaggcctccgtctcctagctcagcgacctcagcccttcgtccactccgccggcgcaacccctcccccccaacccatgccgccgttcgcgccgagcacgcatagcctgctgctgtccacgcccaccgtcgccgatgaccttctccatcaaggaattcttcagtagcaacttcccggacctgtcgaaatgctgtctaaattttgttcaaagtttggtcagattatgtacttggctagtatttgtgatttttttattaaagtacaaaaacatcacaagagatgctcatatttgaattatttataacaatcacacaataggggcaaaatcacacaagctgaaaaaaataggagcaaaaatgcaataatcactaagggtataaatgtccttttgctgtacaactaacaccgttaaaccggatgttagaagtggaggtagtcggatggttcaaattcaaaaagtgggggtaaaactacaaaccctaaaaagtgaggataaaacaacaattaggtttgatagtgggggcatagatgcaattgtctcatttaaaatagtcaagataattaagttacatcaattttaatagttggggggttagaacatcctctttcacgaatgaggaatagaatcagaaggactttaaaggaaaggagtgccatccaacagaaggccctataactacttacgttcagcaaatcctgatatgtagcctgagccgagctgctctttcttgggcttcttacttgttatactctgtgggccgtggcccaatttgacaactccttaccgttttacttttgcttttctatttctctaggggtataaaacagctgtaccaaatcaatagaaaaccaatgctgcatttcttgtgtactagaaacaaaatgtccatgcgttgcaacatttttttctttctgtggtacgacggctaataggagctaagcaatatattgaaacattggaatcactatacattgccccattcctttattttcagccccagcccaatccacgcctcatatctccctccgctcggcctgcctctctccagcgcaccctacaaatggagttgcaagagcccagctagcacaatcggttgcctcctccaaacactacagtagcgtcttcaaacctctagatgacagtcatgtgcccgtatcatgccggagctaatcatccccatcaagtccggtggaatctttctcgatctctcaaaattggttgagggttttaatccactcgatctcgatcctctttccatttctcccaaaatcagagcgtcgcatccaaatcgtcgtagcccaattttgtaaaacttgggataaaaacacgcgcacggtagcgctacggacattgacgagcccaaaaaactacaaaagccttacgtatttttaattaagatatataaaaaaaggaatcttggtctcgattagactcttgatcgtgtcgcaggtgcagcgatgatgaaacgaagcggagggacgaacggaagccgaatctcaaagggatttaagggaatcattgatggatgaaaatttcaacagaagctttacgcattttttaaataggtatatatagatatatgaactacttgtacaatacttttgtatcatctaacattttatgcaagatggacatgacgcagacatcagaacatattcttaaaagaacatatcagaatactaacaaattaagcaataatcacctcctccagcttaatccttttttttgctctttccacgacaccaaccttttgaacaagaaatacaatatttttgtagaccaaataatataattctcttgcagagtccaatcctcgtattgtttaagctttgagtttagcaaactctactcttaatttgtaccattgcgtggcaggattccaatcaaatactagtagaaaacaactcctatgcttacaaaaaacaggacattccaaggcaacctacctattcaggcgcgcacgtcgatgtgctatgctttacattgacatgtccagcaatcttgtcctatcctgttccaagacggtggcaatttttgtcagctaccgattgggcaggggagcacagctacctcctgcctcatcggagacagaaacagagtcgtaacccatcaaaagcaaagacaaaatacacttgtcgagaactcttggtttgtttggtttctcttcacgggcaacggaatcttcaaggtgtcattggcagaatggcaggcatgctaatttgttcagaaggtctctaattcatttgacgagttagcgtgtatactagcaatcaccctcttgattatctcatgctgtgctcgtcgtcttaggaaatgccatgtctggtagggtcaaagccaaaccgagtcaggtcagtatgaaaccaaatgcatttcggttagtggcgggagaaaaatatcgatgtcacaattagtcaacgagcaagcctactctgttctatctagcacatggaagaaatgggacctaacagtagacttctgattgttcttctagctctttgtgttttataatacatatctgaacgctcaaactaacctgtagctatagtcgtcggttcaaaccagtgtttgattcgaccacactctatgaacccaactacttccaccactccatctcttgatcctgaaagtgttaacatttcataattaggagatcatgctgggagattctgccaaaccacatttgcataccaacggcctagattttctatagcttaccagctgccactccaagcttgacttctgaacccgaataggttcacaacaaaggctgtatttagatctaaagtttggatccaaacttcagtctttttccatcacatcaacctgtcatatacacacaacttttcagttacatcatctttaattttaactaaaatctaaactttacgctgaactaaacacagccaaagccagattcgccgcgcttgccctctccggcaggcggcagcttgaccctacgcaccaaattaaactgaacagataggataggataggatgacctcattggagcgccagcatgaataacacagtaacctttttttctcgacacgaaaggagccaatgacctatatgagcgcttgcttttgctgaaactgtactttcacacggcagattaacctaacgtagatatatcctactgaaaagcatctcacgaccgacctgtactgctgctgtcctttctctatagacgatcactccgcagcaataattctggtccagtcggagacatcgaccccccacacacaatagctagatcgctagctagcccaaggacacccaagaacagcgagatggggcagatggcgatatcgccacgttctcgtttcattcgtttcagcggccgtcactttcactgcaaatttttcgccgcagatcgtgcagctaattataaaagctgataacaatcgatctgaagccgcctctcttcgtcccgttcacagaaattcatcttacctaattaccagaggagacactagctccttttgactttgcgtgtcgctgcacctgatcactctctctcacacacgcacatccattagctgggcatggctgctacttgcagctgagtgcccagctcacgtagcacgtcgcatacagtaatacacttacaggtcatgggctcatggcagtgacaaaaacaaggccgtcttcccaggctcgcacactggcaccggcagcctcgcacactggctagctaggtgacggagacggcatcgctttacaactcaaaagggcctccgcacctcggcacgcctcgttttctattgctcggccgcctttgcgcaccaaccggccgggtcggacaaaacacgagggcgtctcgcggatgattgggaggcggtctcgcagatgattgggagggacggggttggttgcgcgcactcgcgcgcggggcagtggccggttgtggaggaaacggtgctcctctcctatcccgacgtccccgcggcagctgatgttgaacgggctccaatccgatcgatgcgatgcatgcatggcttgactgcatgcgacgttaggtaccaaggctggctcagatcaggaccgggacgtactgtctcctcgcagctgtaatgaaaacttgcaaagcaacctggtactactaaatttgtcccaagatacaaaaatttttagagataatacagttattaagaaaataagtaaaattaaacggaagaggttatgattggatgagaagtgacggtagattaagaaattaaatggtgaacagttataattggttggaaagagaacgttgatagataagctattatattttgagacaaattctgaatactaaaaattattatattttggtacggataaagtaatagtagtacagtaggttattaagctgctagtaacatgatggattggaatcgccgtcgccgaccgtgcatgatctaacatcgatgccttctttgttttcaaaaagagaaaaaaagggtagaagaggattcggtggttctgttaatttgcagcccctgtcgttttcaggttctgtggaagcatagaagttatttcctagatattgactttgttattcttttttctttgacctcttacagctttcaatactttggatccattccaccacagctagcctaactccaattccttcgttgtataaacctattgcgctcttgacttttttagcatgagaattaaacaaactggaagtcttagcttagctgctgaacagcagtgcatcaccacaatttttttccgttattgtggtcattgatagtagcatctttgatctaagggatgaattgtcggtaacgtacaaaggaggcccattttccatgcagatgtgaccaccggaaccaccatcgtcagtgggcacggcaagccaagcggtaataagattcgcaagaacgtggggggtttgcctcccgtacgtgaagacggtgcgagcgtcagcatctgacaagtccagtggtgtcgggccttggcgcgaaattagcaagcaatgcttcgatcagaaattcagttatactataaacatgaaagaatcaccctgctcaccgggttttattttgttttgaaagggaaatctgctcaccggatttcgatcgcagtgtcaggttgttggggataccacgtcgagcaaacaataatattcccgtctctgtggcaactgcttccaccagcaagcccaggctcaccaatcgtgaaagcggccggccggcggcgatcagtctcctgtaaaacaccggaggagcaacatatatggctcggcactcacccactcacccagctcagctgtgtaacctctaaaaatactagcaatacttttaatttggaccatatcttatctgccttcactgacacctcttatccagtacttatgcgtatctagatcgtgctaatcattgacgctccgtaataatgtctgtgatccggccatttgattggagagtatgcaaaatatgcatagtattacagacggatggatcggatcgaatcagtgtactgtaaatgatgagtaaccctggcctgattgatccgtggatctcccatgtcgagcggcagccgggcaatcacaatgatgagacccgatctcacagagtggtacgtggtgtccatggcctttcgatctccagcagcagcggcagcggcagaaacctggttggcacgtcggaggaaacggacaggatctccacccccacgaacgcgaatacaataatcccgcgcgacgcgacgcccgcacgcacggggcgggggcggagcggacgacgctagcgtccagccacagcgcagcgcagcgtggacggaaccccgacccgccgatcaagccgtccacccgcgccggcgccgcgaatggcgcggcccaaccaccgggagcgtgaggataaaccaagccgagacaccgggaatctggcgcgcggcgtgcacagcgaagcggcccgatatcaagcgacgatcatggcggcaacctaacacgggggcccgggtgcacggtgcgtgcgcgcgaacgtcaacagcctacgactacaactagtactgttcgcgatcccctcctcctaatcgtttgaagccagtgccgcgcacgtaggcgccctaccggttatggaaagggactcgcgggccgttcggaacggattagctagtcgtaactcgtacgtactcaggcgtcatgcctatggttcgtgacttgtacgtactgtgttacatctcactccacggatgcgcgatcaggatcgagagagaaaaaaaaaaggcaatcgatcaattgcttcccaacaactccaggttcccattatcaatctgaacgtgtcgatgcttccatcgaattgactactcgtgcagcaacactccgtacgtagtatcatcttcaacagcgaagaatcggttaaatgcaagtttaactgataaagtgagtgtgtgggaacactgcagaacggcacaaaggctgaaagttgaaaccaggaaagggcaacgcatgatcgtgcgtatatgtgtatattactgtttggacgatgagcacaaggatatctcttgagaaaagaaatgttaaacaagatcgcagagtgcgtgcggccacgaccaaattttgggggggcaaaaataatgtaagagcaaatcttggaccccacctgccagctgcccgcacgactcatcaaaaccggtacaaacccaccgagacagggtaggcgtcataacgcaacacaaaaggaaccgcgcggcggcaccaaagcgagcagaagcagcagccgaaggcgatcggagctcgcgcaacaggagagctgtctccatgaggaagctgtgcccgaacctggagcgcgatgacgcgctggacacggtgctcgaggtgcccatcccggaggagatgttctcacgcggcagcggcggtggcggctcccgcggctccaggttcggctgcaccaacgtcaagtcgtgggtgcggccgaacgcgtccgaccgctccggcggcgccggagagccgtgctccatgagccgcggcgagctgcagctcatgctcggcgtcatcggcgcgccgctgataccgctccccgtcgaccacgccaagcagtcgccctgctccgtcctctgcgaacagctcaaggccgatcccattgtacgatcgccatcatcggattcttctccgtttcgtttgtccatcgccgcgcgctgattggctcatccatttatggcgtgtcccctttcaggagtcgtccacggccaagtacataatacagcagtacatcgcggcgtcgggcggggagtgggcgctgaacaaggtcacgaacatgtacgcgatggggaaggtgaggatgaccgccgcggagctcaacagcagcgacgccgacggcggcggcggcggcggcggagggcaccgcggcgggaagaagagcagcaagaacggcggcgaggttggcgggttcgtgctgtggcagaagaagccggagctgtggtccctggagctcgtggtgtccggctgcaagatcagcgccggcagcgacggcaaggtcgcctggcgccagacgccgtggcatcagtcgcacgcctcccgcggtccgccgcgccctctccgccgatcgctccaggtataatataaaccgcgagttcttcgttagttccatataaacgcttaccgtattcgcacgacttgactgcaatactgcatggtcgcgtagcatcatagaaaacacgctcaactctcagttaaagtttccaacgactaggagaactgcgtactgaattggatcctgtttatgagacggacgactacgagaaccaaatttggtggcacatattttcttttctggttcgacgtcaaacgagtagtcctttgtgtttgggtcgatccaacgttgctgttggccgaacttacgtagcgagtccattgttgtcatcgttcctagtggtaggtactaataggcatcggtatcatgacatggaacgcatacgtccaaagtcgcaaagttctcatcttaatgggaacttactttctgtagttctttgtcccaagaagctctgtttttccccttcgtcctgctcaaaccggcctgatttgggtactaggtggccatcagtacgcgccgtaccgagcgtgcgtagtacgagtagagagtagagcatgcatggcaacttggccagtgtcacgtacctggatcttccctgcatactgtcggtaggacaggacagatcggtcgagtacccgcacggccgagcgacatgattacgcctttgccgcactcattgggccgttggcattagctgtggtcaaggtcagtccagggcggtgtcgggatagggctggccgatcgctcgctcgtctcatcatgaggcttgtacacttgtgccgttgcgcgagagatctggtccagggcacccggtacacacagatatgggggacgtactcatcatccatcgtcagtagcggtggctgcacgctgtcgctgtggagtgggggcgaatcatggcaaggggagggcgattagcgggaacaaagcgcggagcagcgggattaggggggacgggttttcaacaccgtcaccgcaacgtgccgccatgtgctgcagcaacgcggcgggacacatcacgtggacatgggcctaaaccgggacgcgacccacgccatcaatcggttggtggctcgcggtttgtcacccggccggttccacccgactcttgaactctccccgctaatcgcgctgcaccaaccagcccgatttaatttgaccgcggtgtcaactatcataccatgttcttttttcataacagctataaatagtactagtatatagtgtccacgtggattaaattaagtgactggagaaattaactaacttgtgcatgcatggtgtgtttggtacgcagggacttgacccgatgctgacggcgagcctgttcgcggacgcggtgtgcatcggcgagaggagcgtggacggcgaggactgcttcgtgctcaaggtggaggcggaggcgtcgagcctgcgggcgcgcaacagcagcagcgtggagatcatccggcacacggtgtgggggtacttcagccagcggacgggcctgctggtgcagctggaggactcgcacctgctgcagatcaagtcgagcggacacggcagcgtcttctgggagaccaccatggagtcgcacctccacgactaccgcgccgtcgacggcgtcaacatcgcgcacgccggccgcaccgccgtctcgctcgtccgcttcggggacagcagcgacggcaacacgcggacgcgaatggaggaggtgtggaacatcgaggaggtcgacttcaacatctggggactctccatggactgcttcctgccgcccagcgacctcaaggatagcaaggaggacaaggacgtctccgccgccgtcaagcccgcgcggccgccgccgataaggataccggcggtggccgtccgcgtcgggccatcgcaggtcgccgccgtcaacatggacgattccgactcgctcattgcgaggtcatgacatacatagcgggcagtgttacaccgtatgagtcgtgtgtgtttacgtgccttatcgccataagttacttatggtaagatctgtaaatatattgcaggttgagatatttttgttttcggggagtggattttacctcagatagatgctcaggggtgagtagtaaagcgagtaatccgggatagatgttctaattagcggtattgtaatttgcttatgacgccccttcactgtaaagttgaaagaatctccagttctgctagtcacacactgggcttcagcatgttttccacttctcctgaacatacttgtgctacaggtggctgcaatccaaaacgcacataacttgctgcaagtgttttcaagagtaaaaacttaagcctcagtcctcagattaacacaatgcagttccaggctttcagcccccagaacatgtacagagagtggcacaaacgtatcacaacatcggtgccatttctgcaaggggttgagtgacagaagctttgcgaggatctgctttgcttgcatataaaaagggtagctaagcactgagatgagccttgcagcaacacacctagtcattttacatgtacagttagctaccccgctaaagccgattccataagattcatcacatttcgatgtgagtcgcatatggatcatggcataagattccacgacgcaactcgagttacagaagaaaacgaaaagaaacaaagaaaaacatacatttttatcacaggaagctaggctcgccctacaggagatagcggcggccggtgtggcacatagcttgcctgagctctaccttgactagctgccatgatcttgttgagcttatggtcagcgagggatgcgtgctcttgcgatgcgtgcacacctgcttgcgtcctggtagggcgcctgccgtgaagcatcactatacacatagcaaaagcctgaagtaaagcaatggatgatctgaattcaactgtgtataacccttctctgaatgaaaccatactgaaagcatgcttgtcttctcgtgatcgaccctacaaatacagatttatataagcatcaactgattaggtcgtcatagattagatacataaggacataggcaagaacagagaagcacaaggacgcacctgaacaaacaagtcaaaccgttgacttccatccgtcgtctggtttgcttgagtggatttatcacctttgttttctcgggcgtcatcgctgaggacactgagcatgcagccttcatcccacccaccacagtcacacgctcctcctgatttccacctctcaatcagaggtagtggctgtcctgaggttgatgtaccatggaagccattaggaagtacggcaagaacactggatgatgcacaactatcatccctcgtattaggatggaaatttcccaatgggcaagaacagtcggttggtgttgacatgcttcggctggaatgctgtgaggatgagtgacgagaagtttctggttcttgctgagacaccgcactaataaaagccgcaaactctctgctaacatgtgaatcacctgattcttcagaagatggtagctgctctgagccaacagaacaaattctctatgcaaatggtttttttctgcctggtagcatcttgattttcgatgtgaaaccctcattttcgccaacaatattataaacaagctgatctttcttgttccttattacctgccttgatccaagccccacctcttttcttagggtcttcaacaccaaacagagtgtatgtgctctccagatcattgttatcggagatgcccttccttctcacggtagccaccaggatatcagaaccacaagaaagcatgaaaaaaggcaggccattcttccacgctagctgcagaagcgcatgccttgttgttgttgaatctatatcttgctggaggtacctttcactgttcaggacctgaggaggctggtttgtattagtttctgttcggcaatttgaatttaccactgaatcaactgacctacgttgaacattctgcaaagcagatcctcccaagctcagagattgcttatcaatatggccaggcagatgacactttggaacaaatgaaggttgaattggaccagaagtggatgactgacgtggctttaatattggatctaacatcctcctcaatgggctgcgtctactgcctttgttgcctgatgacttatctccatttatcttatccacagaggtgcttgcttcaggttgtcgaggacatggtccatccttcaggcttgaacagcggttcactcgattcagtccagaaacaagatgtctatgtggtgacgcatccatatcactgaactttgcactgatccgaggagttctctcagaggcacccctggaaatttgcttttggttgcgattttcacctatagttacagcagcaccaacagaatcaccttgagtcccagttctgctggtgccaagctcttcagatgaatccatgataggaagtggacatgagtatggaattcgaggaaattcatggtgttgcccaatatcttttgagaaaccaacaggtgacaaactggcatttctttccatttccatcaccgcactagacactagagtctcaaaaacctcaccagtcacgccactgctctgctgaaaatcaccacatgcagaatcattgttatgtgaggtgaagaaactttggccaatgttatcatcatctgtaaaaagcctgcgcgaacaatgatggacggcctcctctatattccttgtagtctcctcatcatcaaccatttcatgtcgcatggaactcccagtggcagtaagaagagggtccgagagtggagatatgtttctgagattcaagtcaccgtatttgccagtgttctctggaaagtgttttccatgaacaggcaacaagttcaacactgcagaatttgggctaggtgaatatctggccttcccatggtatttatcctcaagatcactttgctgaaactccatagaacaatgctgatggtcattgagtgtaggagattgattgctttcaagagatttgctgctgggacttgcagatgactgggatggagaagagaatatcagggacctactagtattagatggagaggcaccatggctgctagaaaactcatgcttttgttggtgagaccacctggctaggaggccccactcgagaactccaacattcaatgccttgtcctgaagatggcctgatgtctctttacgctgcaaatatgaaggaacatttgacatatgcttgacaagctcatcaaccgtagtggcctttcgaccaggccatggttttgagcctttcaaggatccacccgcatctgcactccgaggttcccgttgccttcgaaacttctcatttttcacaactctgattctatcttcaaattttccatcaatgttcccaccgactactgcaatcttctcttttggcacttgtacagattgatcttgtgaatttcccctttgacgtccatcacgacctaatgtggcctttacattcctttctctgctaaactgtcctttcgttggcatctttttttatggtttaacatacgccaacaagcagagcttttcacttgattcaaattgaatcgtcaagtttcaacaggatactacacttccttgaacctgcaacttcaatattagcagaaaaaaactcagatatgtagcttctgatatttccaccagagcactaatgaacagaaagaaaatagcaggcagcaccacagaaccaacataactacagtattgcagtatctcaattcagaactaagtatttgtcggtggacaatggcatcattttgtctcccgggaatcctggatttatgaaacattatgtttctacatgtacttagtggggttgggagttggccaccgacagttttgacacaataatgttctaattaggatatgtcaataaccatgcaaacaagactgaaaaaaaaagggctcccactaatgataaaaggtgcaaataattatagatatttgccctgatgctataccgtgtgtggcttgtatataaaaatagtttgcacattgttaagggcccagccatccataaatagttcagtcagtcctgataaatgtatatcaactatggctatggggcatctttccccgtttccctcaagaaaaagggcacctttctccacttgattttgttgggtggcttacaaaatgaaaatttagccgtgcaagcctagctactcacaaaaaaattaaaggtctaactacaagcaagaggggaaaaaactaaagttagttgcccggcaaaaataaaataaaatctggagttgcatagacaacaaatattttaccatatggattaggttgaaaccattttttccctttgcaaattagcctacaaaatgcatcatcatcaacgatggtcgttatagcggcagaacgggggaagttggagaaaacttgctgaactgaataagatggaacaccagctgcggcattaaacccaacagaaacccaccactcttcagcatctctctccaatcgagccaaccaaccacattacccaaacattgaaacagaagaagaaaagaaaaaagcacacatacgacgaagtcacgaagataacataccaagatgctcccaagaaccacttcaagaacagtccccccagctcatcgagatcccatatggaggtcacgcacccgcagatccgccacctcccctacaaccagaacacagatcagtgaacctcgaccaagcagagaaagaatgccaccccaagaaagatgcgccaccttgggggataaagcgagagcgagatggaacgagagcgcgcagcagagtgggagcgaaagaaagcttcggaggtggactggactggatagagacctggagcacggcgacgcgcactcggtgggtggtagtagtagtagtagtaggattgggagtgaggcgcggtggtagctaggagcctcctacttcttctactactcctgtcccctctccgagaccccccaactggttaggtgggtggattggctttagg

SEQ ID NO: 9037 - DNA, 37414 bp, Oryza sativa
atataagtattttacggtgttacactgtacgggttggttgaatgagactgtgagtgcattgatactgggtggatttgttccatttctgttctaatttaatttcttgattggttagtttaatctgaaatcgcccgggacgacgcgctttgtgtccccctgcggaggcttggtgctgaagcagcttcgcaggctagctgttaagagtttttgggtgttgtaaaggtgaacacatgcatagatacactgctttcgatcgatccagctagattcctgcgcatccgtcgatgttttcctttcccatttttaagttttgttttttcgtacgagtgaagggttgatgattctcaacctgttcacacggccggttgcctcttttactgtttcattgcttaatatcaaattttctatagaaatttttcgtaccttccaggttaagacagtaaaatgtatcgtattaacagattagcctaaggtttttaaccaatggtcgagtagtccttgtttaagcttataagcattagacttcgcacgtcggcaagttttcaaacaaagcatatagaaagtacgcgtgtcctctttaaatcgagtggtgaatgggttgactccacagcagcgcaaatcgggaccatagacagtagctaaaccatgcatgttctggacaactcatcctgcgacgcagggccaacacgtatgtagccttttaatcttattattacaaactatgaaaattgggttgcccctgagcatcgcctttcgaatttccttttctgaaaaaagaaaaatttggaaacaaaaacaaaactttgcaagaagaagaattgatagaaatctttttgtagatctcaatcgcttttgtcatagatgtatcattgaataggtatactatactactgacgtgaatcgatgaatcgacagggaaggaatagttccctgaaattatgtccatttaaaccaaacaaatgaagttgaggtgctcaaaacaccggtgataactaatctgtagaagacgaacatcggtatgcactagtactagcagctaaagacaacaactagaagacgatcaaattatgtttcatgccattttctcttggatctaatttcacatatggatattttaatttgaactacaaaagtaaaatggtttaccaaaatggtattaaccgcaaaatcaaacttgaagagtccataaccaaaggatcaatgaacgaacgtcgggacaaggagctttgcttcagcagaatgaatcttgatcttcctcgacgctgatataagagaatctctatattctagtttccagggacttgaatctctatattctagtttccagcatttacattttgtggcttcaggagcacagcaatgcacccacttctctgtaaccagttgtcaccccttgatatataagagaatgacccgccgttgacaacgttttccctgtatttcgacggccaaccatacttgaccaacaactcatgcatgttcaggttgatctgatgcttcatcctgctgtgccttctgataacttgggtcaaccgcagtttgttgggtacccgtgttgtctacttctgaataaagagtatcattttttatgtcatcactggttttgctgcttccttcgctgaaatttactgcattcttcacatttttaggctcctcagattccacaagatcagaaacagtttgcatgctctgaacaggagggttttcaaggttgatacccatcccttgcgaaagcgctacatactttagtactagctgcttgtaggagtttaaaaggttttctacatcagcaacagtcagatcaccagagcgggcaaaaaggaatgggtactcttgaatttttttgttcaagtcatcatccttgagaagctcggctgctcctttcttctccaaatcagaaatcgattgcacacgctcaactgggttactacttgcatcactgtcccttctcatttccagtccaggaccttggaaattatctttcaaagagagattgacatcagaatccctgctagctttcagtgtttgtgatttttgctcccgtacatcaagattgttttggttgtcctgattctctgagctagctgataatcccaacatgcgttcccttgccaagtccatcttcttttggaaatctcgttcatccattgataatgattccccatcaatgttccagatgaaagactcagcggataagatgtttgtaaagaaatactgagcttctgacaccaaccgtgattgacgtctgtatcgctgtatatataatagatttgagtgtaactgtggaggatttgcctgcattaagaacagctactgcttaaattcttttggctaccttaatttaaatgacaaataaaaacactttacagatgattttcaggcaaaaggatcataacattgtagttcagatgatagaacaaaactacaactaatgctgaattgcggtgcaagggtagtttaggctaactgcagtaattccagaagcacgtaataccttgagaggccaaactagaagagcacatatatcattaactcttaccattcagtagttgacaagctctttccggtaatgaagagaaaagtaaagtgataaccgtacatgatctgatcttaagccctttatggtcatttgctgcagttttcaaaagcaagtccacaaccactcaaatgccaactattaggtttgtaatgaaagtttaaccatcatttgtaatcaaaactgatgtagtgcctagctagaggagggatgcccaactgatggttcacagattcatggttgctctaagcacatgtactgatgggcatgagtgcatgacaaggttgctctcaaatctggcaaactatttcagtacaaaactcactattagattagacatggaacctgcatcataatagataggtagaagttggaactaaaagtaatacgaagcaacagtaaatgaggttgcacagcgcactgacaactctattaagaggcaatgtgcccaacaaatcacgtaccactgcaccaataataggcttatattttttctagaaaatatcaaagttgagtaggtaatacacaaatagtcaccatcaagtcgacacctaatctgtgccatatcaaagggggcaaattttctttctccaatacagcaccaacaacttaatataatattgtcaatatttgatggttcatttgtatcatcaaccagtactttaacaagtagtgaatcatacctttatggtaacatagatgaggactggaaggaattcatcagctcccgggggattttcatttgatacaatagacgcatttagaagtaggttgttgatgactttacagcagttcaggatgcaagcaagcttatcccttggagccttatacatgtttatcttctgcagctccttctgtgcaagctgtacaaagaagggaacatatgttagtaaagaacatttatatatttgaacactgagccagttaatgcatgccactggaagtattcccttaattaaggtccttgcaagcaaaaagaattgacattagaccacagtacgcagattagggttgacagtggcagcattactgtgatgataatgccataaactaaatagcgagtgtatataagaagtgggcagaatgttattcacatgtaagcattagtttataaatatacttcagacagacaggttcaacaggttcctcaatacccaagtagttcaatgttattgaaaggttctgcactgtaacagatcttcacaaatctaaaaatgtataaagagaggaaatcaacttccataccagccatgatgtttcactttgatattctggtttgatatccaagttttcaggccgtataaactgctgtaacaaagacatcttctcaaaaagttcttcatcactcttcacatcttccgggacagaagcaaatacccgattgaacagctttgtcataacgtatttctcaaggccctaaaatcacaatacaagacaatccaaatgttgatataacgacaaatatattggagaatatgcaagtaacgttatgacattttatggaatatatcaataagatgaagaggaactcggtaggtaaagggtagagcgagagtgaaaaaggagagtttaagtttaaaagtatcgagtttgaactgcactttaaaaacagcaacatgactagtggaataagttaataattccacgtaactgccagtcttaatcaaagtgtctaagaaaggcacctagctcggctggcagggagctgccaggagcagagcaccagcctgagttcgaatcccttctaacgcaggttttctcaccattttcttctctatcaataatggatgctaagttccttcctagtactccaacacattcttaatcaaaatgcctgagataatttgatgaagccgtgcattccaaatttccgatgggagtaaatacaagtcagatgcatttattatgtatctctgttaaacacagagattatgataacatgatggattgactgcctgaatctttggcaagcaggcatggtcaccagaaaataggataactggaaaatgaaagacagaaataattcatctcatgttaaagtagaaccaaaataggatgtttagttcatcccgttgtctaacagattttagtcaatgcattaatccgatcatgtcaaaaaggaaagacagcatggtccacgaatcaagaatcatatactcatatagcacagtgacatcaattaaaaatccaaaaataaaaagaacacaggcatatcttatctatagaaagttcatacggaaattacccataagacatttggacaaaccaaatttaacgacttactttgcaagcaggtaatcaacaagaacatagagctctgaaattcaattttgatgttcatctctctagttatgtaatattactatatcagcagtaccacggaacaaggaaattgattacctcaccggcactttctagttcttcttcagaacttccagcccagggggtgtgagccctgaaagcaccttccatattttccaggaattcttgaacagccgcactatcatgttcagggtcaggagctctgttcgagaacgttacgataaagctgtataacatgaaacataacaacataaatgatgtatttcccatacgaaaacatacataaatgtcaagtattggttagttatggatgctggatctagtattttaaaaggtaaaaaaagaaaggcaaagaaggcagtgctgaagcgtgctcctacatgtagaagaattaagtaaactcactagtttacaaagccttaattccaaattcccagcttctggcctaacatatagaaaagcgtatttgtcaagaattaactatggtgtcctcccagctgttgaatctccagatacaaccttggctactatgtgtcattgccactgtgcataaatcccaactcatgtatttctaaataagcatgttaacttctatgctctgtatccaaggtagatatttcacccaaagtgcataaaccgatcatgcaattttcctcaaacaacccccacacacatcgcattgttgcattgccggcacactgatcaattatatcgattgtgctgcgactcatctatccaaatgcagtaaccctagacatagaaaataggaatggcattaaacttcacctcggaactacacagacgacggttaacaggtaggcgaagagacaaacagcaaccctagattaagctccccccacaaaaccggcacggcgatcggtcatatcgccttgctaacacatattgaaggacacgggaacgtaatccccttgaacccacgccaaatgctccccaaatccccactataccagcaaaatcgcccatccccgcaccacacactatcgaaccaacacgcgccgcgtaacacgaaccaatcgcggcacacgctttccgtctcggatccctagaccacgaactgagatcgagcatatgcctagcaccgaaaatttgtggcggagctaaccccttgatggacttgacgaagtcggcggcggagggctggcgcatgcgctccaggaagtcgtgccaggccagcggcgcggtcgcggacccgaaggcgtcgcctccgccgccgccatccatcgtcgccggatcggggaagccggggaggtcggcgggctcggatcagccggattcggtcacgttttgtgggaggaggagagaagggggaggaagtcaagggtcgccgcggtggatgcccccggcgacgcgcggtgatttattttgtcggagccgtactcgccgagaagggagtggctcacggcgcttccgcgtaaccaaagatggccctgtttaaggacatttttagtttggaatttccaaaggttttatttattactcgtagcagtaatattttttctaactactccctccatccacaaaagttacgcatattatttttaacaccaaaaccaaggagaaattaaatcaccttggatgttacaaaatcaaggagtaaatgaaagcatgcaaccaatgagtattttgatgacttcttggattctaataaaacatttaatttatctcttcattcaatgcataaagactacacataagaacaacttatttggaaaaactcatatgtgaaacaggtgtaacttttgtggatggagggagtagatggtaccctgcgtgttgctgcaggagaattatacgataataaagtagatatgacttttaaaatttttttctttcttacctatatacagttttttcccgtgtttattttttttacatttatcggttatacataagttataaataattgagttgtatggtgtgtcttttgggaggaagagatataatttatatccttgataaatcatccaaaacctaaaaacaattaagatgatatgaagagatgtaatttataccctttataaattattcaaaggctaaaaacaattgaggtgatgtggaatcctgggaagaggaataccacgcacatgcagctgctacttgtccaagatcgcaggaagcatgatgatgcatccagcagaggaagttgtgaccaaccatggggagcatgtgatgcaggtgctggaaggctcgttcggtgcggattccgcgtccgtgccgagagatagcatttgggtgaggtttcaccctaccgtttgacggttacacagtaatcgcgtgcttactaaaaaaccacataattatcacgagatgtatcgtgattttaaaaaactaaaaatgttaccacgcatgataaccacgcgacaaccctggagcagttccgtgttgtggtctttgtggattcctgcacgtccgatgtgtagactagcctcgtgggctcatttgctcaacccagtttggctcttctgggcctcgtaacttcgtgcgtttcgccacatgtgtgtgtggcagtttctactagttggtcaatgcatttgctgtaatcagcgagcagtggtgcccttttgtaaagtttcaaattgctctccagcttcggctagcgcaccagacaatggagtgatggcgtcgctcgtaaccatctgataaagtcgagggatcctttcagtgctctgaaactgtctgtagcaatttccctgccactactgccatatgattttagaaatgggtgttaatcaaactgatacaatgatgtggcacgttcattataaatatttacaccacgctttgctgtgcaaattgcaatactacgttggtggaaagaagaggaaagaacgacgaaatgcgcagactgcgtactcgactacggccgcgagaagaaatgtactacaaagtataaaaagaacaccttcttaaagcaaacccctgacccagaaagctgttctgcctgtgcattatgctagttatggacaatgaagtacggtgcatttgatatgtggggcaaggctgccgatcgcaaagtgagcttgagcgctcttaaaaacactaacagtcaacacaggtataaaggcagaattagcaatgcctgcacaggttgcaattagcaactactcctaccaactcctaatctcctataatcagctcaaactgaaaactggtgcgtaactgacactaccattaatcctccagcctctcatggtcgcaccacaagctccaaaaggccaagggcctccaggtcatgcagattattggatacgctgcacgtatcagggagcaataagccactacgtgtccactggcagtctggcatcggtacatttctccaccatctcttgcacggtggagcccaacgaacgattccccaaaatgtctgctggtgcggtccagactccagactccagacggccactgtgatctacagtgttcaccagtcaccagtaggagtactcctctgtgccatgtaccgcatcggattgacgaacgaaactgccattgaccacatcaaagtactccgtatagtagagtgaagtggtcgccaaccgctctgtacaagacgtgactcgcgccgtgacagcctaactcgaccgaccgcacagtgtcctcttcatcactactactccctcagttatataatgagatttgctaccgtccagcagaggaaggcggtaccaaatcctagctatccgttgggataaatcaaacgattgagattgctcggtaccgtgcggtaccattagctcttatagtggtaccgtttcttaaagagaggtggaagggtagtatagacttttcacatgtaagggcgagacgccggcctccggggtgcgtggtggggtgttgatggcggcaccagactgtgggttccagacccgatgtcaatagcggcggtaggtagcgaggtgcgccgcgggaccagcatcgacggacgacgaggtctggggccagcgttgatggcggcgacggcgagctgcggggttcaagggttcgaggtggcgtgcagcctgcgagatccagccccagcttcgacggcggtggcaagcatcggggtgtgtcacagggctagcgtcggcgacgacgtgttgcgagatctgatcccggcgtcgacggtagggctacgggatctgcggccgtgtgcggcatgtgtggcctgcgactctgcgagatccagtctcggcgtcgatggccatggcgggcggctgcggtggcggtaggggcgttgccggccgcgacggcaaggtggccgtggagaggtcataccaggtgccacggtagcagcgagggtgttggcggccgaggcagcgaattggtcgtggagttgtcggattaagcaccacgccagcagcggcgagtcgtcggaccaggcggcggcaccggcggcaaggaagaactgcaaagacgcgcatatgagggaggaaacaatggacacaagcatgcagcggggtccaagaatgagaatttttcttttttgacgaagaactcaggaacgagattaattgactcaatattggaagagatttttactcattcccaatcctacccctaaacattggatggctagatttgtttcaatacctggtggtactggtaccttggggtaccaagtgctggacaatagcaaatctcttatataatacaagagattttaaatttttgtttgcactatttgactactcatcttattaaaataaatttagaattattattatttttacttactttattattcaaagtactttaaacataacttttcgttttttacatttgcataaattttttgaataagacgagtggttaaatagtataaccttatatatataagcagaaacttaaaatctcttgtattacgtgggacgaagggagtacagcttcttcgacggataaacggactcaaaaatccatcttacgaaagttccaatgggcaatggcaacagcgaaaggcaggctaacgtagaacaaaaatccgaggccgtggcgatgatttatgagcctgtgacgcacacgtgcaggtccggcgacgtaggaaacggcgaggttacggtagctcgcgagtctcgggttaggtcagcaatgattgtcgctacacaccaaatcagaaggcaaaaacgtcaagggaactcaacggaagggacacaaaagaaaaaaaaaactggccccagcgaggagcagatgcatttcacgactacgacggcctgccgcaacgtaccaacgtaatctcgcactggccgctatcaacggattgtgaaagcagccacttgtgatagtttaagtcaagaaaaccgagattcaatttagctaattacaatacttacgttaagcctgggaagtccaaacccggtgctgtgtccggagacccacctgtttacacgaatatggtagctagaagtacaccgaggaaaaagtatataaagtccaagaatattgacttaggattaacagagaaaacttaggctacttacaaatagcgaatcaatgcactccattataaacctccgagtgtccaactgtggcaagatttcgattcgataaaaggatctactagtaccaagattgaacttcgagaatccttctaccaaccaataaattccaggacagcacggtttaaaattcgggaagataacacgttcgtgcaccagagttattgaggaatcaaaacaagaactaccaagccatatgcaaaccgagatttgtactaatttaaccaggttcaagtcactaactcagatactaatttagggcccgtttagttccctaaaaatttttctcaaaaacatcacatcgaatctttggacacatgcatgaagcattaaatctaattgcacagttatggaggaaatcgcgaaacgaatcttttaagcctaattagtctgtaattagccataagtgctacagtacctacacgtactaatgacgacttaattagtctcaaaagattcgtctcgcggtttccaggctagttctgatattagttttttcattcatgtccaaaaactccttccgacatccggtcaaacgttcgatgtgacacataaaaatttccttttccccaaactaaacaaacctttataaccaggttcaagacactctccagtcggcatgaggactactctacggtatattcctgccgtctgacactcgacacaacacggaagggccacgttccttctccaaaacgttcttccgcaactctgcaggtctgcatttacaaatggtttatcgcctaacccacgcccctcatttccaggtaaccgtaaattctcgagtacacctcgtccccaccactaccaccggtcaccaccacgaaagttactgaccatccacacagcctaactcgttcgtctccatgccgcggcgccgctgccggctgagccagccagattacccaggggaggacatgggcatgggcgtgcggccgtggcagcgtgcaccggacagcggagtcccaccaactccgagccgaaacgaataaacaccacgccgaaacaatggcatacgcaccaaacgggcaaacggacacgaacaaggggagaagataaccgagcggaaagcggacaggtgacagatcccacccgctcgctcgctcgctcccaccacttccctttgcccctaagtaattgagaacgatgaagaaagatgaaggaattgaccatggcgaattgggcgatagtgataattaccggacagtaattcacaaaaatcagcggcgacctcctcctctagggtgaggtgagagagctcaaaatttaccccccacgtacaggaatcggaacccaggattagatagagaaagagagattagaatcgacaaacacgggtcacatccacttatctatctccattagattaagccttctgcatccttcttcttcttctgctgctgctgttgctgcgatggtgtggtggttggttgctgctgctagacgcttaggccatccacgccacattgcttgtatgtcagtgactgcctcctcggactgatggcgatcgcgcaatccaccgacacctgaggttcgttcacacgcagctttcacgatcaggtcgcgcgtaatcggccgcttgcggcggaggtagggggaagttgggtttgggcggggtggggtttacctggacttttggggaggagaagccgagcacgaggatcttggcgccgacgtcgccggtgatgcggaggtcgacgcggtcgctgatcgcggcgtcgcggacgaggtcctgggcgtcggcctggagcacgttgaagcggtcgacgatgacgcgggtctggagcaggcgggtgctgtgcgccggctgctcgaacccgggcacggccgccaccccgagcggcacgccgtggtacatgacgtcgaacgccgtggcgccgtagcggatgccgaccttgttggggttcacggcggtgaagaggagcgtgatgttgagggagaggtaggccgcggcggggaccgcggcggccacggtcccccccacggcggaggcggcggaggacggcggggtgacgaggaggtactggacggacacctggttgaggtcgaactgcggcttccgcggcttcaccaccagcaccacgacgagcgcgacggccagcgcgaggagggccaggaaggtgagcagcaggaagatgcagcagcagcagccgcggaacgaggccgacccgccgccgtacccgcccccgtagtgcgggcgccgctgctggtacgagggcggcccgtggtggtgctcgccgttggatcgggtcgtcatcgccgccgccgccgccgcggagttggatggatgggttggtgggtgggtgaggccgtgagcccgtgaggggaggaggggggtggtttggatttcgggagctaatggagcatttgcgaggtggtacttgtgggggtttgcgttcgtgggggtgggggtggtggtggaaggggaggaagaggggaaagtatggggaggtgaatacggaaactgccgttgcggtagtgggggtaaatttggtggggcccttctttttttttcttctgtctctcttcgttcctgtcgtgctccgtttattccaccgggaaattgggatttgttggataaaataatggaataatatggttctgcttggcacagtttcagctccacctctcctgaagctggagctcagctaaacagtttcagctccactaaaactgggagtagagttgggtgaagctctctcacaaaatgtactagagttgtggagctgggtttatgcagctccacagctccactccagactcaactcctgaagtaatatttaggagttgaagctgtaccaaacagcccctatgttccaaaacgtaaaaacttaaacctggcacggtgcaacgtgacttcttaagcatgtggccgctaaagcactcaaagctgcccaatcttaggtgcagaacagtatggagttttctgtatactagtgtcggtgacatgggaccgggagtatcatgactagagacttgggcagccgcggtcacccacgtggcctgaccccctcgggggggtcgggcccgagggagacgtgcccaccccctcctctgtctccccgaggggtcgggctgctcctgtttcggccccgagggctggggcgccccgaccccctgtggtattggcaccacgtgtgtgggttaggtgggcacagcggcgctcaccaaaccacatttattgcggaatggacaagcgcgccatgccgcatttaatgcagcacggcgcacgcatatccggtccgtgaccggtcgcaatgtgtgaccggtcacagaccggtcagatcgcgggttacgtggcagcaggcggcctgtcacacgcctcgccccgtcccgtcggaatgatgagagcctcttgacactcgtcccgagctggagccggcgtggtaactcctggagttagcacgtcagtcccgactcgattcatgccaggcttcatcgcaaccgttgcaaggaagtcactgtatgaagaggggcagatgtgcggcatgctaaactgacgcgtggtggagaagaatgaccggtctgtgactggactaacgccggtcacgtcatcggcagacaaccgtgctcccacgttgcatctgcttccggcggagtggaggtaagtatgacccatcccatcggagggtcattcagacagcggccattgaagatctcctcccattaatgaagaaatgacagggtgatcccctgtgtccgacgagtgacggcgctgggcatcactcaaggacaagcggtgatttagcttccaggcggaggcgcgagtcaagatttggtcaagatagggtgggtccccacccaaaagaagagtaggtagaagaagtgcatgtggtatccccttgagatataaaaggaggaccttgcccacctaaaagtgggggaggggagggagggtgaaaaaagaaccagaagagaaggaaaaagaggggttctagagcttgaactctcttgctctccatttgctctgtaactccttcacacacagatccaccagaacacaggagtagggtattacgcttctcagcggcccgaacctgtatacatcgcccgtgtcttgtgcatttgctctctcgcgaacgttccacagatcgagggtgaagaacctcactcagcgcccccggccgaaccggcaaagaggggcctgcgcggtctcccggtgaggagccccacgctccgtcatctggcgcgccaggtagggggcgcgtgtgtttttctaagccctcgtcctctttcgtgtgcgccaagtttctcccgctcagcccaatggccgaacgggcagtggcgcacaacctctctccgagcgctagcggtgacgacagggagcagaacccgcgccgtcgagctcgtactccatcgtccccctttcgccgaagtcttgggcgggaggaggcgctcgagggggtcgaaagatccgcgacttcaccacccacgggtaatgaagaaggacggcgagacggggagtgtcgcctcctcgtctacggcgatggcagcacgccccagggcgcgctccaggctgcgggcgtgctcctgcgtcacccgcccgtcgtccccgatccagagactccagctcgacgttggctggatgacgtggccgacttggtcatgacggcgcagcagcgcctaggcgccggcgggcggtccttcgcccccaaggcctctggcgctgctaccaccggctccgtgtcgtcgaggcggagggcgcggcgagcggcggccgttacccgccgttcgtccgctattccctcgtcaatgcctccgacccaagaagatgtgcgtggggggccggatgcccgcctcaatattgagcgccgacgcaatggtcgtcgtgctgcccacgcaacgaagggcgcttcctcgtccggagcgccacctcggtccgggcatgggggccagcctcccatgtccccggttggcggtgccggctgtcgagcctttgtggcgagcctttggaacgtccgttggcccccaaggttccggcccaccatcaccgaaaaatacgacggaagcgtcaaccccgccgagtttctccagatctatacgacggggattgaggccgccgggggtgacgacagggtcatggcgaatttcttccccatggccctgaaaggtaaggcgcggggttggctgatgaacttgccaccagtacactcttgggaggatttgtgccagcagttcaccatgaacttccagggcacatatccgcgcccaggtgaagaagcggacttgcacgcagtacagcgagaggacgataagtctcttcgctcgtacattcagcggttctgtcaagtccgcaacaccataccgtgcatccccgcacacgcggtgatctacgcgttcagggggggcgtgcggcacaatcgcatgctcgaaaagatcgcttccaaggagccccagaccaccgcggagctttttcagcttgcggaccgtgtggctcgcaaggaggaggcctggacctggaactcctctggttccggtgtggcagctccggccgcccccgggtccgccgctcggtcagggcggcgggacaggaggaggaagaagaggtcggcctatttcgacgacgaggggcacgtcctcgccgtcgagggcgcttcgcgggccacccgaaaggggaggcctgcgagcgacagaaagaaggaggctggcgctcccagcagggagcgcccgaccggcaagtggtgctccgtgcacaacacctccctccatgacctcgcggactgccgcgcggtcaaaagtttggctgagcggacgaggaagtgggaggaggagaggaggcaggagcgccgtgagggcaaggccccggcggcccccgccggcaaccggcgaggtgaggccaagcagaaggcccccgccgaggacgtcgacgatggcgacgataacctggggttccaggagcctcaggccactgtcgccaccgtcgatgggggagcgtgcgctcatgcttctcgccggagcctcaaggccatgaagcgagagcttctggccgcggcccctacccatgaggcgacgcggcgggcgcgatggtcggaggtggccctcaccttcgaccagaccgaccacccgccgtgcgttgcccggggaggacagatcgcgatggtggtttcccccaccatttgcaatgtgaaattgaggcgtgtcctcatagacgggggtgcagccctcaacatccattcccccgcagcctttgacgcaatcaaggccccggggatggtgctccggccgtcccagccgatcatcggtgtgacgccggggcacacttggccgctaggtcatatcgacctcccggtcacctttggtggttccgccaatttccgcacggagcgggtgaactttgatgtggcggacctcagtctgccctacaacgcggtcctggggagacccgcgttggtgaagttcatggcggcagtccactacgcctatctccagatgaagatgccgggccctggtggccccatcaccgtccatggcgacctccaagtcgcgcttgcttgtatggacagcgcgcggaccagctcgacgcggcgtccaagcccgagggtggcgacgagaggctcagcgcctccgtcctggccgccccgaggcagcggatgatcacgtgcgacgtggtcccggtcaaggaggttgccctgggcgacggcccgtccaagaccacgcgaatcggtggtcttttggacgacaaataggaagacgcgctcgtctccttcctgcgggcaaacgccgacgtcttcgcctggagaccggcggacatgcccggggtccccagggaggtgattgagcaccgtctcgccgtgcggccgggcgcaaggccgatccggcagaaagtgcggcggcaggccccggaacgtcaagccttcatccgcgaggaggtggcgcgacttctggaggccggattcatccgtgaggtcatccatccggagtggctggcgaacccggtcgtcgtccccaaagcgaacggcaagcttcggatgtgcatcgactacaccgacctcaacaaggcatgtcctaaggacccttaccccttgccacgtatagatcagattgtcgactccaccgcggggtgcgaccttttgtgttttctagatgcatactctagttatcatcagattcgcatggctagggaggatgaggaaaaaactgcattcatcacccccataggaacttattgttatacgacaatgcctttcgagttaaagaatgcaggacctacttttcaacgtaccactcgaatttctttgggtagccagttaggacgcaacgttgaggcttatgttgatgacttggttgtgaagacgcgcaaccaagagaccttactctcggatctagcggaaactttcgaaagtctccgctccgcccgcataaagctgaaccccgacaagtgcgtgttcggtgtgcctgcgggcaagcttctcgggttcttggtcactgcccgaggcatcgaggccaaccccgagaagatacgagctatagagcggatgcgcccccccagcaaacttagggatgtgcaatgcgtcatcggctgcatggccgccctaagtcggttcatatcgaggttgggagagaaggcgctacccctatttaagctcctcaaacgttccgggccgtttacttggacggaggaggctgaacaggccctcactcagttgaaggcgtaccttagttctcccccggtcctggtcgccccgaaaccagatgaaccgttgctactttacctggcggcaaccccgcaggtggtcagcgcggcgttggtcgtggagcgcgacgaggacaaccctcgctccgcgcacccccaccctgtgtcgactcgacccgggagagagcagggaggagaggcccccgagccgaacggcggcccgaggcccccgacggccggagctggccctctgcccgcttgtccgacggtgccaggcgcccccgacccccaggatggccccggggccactgcgggaaggccgcgcttgtcgccctctgaccccgaggtcgtcggcacagaagccgagtgcgccccgcgcggcctctcggatgaagagcaccctgtatcgactcgacccgggagagagcagggaggagaggcccccgagccgaacggcggcccgaggcccccgacgaccggagctggccctctgcccgcttgtctgacggtgccaggagaccccgacccccaggatggccccggggccactgcgggaaggccgcgcgtgtcgccctccgaccccgaggtcgtcgacacagaagccgagtgcgccccgcgcggcctctcggacgaaaagcgccctggagatgcggctggcgaaggggatcggccccgccgaaaggtgcagcggcccgtctacttcgttagtgaggtcctccgggacgccaagacccgataccctcaggcccagaagatgctttacgctattctgatggcttcgaggaagttgtgccattatttccaggcgcatcgggtcacagtggttacgtcttacccccttggtcaaatcttgcataaccgagagggtactggacgggtggtgaaatgggcagtcaaactctctgagttcgatttgcactttgaaccacgccacgcgatcaagagccaggccctcgccgactttgtggcagagtggaccccagctcccgagcccgtctccatccccgaggccagctcgggcccctcgcagctgcctcacatcgcctactgggtgatgcagttcgacgggtccctgtctcttcagggtgccggtgcgggggtcacattgacctcgccgagcggagacgtcctcagatacctggtccgcctcgactttcgggcgaccaacaatatggcagagtacgagggactccttgcgggactcagggtggcaactggactggggatccgccgcctcctggtgttaggcgactcccaactggtcgttaaccaggtctgtaaggagtaccagtgctctgacccgcagatggacgcttacgtgcgccaggtgcggcgtatggagcgccatttcgacgggatagagcttcggcacgtgcccagacgggataacgcgctcgccgacgagctctcaaggctcgcttcctcgcgagcccagaccccaccgggcgcctttgaagaaaggcttgcccagccgtcggcgcgacccgaccccctaggggagacggacgcgcctgaacggcccccgaggcccgtcggagtccaggcctcgggactcgaggggagcgctcccagctcccttagatcgattgcttggatcactgagatccaggtgtacctcacagataagactctacccgaggaccgcgaagggagtgaacgcgtccagcgcatctccaagcgctacgtgctggtagaagggaccctctatcgacgcgcggctaacggagtcctcctgaagtgcattcctcgggaacaaggcgtcgagcttcttgccgatatccatgaaggtgaatgcggagcccactccgcctcacgcaccttggttggcaaggcctttcgccagggtttctattggccgacggctctcaacgatgcggttgacctggtccggcggtgcagggcgtgccagttccacgccaggcaaccccatcagccggcccaggccctgcagaccatacctctttcatggccgtttgctgtctgggggctcgatatcctgggtccgttcaggcgggccccgggcgggttcgagtatctgtatgtcgctatcgacaaattcactaagtggcctgaggcttatccggtcatcaagatcgataagcactccgcgcttaaattcatcaggggcatcactgctcggtttggggtgcctaaccgtatcattacggataacggcacccagttcactagtgaactcttcggtgactactgcgaagacatgggcatcaagctctgcttcgcctcccccgcccaccccagaagcaatggccaagtggagcgcgccaacgcggaaatcctcaagggcctcaaaaccaagaccttcaaaatcctcaaagcacggcgactcatggatcgaggagctgccagcggtgctctgggcaaaccgaaccacgccaagccgagcaaccggggaaacgcctttcttcctcgtctacggcgcggaggcggttctcccatctgagctcaccctgaggtcccctcgggccaccatgtattgcgaggctgatcaagatcagcttcgcagagacgacctcgactacttggaagagcgaaggcggcgcggggccctccgagccgcgcgctaccagcagagcctgcggcgctaccatcagcgccacgtccgggcccgatcactctgcgtcgacgacctcgttctacgccgcatccaaacgcgtgctggactgagcaagctctcaccaatgtgggagggtccgtatcgagtgatcggcgtcccccggccgggctccgttcggctggccacgggcgacggcacagagctgcctaacccgtggaacatcgaacaccttcgtcgcttctacccctagtgggggtcgggtgtcaggtctcgggctcaggccaaccccgcacccccccgggcgtgcagggttggccgggggctaccacatacacataattgtcttttttctcttccgtatttcaataaaagcattttcgatttcctaaggactgtgtttgtgccattgtttccttttgaagaatcttgacttgaattagcacgctcgtgctcgatcctgccctcggtggcccgggacggctaaaatcgccaaaaggggcccagaaccgagccgtgccccggggcgtggtgaactccgggggggaatcggcaaaggcccacaatcgggtcatccataaccctcggtcaccacgctcccggcctggccagtctcgacatgtggatctccccaggcactagctccgacccgcgccgtttgaggctgggacccgggcacgagcccttgttcaagctaagacacagaaggaccgcggcacagaccatcctcgtctcatacacacaacaaataggattgacacagaaatttcctctttatttgattgcagattaagttagtttatacaagaaggggacccgaaggcctcggaagaagaaagaaaaaactatataagattggcatgggcctgggggctcattccgacacgcccgggtcgccggcctcatcgccgctgtcgcccgcaccgccgtcaccgccctcttcgtcggagtcgagggcgaacgcgagccggggggccgtaccctcgaagctgtggacgatgtggtcggcagcgtcccggacctgcgcgcgcgcgtcgtcctcggtcccgggaggaaactcgtccagcgctgcccacggggagaagtccgggtccctggcctggtagcttgccagtacgagctccaccgccccccgggcgaggtccctcgaggatgacttgatcgtctcctcgagctcctcggggagccgctggagggtcccggccatctctgagaggcgctgggcgaggcccccctggttggcggtatacttcgcagtccgtccgccccagaggcccgcttgccacccggcgcggtctagacgggagacggcgtcccgaagcatgccgggccctacctcgcctgccaagcggagggcctcgacctccccggcggacgagtccaacgcaccctgcagatcggcgatggtgtgttcggcagctgcgaggcgggcggctaggtcgccgtcgcccgcggccgccctgtcgctgcgcgccctcgcgtccagctccttcacccgcgccttgagctcagcggcccgctgatccagtgcggccctctcggcgcgggcgtcttccagattacggcgcgcctgctcctcccgcgctgcctcgcggagggacaggctgtccgccagccgctgcaccgcggcctcggcctcctcgagagctcgctcccgctcggtgagcgcgtcctcgcggaggcggagtgtggactcctcttcggcgcaggcggcctcgcggtccgccaggtccctctccctcgcgcgggcgcgctcttccagcgccttggcgcgagcttcaagggcctcttcgcgccgccgggacgccgcctcgttctccgccgcccgccgttcccgtgcagcggcggcgtcaaggactcctcgggcggcgtcgagtttcttctctagctccgccgcccggctcccgtattggaggcggagatcgtcccgcgcctcgttgagcatggcggtggcgatgagggcagtctcccgctcctcctccacctccctggcgatctccgccagctccctccgacgggcctcgagctctgaggcgtgccggcgatgtgccttgcggcccgcctccaccatggcttccaccgagcgccgcccctcctcgacgcgcacccacgccgcgtcgagctccgttcgctctgcctgcaggacctccatctgggcacctagcccgtccagcaccgtggtgttcgcgacggctaaggcctgcaggaggggctccgctttcagtagggcagcggaaggcagaggggagagccgtctcggtatgggcgccgcgcggctcggcccgccgatcgacgtgccggacccaggggcgtcccccgaagctggcacgtcccaaacgtcgcccgaggggtcgggcccgagcggtgcacccgcgacctcgtcgtgggtggcctcggaagtcatcgtcgcctcgggcggagtcgggtcgggggcttggcaggccgcttggcgtgcgcgcgccacctccgcctcccggacggactcctcggcccggcggagtttggcctcctcccgagcggtttcctcagcctggcgaacccggacggcctcctaggcagcttcctcggcttcccgaaggcggtctgcggcttctcgccggtcagcctcccgcctccgggcctccgcggtcgccgtctcctcggcctcagactggccggacttggaatggcgggaggggcgcgacgggatctcgctgaggcagaagaaaaaccagaggacaaaaagaaacgggtgagtgaaaacttgccttgggagatgggagaatgaatacggccgcagtgggcgcggggacgaacctgcgaggaggtcggctaaacgaccaccttggggggagataaggtttccccggcatggttcggtctccctcatcttgcggagccgcttcttctttcgctccccctcgggctgcgacgtcggcacggcaccctccgggcgcctgctgctggcacgcgccgccccgccccctcggggaggagatggggaaggggtaccctcctgcttcctcttcccccgggcgtcggcaggacggctgcaccccaggcccccatcgtggggcccagaagcacgaccccctcccggggtagattgttcccccctgcggctcccgcccgcgccatcgtgacctcgaggagcccgttcctccgacgccccgaccgcctgcatgatggtcaggatgttggcgcaatctggatcgctgcagagggggaggactccttgggggatgagggatgcctccacggagctgagattcagcactcgttggaccaccatcttgaagtcctcaggggcccagtcccatctgcccccctggtgggtcctcatgtagtcctcggacccggtgtactcccaggcgccccgggcgcgccgctggagcggcgcgacccggcgatgaaggtagtcgccgtacaccatggcccccgtgagcccctgggatcgcagacctgccaggcggtcaagaacggcgtcgtagctgtctcccagatctaccggcgcccgctagttggaggcctgcgccgggggctggctcggaagtcggatgcgcgcttcatcggcgaggggggtgtagaaccagtcgctcttccagtcgtcccacttcttgcggaggacgcagggaatgtagcggttcagcaccggcccccgcggctggaagtagcagccaccgactaccgacggcggcgacaccggctgtacggtgaagaaccaccggaacagccggagagatgggcgcaccccgatgaacatctcgcacaggtgcgcgaagatggccaacgtcattaccacgttgggggtgaggtgcgccatctggagatcgtaaagctccagaacatccatgaagaaagaagagaatggcgggaccagtcctgccattgcgaaagagaggaagaagacggaccgccccgggtagtgtggcgccgggcgtccctcacccagtgcgaccacctcccggccggcggcagattccggcatgaatcggcgcggcagcccggcctgcctctcgctcacgatgcgggaaggcggcagcacgctaccgtcgagcggtgcggagccccgtgccatgacgccggcggaggaggagcttgagaacgagtgagtgcggcaagggtagggcacaggaaacaaggagttagggcgcaaacggcgaaggcaaggggaataatggcgaaaggaaggaaacgaatctcttccttggcgcctttatacccttgccaacgctatgcccggctcctcgtttcccgcgcccactatctcgccccctcgtttctcgcgcccacgcctccactaatcccactcgcccgtttgcggcgcacgaggcggatgtgcggccgtggcagtcgagatgggatatatcgtgcgcgcgttaactacgctcgccgaccgaagcgccatcatcatatctccaggcgaaatgaaccggctcgtcccgattcgcgcactactcgagtaatgtaacggtcttgaagaggccactcattgttatcggtcgtttttccctagccgatgcgcgcgatttgcgaccgctgggttcctgcccgcctgtagagagcggccccacctgtcaccaggtctaaagagtggcgtcacgcccgagcgcttccctcgaggggggcgaacgccctggcataacgccgggggctactgtcggtgacatgggaccgggagtatcatgactagagacttgggcagccgcggtcacccacgtggcctgaccccctcggggggtcgggcccgagggagacgtgcccaccccctcctctgtctccccgaggggtcgggctgctcctgtttcggccccgagggctggggcgccccgaccccctgtggtattggcaccacgtgtgtgggttaggtgggcacagcggcgctcaccaaaccacatttattgcggaatggacaagcgcgccacgccgcatttaatgcagcacggcgcacgcatatccggtccgtgaccggtcgcaatgtgtgaccggtcacagaccggtcagatcgcgagttacgtggcagcaggcggcctgtcacacgcctcgccccgtcccgtcggaatgatgagagcctcttggcactcgtcccgagctggagccggcgtggtaactcctggagttagcacgtcagtcccgactcgattcatgccaggcttcatcgcaaccgttgcaaggaagtcactgtatgaagaggggcagatgtgcggcatgctaaactgacgcgtggtggagaagaatgaccggtctgtgactggactaacgccggtcacgtcatcggcagacaaccgtgctcccacgttgcatctgcttccggtggagtggaggtaagtatgacccatcccatcggagggtcattcagacagcggccattgaagatctcctcccattaatgaagaaatgatagggtgatcccctgtgtccgacgagtgacggcgctgggcatcactcaaggacaagcggtgatttagcttccaggcggaggcgcgagtcaagatttggtcaagatagggtgggtccccacccaaaagaagagtaggtagaagaagtgcatgtggtatccccttgagatataaaaggaggacattgcccacctaaaagggggggaggggagggagggtgaaaaaagaaccagaagagaaggaaaaagaggggttctagagcttgaactctcttgctctccatttgctctgtaactccttcacacacagattcaccagaacacaggagtagggtattacgcttctcagcggcccgaacctatatacatcgcccatgtcttgtgcatttgctctctcgcgaacgttccacagatcgagggtgaagaacctcactcagcgcccccggccgaaccggcaaaggggggcctgcgcggtctcccggtgaggagccccacgctccgtcaactagatatcttaaacgtcctagatttgccgcgagctcagccgatccacgccatcgaattttgcataagagcatcctcaatgttttagatcaactgagccataagatgagacccacattcttatattgttttatctatagtacatgctacaatgtatgtggtagcttcttgaccttaaggtgggacccattgagtaaaaagacacatatttactcaagattgaaagtgtgcatgcatgttgcaaagccatgatatatttttttaattcttatggctagccttaagcttaaggttgcacatagcactattctctccctagctcatctcccaatgtacaaaggtacaacaaaaattactactttattccttaaggttagtttccatgcacattatggttgccctaaaatccctcgttattttagtatttctgattgagtccacctgatcagagccgttgtttcccacgtgtggacaaaatctggccgttcgtatacgtccttacctggtcgtagaatcgacgagcgctcccctccccacgtcgccctccccgatcccctttcgctcccccttccgatcggcgatttggcggcggcgttggagccgtcaccggtttccccgctccccccttcttctcccttccctcacggcggcgtcggggcggatggcgcgttcgagctgacgccgatgtcttccctccccttttttctccctctcctctccctcctacctcaccttgtggcagcaccgccgagggcaggacgggcgaggcgcccgtcggagccggcacaggtgctcccttcctccttctcccttcacttgtgccggcggcggcggttgcgacgagggaggacagatgcggcgcccgtcgttgctgttgtcgccgtgtcccctcccttcttctccctccccttctgtcagcggcggcagccttctccgttcgtctctctcctatccgtctcccagcgtcgtcgtcctccggccaccgccgtcctctgccagcacctcctccggccccctccactctgcccatccgctccactcttccctcctacccaaatctacggcgccgctccgtggtcggcagctcaattcctcgccggatctgacagtttgaccggtggagaaagaagaagcgggcggcccgcgaggatggaggaagcggattggcagaagttggccgttgagatctccatcaaacctgtccccttcaagcatccgggtccgacgtcctctgcgcatggtctgtgacagcttggtataatgaagaattagaaaggattcagttctctccttcctgttctattctttcagcaatggtttaggtcaacacaaaaaatttggtcgagttaagcaacaaaggttcagggcctgttcactttgatgccattttcaaccttaccaaattttggtaacttatataagaaatcttgccagttgccaaaattttggcatagttgccaaaatttcggcaatgtcaaaatttggtaaggatttttttggcatcaaagtgaacatgccctcagttcttatccttccagttctccttttgtcttgaatgttcttgaagaagctataagtggaacagatacattgagatcactcccagttggatcatcagcaccaggaaaggttccgccactaccagttttatgatcttgtttataatgggatggctaccacatatatttttctatttataggctgacaagaagtgtgctcttttttatggtgtaacaataagtgaagaacaagctcggtcaggcattgtagtcagagtcaactcagccgcacaaagtgaatttaaggtatgatgttgattattccttcggttgctctggaattgaagcttttatgttctgcatctcttttgaattttggaatattatttataattctctcaattgccaaatatttatctacagctacttttcttcgaacaagaatttgatggaggttatggactagctctgcaggtacttttgagtttcatggttgatgtgttctgtggttttgtaatcatttgccatggattaccacatgccaatcttttatgttttttatgaatgaatagtggaaagactggaggagtctcaaaataacttaaagggaaattgaatttgtcatcaccatcacaagtctatttttcaatagaaacttaaagatgtagatgtgctaaagcaaatgcgaccattagcctgtcacctccaaagcaactaatcctgacctcctgtcatcaactgacaaccctcctccctgtaacaatcatgaaaagagctgtgcctgtgcaaagctcgaattccagctgaacttggcaaacttgagctttttgaactgtaaaaaattttatcgcgtctaagaattatgttgtatgctttatttttattctgtgcaattgttgaccaaattttgcatatagaaatcttgccaacaacaatcttcaaggtcctattcctgcaaacatgttcttgcactgctctaaacaaatttagcctgttgtgatgcaattctttgttctgaaacagagtgaaacacaaattcatctaaaaccagcataaaaaaggaatttcattaagtccatgcatgtttcctacattcataaagaaaaagcagggttgattttctttagaatggatacaacctacgttgattgtattacataagtttcaaaattgcaaacactactttcaggcatccaagctgaggtgaatcacatgagacaaaatggcagtcttgctttcaatgaaagccttgttgctggtatatttcttcattttgccggtgcaagacccacactggtcttccagaccacggaatggtagtgcatcaatagggctgcagcagggtgacacaccagcaccacggttattggattcaggagttgccaaggagcagcaattaaatgattagcttccacctttaattttgctggcaggtagtctgtcaagggcttcttttttccaattatggcaatgtagctattcttatcaattcctcccctttctgctattgcctggttgtgcaggtacctagattcaatgcaagggtcagggtgttatcccaggcttcatggacaactccgtcgccttgaggaaataagcctcctccgtccctccatatgtatttcctcctctgctctgtactgctttgctctgcctcatgcttgctgtcatgtggatgtgctgctgctgaccaatactagcttattgaagttttccctttttgttcatgccgttgcattgcctctgaatcttaccttttttgcggggcctctgaatcttacttacttttcagtgctatatacagattcagttacaagacacatagtccctggagatgaaacaaggtgtttagtgcgtattacattaccagttaggatttacatagcatcattcacacctgattagcataagttccagataatattttattatcccctttgatgtttaagatggttgcctcttcagtatcacatctggatccatagcaatttcatttctatcgctttacttctccgtgcagggaaaatagactgcaccaagcatcagttaaggtacattcagcataagagagttaagcccgctacctagccgaaaaaaccgaaggtggggctctttgttgccaacatattgtgactgctttcgattttggtgcagtagttttggttagtgactattatatcattttttcttaaaataaggtcccacattatggctaggtgttgccgcgagggctgtgaatgttctttacttctgattaaagtgaagtatttgtgtaggtgatgacaaaagctacaattattcagggctgtcattctctcctgtaggtgatctattatgcaatttactatttgctgtaatgttacagtgtcactgctctcactctgcttttgaaagcaatatgtcaataatggattacataaggaaaggtttattgcatctgtcagctaacatttcttacggtgttagggcccttttgattcttaggagtggcaaagaattttatgggattcaaattccaacatatttttcttcctatgtttccctttggcttataggactatgttcctatgcttcactttcatgggaaaaataccaagaggtataacctctttgtaaattttcctttgtttttcctatggcactatcgaagggctcctattatcttttcctgtgtttttattcctgtagaattaaagaagcacaccacttttattcctgggtttttcctattcgtgtgctttgcctatcctgtgaatcaaaggggctttaagatgctatgccgctatgccataagccacccttacttgtgttatgacctactacttcctactagcagtacatttttgtatccatatggatcttttcttcatgatggttgtctctacttaaagctatgcattattcatacatgaagattaagtgaaaaacaagccactcccaacttaacttttgtttgatggatatgctagatagaaacctaggtgtatgttcttggtctcttaggtcattgtgtcacacaatgttgtttgttgatgagctccctatatatattgttaggtcaattatgttgcccaacaagttttttgtgctaatgtgaggttactaggctcaacagtccttagatatacggattcggtttggttatggtgacagttcggttttggatgattggattgttttattttttcataagcccaacaatatgatataaaataatgttatttaatatgtgaagattagtggccatacagaaacgcgtgccaaaacaacatattttctaaaactgaattgtcctcctatgaattacattcaatttctcttccttacacgtggggttttatgtgtgctcagtgactaccccgtagcaaggtatacttgctgatccatatgtatctttgctaaacagtactatgtatggtggtttaattttaatggttgcaaatcttggtttccctgtaagtagctagctagcatgatttttttttcagtcatagtttactcttttaacgggcaacttgtttataaacaaacagctcacgggatgttggccttatgtcattctagagcacttttcagagtttaatatgacacaaaggctttccaaacgatggcgatgcctacggataatcattttcctgctgctcttacatatttatatatattatatattcttttatttacttatttattttgactgataagagctggagactgctatatttcataatgaatattcttcttttatgtttaatccacttagtttggtgctcccactcttcagtcggtgctgctttataacgaaactattatgtgcattatatcgtccgacataagtataaccatttcatgtttgcaggaccaaagctgccattcatactgctgtgcttttgttgtggattgaactagcaggagagaagaatacacatgaacttataaatggaccatttcctgtaggcagctactttatttgtcctgtatattagtgtgttgttttttaatcaatgtaaatgatcactgacggagtacatgtatatgcattaatcacctaatcgttctgtaatattttctgtttaattttttttgctgcgcgccgtagcgcgcaaaccctttctagtactctaaaaaaaagggcaataatagttaatccgtcacccttaatgtactttaatattacaaattagtggtccatctatatatgattctctcttgttttattttgataaacaagtttactgtgcaaagatattcacaaatgtgaaaatgttcaaaaaacgtcagaattaacttgtttcaagcaatattcgagcacacaggcttttttttttatctgtagtgaagcactgatatttgccccttttttttccttaaggactatagaggaaaacttcgacctaacttgattggagagtttttccaacgatggatacttggatagggagctagttgcttatccacaggagcctttgtctatgcgtgaatccagttctgtagtcaaagaacagcgcacgcgaagtgcttatttctgtagtcaaagaacagcgcacgcgaagttcataagcacgttgcacgcaatgtatgaagaaatgggctatattcatggaagaaaagatgaccattaatgtgtcgtttgcaagaagcgtacagggtgaattgtcactcgaatttaaagctcgcattggcaggtcaattactacagtaagctagaggtgcctctctcgttcttcaccgtagattcacatatgtacaacagtgattggcatgacacataattatatcaagacctaggatgtttagcttccaaaacaaaaatttttacgttgtatatacatagagtattaaatgtaggaaaaaaaacaaattacacaaattgcgtgtaaattacgagacgaatcttttaaacctaattctgtcatgattttataatatggtgctacattaaacattttctaatgacagaataattaggcttaataaattcgtctcgtagtttcctggcggaatctgtaattttattttgttattagactacctttaatacttcaaatgtgtccatatatccgatgtgacaatcaaacccaaaagttttccccaactaaacaaggccctataataaattcattcatattatataggtgtttttacctctaaattaagaagtgcacctgaccacgtggaactatatatacagtaacctgtattgactctaaggcttacattaccgtcggtaaccacgcagtgaccgtccttaccgcggaggtacggtaatagaaataccgcggtaacctccttaaatttaaataaattaaaaaataatttaaatttttgataaattttgcatgatttttcacggttaccgtgcggtagccgtgcttaccgccggggcgcggtaactcggccccagcggtttgggaaaccctgattgactccacatgattgtcaaacattgtgaatccggccgtatacaccaacaatataatactatgattgtcgaaatgaaacatatacgtttaaaaccatgcttgtaaagaaatctatctttatgatgttatgttttagaaagtttgaactatttccctgaacatgcagaatgtgacctttcaaacatgaatgccactcctaatgtgcctgggttttacaatatcatgcgattacttctcttagttttttagatctctttctgttagtaatttcttggtttttagtaaccatgatattgttgagtagggtaacccctccccaaaagataagggaaccctagttgtgttagcatgttctcgtgtatagagtttgttccataaaattgaaagcgtaaaatttatgtcaagtaataacttacatgtaagatgtacatacacaccacatgtaaccgcgaataatccttagcacatgtttaaagaaacggagtctagcggtaaatccttgactaaatattttcatgttcatattttctctgtttcataatgtaagtcattctagtattacctacatacatacatatagatgttaatgaatctagacaaagacatatgtcttgattcattaacatatatatgaatgtgtacaatgctagaatgacttatattatgaaacggagggtgtatatcttaagtcatgacaaggatccattttgatgcttgtactctggcaactcgaacctccattggaaaacaacactatccaatactgcgtaccaagcaatgaaaaacgtaacttagtcgagtgacactttgtagagaaaaaaatatcaagataatataaaaccatttttgttgcattttcattccgacaatttgttgtgaaatatccacagtggaccagctacctataagatgtttaacaattgctacatctattgattttcaccgagacgcctataaattgggtgcccgattttttttaaaaaaataaaaaatcaggcactattttactaagtagaccgaaaatgtttcactaagtagattaaaaatattttaatcttgtaaaagactgaaatacaaccaaatcacctcatgaaacattttgctacaacgtatgaaacaacggtttctaaaaaaataggcgttgttttaccctatataaaaacaatgtttcagcaaatagtgaaagaatgtttcaattttttaaaaaagtgaaatacagtcagatcgctagatgaaacaatttggttcaacgtatgcaacaaacgatttaaagccatttcaacacttaaaccctgtgtacatcaataaccatgtgtccatcaagatgaaattattaaaacattataaaaaatccactgcaacatttcatccatacatagtgaaacatcgcgagtacactagctgaaacattgtcggtggaaaaaaaatgaaatggatcccccctaataggatgtttctgttatatccgggcagatgttgcaacggagcgcgcgtggtggaagcaacacgcgcgcgcgggaggcgtccgagctataaaactaatatcgcgtaaaagcatttgaaatataaaataagagtacaatttttttacacacacatgtacttgtgaatgtaagtaattatcggttatcctttaaaattagataatctaagaaatgtcattgacaaatgtcaaaatacaagaaatgccatcgtatgaataattttgtcccaaaaatgccattgccgttagggttcctctatcccatgctgttaagtgatataggatgaacaatatatttaacgacacgagatgtgcggaactctaacgacgatgttatttttagaataaagtcgttcgtacgatggcaaactcacgcttgtcgatgatatttcttaaatttggacgcttgttaatgacatttcttaaattgtctcttaaaattaaaatgctctctacaaaattccacggaggcacagagcgagacgacaaccatgacattttagcgagttcagtccatcaaacaaaaaaaaaaagaaaagacaaacaccgtttactcctgaaaaagcccaaaaggccgaaacccacaagcccagtaggccactttccgatatttccgcgtcccccacgagttccattcccagttcccaactcccatcaaccatccttctcgactccactgaccaaacaccccagcggaccaaatcgccgcagcagggcgcgccatggagccggcggcggagaagagggaggccgagcaggaggagctgcagcagcagcacgacgagcccgccgtcccttccgccgacgacgacgaggctgaggcggaggagaacgagcgccgcaaccgcgagctcaaggccggcttccatccccttagggtaagtactcctccgccgccgctagatccagcttctatttccctcccggaaagaggaaaagttgtttctccagcgcgcctggaggttgagatcgagtagatagatgtatgtaagtaacccgtgttcctttgttttttttttacctgtgcacccgcagcgtagattcgtgctatggtacacgcgccggactcctggggcgaggtcgcagtcctacgaggacaacatcaagaagatcgtcgacttcagcactgtacgtcaccgcgaatttcttttggtggggattctctaatttcagggctgcagattggattgctgatgctgtttgggtgtcctgtatgtaggttgagtcgttctgggtttgctactgccacctcacgcggccggttagcctgccgagccccaccgacctgcatcttttcaaggagggcatccggcccctctgggaggtactcctcagtagtcagtaaaccgtgttgttctatgtggttgtgttttgtttagagttatctctgttatgcttctagttgttgacggagtttggttgagcaggatcccgcaaataggagcggtggcaagtggatcataaggtttaagaagaccgtctctggtcgtttctgggaggatttggtaaatacatctgcactttactgtatatgcattcgggttctcaggagactagtaatttagtaagtgcatgtctgtggtgacagatgcgaaataatataccgatatatacagtagtgaaatagttatccacatgttttgaaaactatatagatgacagcatgagattagccaaaacacacacacatggatagggttatttttcctacaaaaatatgctgcaattatctcatgcatatccacagatatctatgttatagtcacagaatgttttgatgggggatgggtgtggaacatgccatcattgcccaactcttttccgaggagtgaaaagatgactcttaggattgatcatgtgcaagcttatttgtaagcacctacgtatcaccgcattacaatgacgctgcttaatttatgcaattttgaagtggcctagttctacaaacctaatattgcttggtttacaaatataaagtatctgtcttttaccatgccaacttcacatggctacaatgccaatgcatgatgagcaataaggccatggcataaaaatcataggatggccatgcaatgggcccatatatcctgtagcaggccaaaccttaaatcaaatagccctaaatgacacaagaggttgtgctggtactgtttgttcatgtcaatattgtgacattgcattgtttccatgttccaagacatgatattttagcttggaagatgtgtttgccacattgggttttagccatacttttttctgtcactatttcagttgccatgcctgctcagcattggtaccacattcacgctgcctttttcttttgttccattctcattttcatttgttccttttcttttcctgctattctgttctatctattgttcctccttgatctccgttgttgtgatggtcaatttggtgtattctgaaatcattaagggcccatttgaatcactagaatgaaaaaaaaaggaggaataggaaaaacataggatttggacaggaatacaagtgtaaaacagaggattgcaaaacacaggaaaaatataggaatgaccgtttgattggatcgcaggaaa

SEQ ID NO: 9038 - DNA, 33991 bp, Oryza sativa
  unsure (1)..(33991): unsure at all n locations
tcctcctcgggctcctcccacggcgacgagaacgccgtgccgccggggccattagatccatgaacttcggcgacgcgaacgcgtccagctccgtccacagctcatggtccccctccagcggcggcgagcaaacgttggccgcggcagacgacgacgacgacggcgtcgtcgcgtggtccagcacgtcaccgccgccggagcttcccagcgtggacagcgaggtcgctcccgacgtcggcgtcgacgacatcgcctcggcgctgcacgagcagctttcgtcgacgacgacggcggcggcggcggcgtcgaatgcccccgccgcggcggccgcgacgcgctggatggacctcggcgacatgtcgcccgccgccgagtccgtgcccccccggtggatgtcgaggcggcggcgagacgaggcggaggaggggaagttgaggacggcgtcggagcccttgaggcagagcagcgcggcgtcgtaggcgcgcgccgcggcctccggcgtggcgtaggagcccagccagatccgccgcttctggtgcggcgccctgatctccgacacccacgacccccagctccgcatcctcacccccttgtacggcctcaccgccaacgccgctgccgccgccgtcgtcaccttcccatcacctccgccgccgctgcacgacgccgcgccaccgcctaagccggccgccgccgtcgcgccggcagcagcaatgcacttgttgctcgtgttcttcaccatggccgcgcgcgcgccgtgtcgaggtgctcagtgcgcagtgctcgctaactccagtagtgtcgcgtaagcaaagccgcgggttatttatagcgggcgatcagccgatcactcgagttgagtcccagcgcacgcaaagggcaggagcacgtcgtcgtgtggaaagggtttcgagttagagccaacccaaacccaagctatctatctctatcgctcgcctttccatttggacgcgctcgctttaacaaagcgggagtactaccactacccttgtagtgttctcgcttcgtaaggatttgccgaaattttcaaaggatttttcaaacggacaaggctggctagatcgcacaccagctcggacaaatctgtacctgtactagaatttctagctcgtactctcgaactctaatgtatccaatgtacgtacttgtactaagaagagctcggggtctttaactgttactgactacttggctcctcttcgacgtactcgttgtattgccgatcgattggacgaatttgccatcggcttattactacatgagaagctagctggagaatggagatagatcatggcgatggcatgggagaacgggagctgcctgcctgcctgacgaagtttcagaggttgcagcgctaattgtcgcgagagaaatgggacttccacaagcatgcacgggctgccgaacctgcctgatgctgtcggaaaactaataatggagatgcaggggaaaagcatatataaaaccatctgaaagatttggctgccgcgctcgtgaaatcagaaactagtactaacaaggaaagcatagaaaaagttactaccgtgtttgctttccatttcacgaagaatgtaccagtaataccgttttattatgagcatatccattaattaactgcagtagaacaagtaattaacattaacctccatctcagttgaccaatctagcccatacagtaatgtattgttcaacaaatctagcccatagtaatgtattgtcctgtacgtatcactgacatgattgatcatcacctgatgaaagcatgcacaaccatataaaattcagtaaaagcgacccacaaaagtgtttcatcagtcgtctcacccaagcaacgaattagcaaatccgggagagaattcacatgatcagcgggacccaagagagagtagcgcgcaacaatacctagctgatgacacggcgatgatcgatcgattgcctctagattagtagtagcagattaaaatacatatctcggtgtaaagagaccgcgagatcgagcaatactgcagaggtaagctctgcacccacggcaagtgatcaggacgataatgggccacttaatattccctattaggcatcgtctcatgttcaatcatgtggtggcatttgcaggggcagggcgcatcaatcgatccaaggttttgagttccagaaaataaaaactgatgtaaggtttttgtgggtaatatatactccctccgtttcaaaatgtttgacaccgttgactttttagtacgtgtttgaccattcgttttattcaaaaaatttaagtaattatttattattttcatatatagttttatatattttcgtgttaaatatactttcatgtacatatatagttttatatatttcacaattcttttttaaataagacgaacggtcaaacacgtgctaaaaaatcaacggtgtcaaacattttgaaacggatggagtatatatatagtgccaaaaactgatactgcgagatcgcttcagaaaacgtgggggtaaccactaccctctccctccccgtgcatcaaccgctatatggcatcgacttttctggactacatacagtactgaagatgtatacgtgcacacaccatactcatacaacgtcgagcgagcgagtcatatatatcatagtaggctatgtttagttcagcgtaaagtttggattttggttaaattagagatgatgtgactaaaaagttatgtgtgtatgacaggttgatgtgatggaaaatgactgaagtttggatccaaactttagatctaaacacagccgtagtacacaccatgaagcctgtattttgattgattgcctatcaaggccactagctactggttggtacttgtagacttctccagccacttcgtgcgtacattaatttgagcggaatttgaggtaagctcttttaacggaagaagacttgagcagtgagtactatcagcgcaggtataatagagtacgataagctgacgacacaagcatccacgtcatagaaatcataggtggaagagagagaaaaccgaagagagaaggcagcgggcgctaatgcaatcgccgagctccatcacaggaaacgatgcaagtcctgagaaccagcccttagtcctagcttttgctcaatgacttaaccattgctacatcaaagattgggtagaaggaaacaagtctcattaaaaaataaaaatcaactgcttagggatgtgtgggtaggtaacttagcaggtagttattatacgtatcatctattagtaccatctattacttacgtgtataaattttcagcccatcaacaaacgatactattaaacttgctctcaagatacattaacctcaaaacaaacaaaatactagtgtgtgtttgcagctagcagcagctatcattcttcttttatatacgtacgttgctggtgggtttcaccattctttccatctttccatttactgtaagccccgtttgacttaggtgaaaaattaagattaagcaaggatacataaaatgagaaagccattaatatatgattaattgaattttaattattataaacttgaaaagtggatttatttaatattttagaatttaatattttagagtaacttctacataaaatagatttatttattattttacacgaaatacaccggttagacgtttaaaaagcgtgctaacgaaaatcggaatagaatatgcatctcaaacagtcaatttgattctccttatgagtttctgtatgactgccatgcactgaagctgatatttgttttttctgaatgaacaggaaaactgtccgttatattgattgattaagcggagaataatcaaaagacacctcaacaccatacccaaagtgaagctgaaattgaaaagctcccccttttatttctggatcactgggtgccaatcagttttgttttccagctttaattctcccatcatcatctcaggaaaaagaattaatatcagaaaacacataccagtgggctcacattacgtgtgtttctgtacacggagagagagagaaaaaaaggacgaaatatatagcagcaacagcaaaacagatggctaaaaattccttttccaccacgtttgcacatgcatacggtgatgggctagcctttagctatagttagttcccgtcatccgtccatggcttggcacggaaggaagcagacaggccaagtgcagcatcgatcgagtataccggccttttaggctgcgttcttatcacagtttttccaactcatctccctcgttttccgcgtgcacgctttttaaacaactaaacggtgcttttttttacaaaaagtttctatacgaaagttgtttaaaaaatcatattgatccatttttgaaaaaaataaatagctaatacttaattaatcatgtgttaatgaactactctgttttctatacctataaagagtgttcccaacaaggagcagccaacacacccttaatgggttcagtttcagcttcatctcatctccttttgtctttccggctttccccaaaggaagccatctagatcaagctttagcatgtgcccatggctggctgcaatgcaagtgcaggtgcagcctactacaagctcgatcaccccagagagaccaaaccagcagtggctggattttggatgtccagtagtaggctttctttttgggagctagctaggggatgtccaacagctgagatgagtcagatttgaccagaagaagagacatcttaatttggcgatcctggaaaagcctacgcgtccaaggagctgtaaaatcccatcgctgggctgggccaagtggcctgcgcctcttttgcggtggcgccgagtggcgaccacgctacacaccgtgcggactctgactaccgcctacgtggggaaagaggcaggcgtgccgcgtgcagcgtggtgctccatctgctgcagggggaagggaaggcgcgcggccgcgactcgtctcgcggcgcggggactcgcgtgccaactttgaaatgggccttgagatggggtgggctttttgacaggcggatgtcatataggccttgtagcgtaagcgcaccgcaaaggcccaattcagccacgcacgtctttggtcgctactatgagaggcctgctggcctggtgccccgacgacctgcttacctccgtcagaagttttgacaatgaaaaatggaaacttgtggttcgcttgaggtctcttggtttgtcgatgagtttcaaaattgttcctgaatcaaaatatcggatataataatattataaaattagatcacactgggttccaaggcaatattgctcctggttttaggtgattcatcgtcagtgtgggaaccacatgtcagggtatttcagtctaaaaaataaataaaagttgatggaccccatatgccaatgacacaaactctcctccttctccctctgtttctctcccctccctgatgcgaagagaggtagccatggcgggagcggatgaggccgggagtggaggaggcctgcgacgatgaggcgggagcgggtggtcgacgacgtcccacatcagcagcaccgcgccctcaccgacgacgtggacactagcagcatgtccgggagggagcgcgagagctcgcggagcggttggcgaatgctaatggacgaggccaaagagtcaaagaggccatcgatgcccataaggcggaggcgccctgtggtcctggaggcgccgttgacacaacaacaggggcggggtgcggcgaagcaggtctgcggcacggcgaagaggtgcgcggcaacgacaaactagttggtgggtatggcggcgggcaacaatgcggcgctcgaagaagttgcccgtgaggctggagtagccatggacgccatagatcggggcctcttgcttagctagcgggcgacaccgtatcaactgctcgatctatgtgtccaggctgtcgcatccctcgctgtcattcccgtcgcctcggcatcctctcccaggccatgcccacttacatctgacagtttttcttggacatagactgccctcacagaccaacacaagtattttttgcacacttcctcactcgtgtgcaccagggaagaatttcccggtcggtcacccatcccgaaattgctccaggccaagcacgtttagccttagagttctttggagattggcttttgtaaaagaagttgcaacttgtttgtatgagtattttattaattctattaagccccgggccaggatgtcacaggatgtgtgcaggtcgagcggctcagcatcggtgacatccagcgcctcgagtggaaagcactagaggccaagatccagtgcgagatacacgtggccccgtggtgtcttcactagcgagcgctaccaccagccgccacccttcttggttctccccgcccatcatcggccaccctggacgcttggattgagtgggaagagaggggatcaaggtggaagaagaataaggtgctgacatgtggggtccacatggattccacgctgactcaaccgccacgtcaaccagaattgagagcaatactgccttgggatctaatgtgacctagttttgcaagagttatatatggtattcagattcagggacgattttgaaactcgacgacaagaaaaatggcctcaagtgaactttttccaaaacttgtagaggcatctctgatctctctgtaaaaaaaggaactggaggccgttatgatgactttctacaagacaatggcccagtgtaaactcttcaattctatagataaaatgtttatattgattttacaaatagagacttggatattatatttatgaatgtattttatatttgtcttatattttttttgacttatatttagtgccccagtttatattatgtttgcattatttccatcatctagttgaatatagagattgggtttatctcatttttttttaaaaaaaattcatcatatcgttattggtacccttaaattttagtcttgcgttcgtcgctggcaatgatattacaaacctgttaacccaccaaattatgctgaagtactgaagtgctctcaataaacaactcagaaatttcgattctatctcaactgagcatattatctaaaaaaaaaaaaatctcagctgagcatagctaaacatatggcacatggccaaaaactgtgtttctgcttcactgtgtctacacgtgtgatcgcatcttaccatgctgcctggcacgatgtgaacagggaaaagatcaaaggagtttggtatcttggcacttttaaatcggaccgggaaatttgaattatattatgaattgtactggtcatgttaagaaattaagaaacgctcccatgtagcttgatgttagttggaggacgagcacagggttgttggcatgtcgtcaagtgaggcttaaaacaatttaacttgccattaacatatgcttgtttcctcacgaagcagcatgcaacatcagcagtgtagtggctacaaatttccaactactcctgctcaactattggagctagccagactcaatggcctgtctttggttatataatataccatttattaaactgctgacgagcaagaatctcttgtgtcataaatcgaaacatacaagctaaagcactcgttaactattcctgatgatatatagtttttttactgttcgtggcgttgtactggtatgctacttggcttcacattgtttaagatcattataaatgtggtttgattcttaaaatgctttctgatggtactgcttgcttgaactccttgtgcctaatagctttgggtttggaaaactattgcgtcatttgtggcttccttagagaaaacacttgatgggactatgcatcttccaccaactttgtgagttgtgaaacacattgcctggtgttataaatgcagtcgctttggtgcaaacattctgaaggaagcatcttatggtagatgaaatgcaacgcagaaaaaaaaatctgaaaaccgaaatgcttccaatgggtaagttgcaattgatttcttttcgaatttctcagatctagcaagcatctattcatatttttcagtccagatgagagttgtacttaagtttctagaaggaatcatcagaaacattaatctgaccggcttgaccttaaacctgccattgccatacttgtactcctagtacttctatggactctgaaacctggagttcctttcttatgcaaaataaagttcttctaatatgctactcactctagtttgtaaacacttatcgtttggataagacttatattaaacttttagactttggactatgaacgattttttaatatctactcgagaaacatagagaccataagtatatttaatcttaaaaaacacttcaataaaataatgtattattgataattttatatattatcataaaaatattggtcaaattaattttttaaaaccgtctttttttaaaaaaaaagataaatatttgtaaactagagggagtattgttgtaagctggtaatcaatggcatctttccagctgcttcaagtcagctagtttaaacattaagtgctttgcttcttaattggcttccaaggttccaactacaaccaccattttcgtcgtgatggagacctaaaccaaaacctaatgaatgaagacgggctatagctccagaagagttttgagtacagacactcgggcactttttggtgacgagcttgttgcgcatgctgctgcaggaaagtccaagaactcttcccaatataatacaaatatacaatacaatatacattgcttccaactattgatgatggagggattaaaaacaggtccatgattggtgattagggccccagaccaaacctaatgtctaaactaatgaggccttgtactacattgcatgatatcaacgttgagattccgttcggaaaaccgtccagatttgtgaaatgtgtgttcataggctctgtactttgaccaggaagaagtttaagatgagtagaaccagatcaagggtactgtttatggccttatcaaaactggccatcttagctgcctttgtgtccagtaatcactaatcagtagtggaaggcatgccaatgtctgaatcctgcattcaatttttaggtatgagacacgtgtagagaacagttggtgccgtttctgatcatgcttctaggctctaacattgtttgaatcagctctgcaaattggaatctaaggaagatgcaagcaatactggacaatagattagaaccgaggaagctacacatgctaaaccccataggtcgagacttgagagatattccctcgttctaaaatatagctagttctaataacatcttaattttatatataaaaaacatctatttctaaagtaccaaggggtatttagttgtacaattcaaaaatgtggttttgggggagggggggggggatttagttatgaatgtccaaaataccctcatccccaaaaccccacttaattaccaatcaaaacagtcaatgaaggataatctagcaattttatatttcttcttaatctccgttgaaaaccctgtaatttttttcgaggcagaaatagctatgctttaaagcaactacaatgtggaaaaaaaaaccagataacaagcatttaatgcaagcttactacccagtattaaactagtaatcattgtgggaagaggtagtagttactacctggtgtttgcgctattgccggcaacaaccaaataaaatatgaagattcttactggaccaaggtaaaggagggttgggatggatgaatattttttaagtggaccctaccttgtttaccactatactccatataagctttgtaagaagtgttacatcttactgcctcctgatcatgggacccaccttactatctactctttttgtcccaaaaaaaagtcaatcttagtatggatgggacacttcctaggacaacatgtccaaattcgttattctatgttttatctatgctaaggttggttttttaggacggaggaagtacttgagtaatatacattgagcatgccctaagacttagcgaatataataaagatgttgagtaaatcagacagagcccattgttttgctaggtcgcttccccaaaccacaaccaatcatgcagcttgcttactgaaccatcggccatcacgcaacatcactagaacttgaaaagaaaacattttatctgcggctggatgtgtacttcatgcgaataactaaccttgtgatgatggcaccgtccagcatgttaacgttatcaccatttgattctttgattaacttaaacatccaggccacgacaaaaccccactttattgcagtcgtacaagagaattagctgggttgttagtgcgtatatattgcattacgggaagcaacaaagggtgatgtaataaggaggttatgcctaagcatatgcctaaagtttatactaggaatataccggggttttgggatgcattgttcagaagagacagaagaagggttcagtcttcagcagttcagcagcgtgggcgatcatgcatgtttgtgaactgggagctatctgaaaacttttcttgttattgtagtgccgtcaggttggccgaccgagctggaagtggaactgggtctcgagccaactgggcaagtggcagggttatgacttatgaactgtaacatgccttgttcttcaaatcaagtagtttggggactctatccggttttttgtttaagaaaacataaaggattgaatagttaatagtgatctcaacaatgtatggagcaactcagcaacagcaatatggagtttattaaatcgaccataaaacgacttgtttaactatagaaattcatgatgacaaggagatactgctctaactagcggtttttttacccacttttgtgcagagctagtttataatgtagaattaaattacatattccgttcataaatacaattacattttgtccataactatatcggtctagttacaccattataatctaggtccaccacgatcaaatggtgagtttattttctttttttctctaattaacatgataatttctgtgtttttataacaaatatgacaagtcttttttgccatttcttaggctcttttaaaatacaggattgtacatgaattagttcaatttttccggaaatcctctaaattccttcattccataggagatctttataattatacaatacaataggttcctttggattttcctgagtacttctcttttggaaatttccatgtatctaaaatcattagagctagaagctcattgcaccagccaatcagctctgtggaagccatttggacaccatcaaaggccaatcctgtttcactttttttttttccaaatggttcatagaaatatgagaaaatggtaactccacgctctaatattgaaaagttttgactttcagcgccggccttggcaacaaagctaagcaacctgatgggtgctaacacaagttgcctataagtaagctacatttaagttgagattgtgtgctatttatatgttagagagtacaagttactgttggccatctctctcggcacatttctacccctagcctttagcaacactgaccatagtcagccagttcagagcttcagatagcaccagccgatacattttcttcaggaaaaaaaaaatctccaatggtttgctgatcggttcactgggaaattctaatttagtcctacaccccacaagacgacggtcaaataagcggccacaggaagactatcataaaaccagttaacatcatcaaattaaatagatttgtttcaggagcttagtcagacgagtagaagcggccaagaacaccgggcatttctttactgattgccaaccagctgcaggttaacaattcacagttgcatcggcgaccgaagcaaccgcaacaggacagcgtcacgcttttcggcgagccgatcgatcactcgctcgcaataattgctagcttccgtagaagggggactcgctcccgaccagtacgtctcgccggcggccggtcgctgtcgccggccggcgagccaatcgccatacgaggattgccaagtgataccgtgagctctgcaggaaacgtaaaatttttatctcatcagttcttgctgcactcaagctaagctatcctgccgccttgtcatagtatatgttagggactaaaaatcattatcttttttttttcaacgtaggtgtgtcggtcgatggcctaggtgtgtactcggtcgtcgtcgtgagtacggacggcgacggccggagcaatttgccgtttaaccactggcctctcatgcggctctggccatgcatggaggtagccacatgtcagtagggtcgagttaatggcagagaattttttttcatctcgtttttcagatttggcttcgtggagaggtgccagtggctaattactagctagactgccggccagtacttggctctttcccatgatccatggaattcaagtattaagttagttacttggtgttttggcatattattgtactagatagatcattccaaattaagtatgggtgatggcaagtgaaaaaacatatgatatgccaacatggagggcggtatgctctaggtagatttgcatgctccaattgtcttgggcaagttgcttgggaaacaaaaaaaattagtgcagagacacatcaataattgcttacgagtgagtagtatttagtgattagtatgccataataagaaagtgttccatggccccagcaagttggaggtcaagttgtcaaattgaagttagccgaatgcaaacacaagagagtatctgtttcctccggaaaggtgaagggctcagtgttaattaagagtaaaaaaaaaaatgaagagcgcaggtgaaagattttgcacaaattgtcaaaaccttaaaatttgatcaaatattgcccaaaactcaaatatttatgattggatggaattaacacctaataataatggaggaaattcaaccttgattccttgaacataccacgtctaagaaagaaaaaaaaagaagatggttagtagaataatattttgaaatggttaaaaaaatccatcagcatttatatatagcaaccttctctcttctttcgattacatgagaaatgcacgtaaacacacactgctagtatatcctattactacatgctaaacataaggaaaccataagctcatacttcatacaataggtacatatatgaaaacagtccacagctatgtttgaaaatgggataggctgttggcaaactttgataggaaagagaaaaaagcgtaataataaaaccatatatttttagagattttcaatgatccacttatttccctcaatttattttttgaaaagtctaacttatgtttatttagttggctcatcaagttaatgtgttatccttaatattccatccatcaggtgagacgtgactaggaacaaattagtgctcacttacaaagcttcactactcaagtttggttgggagaatcttcttggttcaattgtaacctacaactcaccactgcacagatgcaaccaaaaaccatgtgagacaagccattgcttctgtccaacattaaagacaagaacgagagggtatcatggaaggaacaaaaacaacgtaaaaactaataaattaatgcatagtgatgccaaaacctggctaaaccgcacgaacagtccgatgttgacagaatggttatccctcctatagcaatctaggatgtgataagtaagactcatcctatgagtacgaattagaatatactcaaagctcttgaacatactcaaagctccaaaataagccaaacggcttatttacaaaaaaataataatttatgaataaaacttttatatacgtgttcttagcgatttaaaatcaaaggctggaaaataaaattcgatgagaaaacttcaaaatcaaatccaaatttaagattgaaaatttaaattttagctgataaatataagcataagcgaaaatatggggctgtcaatgtaagttgccagtattgggagggaggaagtagcacacagaaacattgagaaggaactgtgaccagctcagttagtaaaaggtgcatgaattcttggccagctgccttcatgagatgtccctctcatggatcaacttatctaggattattaattttatccttaaagagacaactgacattgtgaaaaacaagaactacaatagatttccaaattgttttgatacttctgttgaagctcagatcatttactaacctggtaatatatccaccaagttaaaagagtggcgatgatacagtcaaacgcattgtttcatccatctactgagaaacctacgtgttctactcaattactctggtgaaacatacaaacatcgccgatttgtacggtttaacaagaaaaacaaagcccataaaccctacgcaatattttagccccgatttctctctccccgtgtttgctatacttgtgttcacaactaatgaagttggaaactaaatacaagcatccaaaatgagaaagacattagaacataattaattgacttttaattattttaaatttgaaaaaaatgatttatctaatattttaaagtaacttatatataaaaactttatccactaaatatattgtttagcatattgaaaaacatgctaacagaaactaaagtaaaatatgtatcatcagaaaagaatgccttagagtaggtacaatagcagactataagccaactataaatatattttattaaaaaaataaaagagaagagataagagcagcggactatagatttgtagtcagctatagtacggattccaaaacacatgtgtgtataacaggtggggctagatattgattgtgtagtatatatttatagataactattgtattaattagctattaaattaactatagatgatttgaagctaatagttggctataggattaaacttgctcttgctaccagtctacctgtgccggcttaattccctttcagctagcacagtgccgttccggcgcggggccagtgccaagaacggctcaagcctccctgtataaataacccgctaggtgcccactcgtacttggcaattggcaactatctctgcttcccctgttgttccctctcgcgccaaaacatttgccggcaaaccaaaaacagaggaggagcacacacgcacgacgcgtggtaggagagtacgggtacggccatggaggtgaccatggaggacgtggccggggacttcgagttctccggctgcggctccaccaccaccacctcctccgcgtcctccctcgacgacggcacggggatgtgctacgcgtggggcgagctgtccccggtcgccgactgggccaacttctgctgctccgacgacgacggcggccacgacctgcacggcctcatcgagtccatgctctgcgacgacacgctcgtcggcgtcgacgacgacggccaagctggcctccaccacgcggatatgttccgcgacgacctttactgctacggcaatggctccaacccgagcagcaccaccaccacgaaccctggctcgccggtgttcgacgacccgacgcagggctgccccgagaagggcctccggctgctccacctgctcatggcggccgccgaggcgctctccggcccgcacaagagccgggagctggcccgggtgatattggttcggctcaaggagatggtctcacacaccgccagcgccaacgccgccgcgtccaacatggagcgcctcgccgcgcacttcaccgacgcgctccaggggctcctcgacggctcccaccccgtcggagggtccggccggcaggcggccgccgcggcgtcgcaccaccacgccggcgacgtgctgacggcgttccagatgctgcaggacatgtcgccgtacatgaagttcggccacttcaccgcgaaccaggcgatcctcgaggcggtgtccggcgaccggcgcgtgcacattgtcgactacgacatcgccgaggggatccagtgggcgtcgctgatgcaggccatgacctcccgcgccgacggcgtgccggcgccgcacctgcgcatcaccgccgtctcccgcagcggaggcggcggcgcccgggccgtccaggaggccggccgccgcctgtcagcgttcgcggcgtccatcgggcaacccttctctttcggacagtgccgcctggactccgacgagaggttccggccggcgacggtccggatggtcaagggggaggcgctcgtcgccaactgcgtcctccaccaagccgcggccaccaccaccatcagacgccccaccggctcggtggcgtcattcctgtccggcatggccgcgctcggtgccaagctggtcacggtggtcgaggaggaaggcgaagccgagaaggacgacgacggcgactcggccggcgacgccgcggcgggcggcttcgtgcggcagttcatggaggagctgcaccgctactccgcggtgtgggactctctcgaggccgggttcccgacgcagagccgggtgcgcggcctcgtggagcgcgtcatcctcgcccccaacatcgccggcgccgtgagccgcgcgtaccgcggcgtcgacggcgaggggaggtgcgggtgggggcagtggatgcgcgggagcgggttcaccgccgtgccgctcagctgcttcaaccacagccaggcgaggctgctgctcggcctgttcaacgacgggtacacggtggaggagacgggtcccaacaagatcgtgctcgggtggaaggcccggcggctgatgtcggcgtccgtgtgggcgccgccgccgctgccggtgccgtcgtcgccgccggagggggtgtgccagcccgtcgtcgggatggcgccggtggccaccggtggcttcgcgcggacggagtttgactatattgattcgttccttgtcgagccagcttacgcgctagtttgagtcgccatctagcttagctttggattggatgtgatcgcagaattcagacgtaaaaaaaatgtagctcccgtgtaagttgagttccgttggtgtgtcaaaactgtcactcgcaagacgttgagagttgctaactcttagtacgtgtgtgttggtcgttctcattcgagagattggttagcatttgatgttgcacaaaaatttctacgtaggagtgcactattgtgcttgcttatcaacggtaaaagttaatcgtaaattgttgccagcatattgactttgttaaaaggaaattgcatgcatacaacccaattatccgactcacgtacgactgaatttgataaacgtttataaatggttgcaatgcatatgaatatgctttatttgatcaatctatggttacatgtttctatttgtatatgagttgtacaactgggtcatacgtatagcagtactcttgttaaaaatacaaccaccatgtaaacaaaatggcactttctaattggttgggctacagctgataaacctgaaaaataaacaaaccaatcaaaaataatttatagataaaacttttagaccgatatcattaccagtttaaaaaccgacgttgaaaaattgactagacgaaaaattccaaaacttttgtttcacaattcaaatttttgttcttgttgataagccaacgagcagagactacgagagccatcaaagctggagtcgggaaagctacataggcactataagagagagagaagggggcaatcaattagtaaactcaacaacaataatcgaagataaaacaccttagggagatgcttgtgtcttgattggaaagcaatattattgtctgtggatggacctcgatagcatggatccggtaggaccctctgtgagtttgactagagagctagtcatgtgagagtgaggggcttgagctcctctagagcgctagaatagattaacacaaagacgtatacaggtttgggataccctagaggtgtaacatgctactcttgttgtggtggtttctcgttcgtccttgaaggatcttacaagtttatcgactactcaaatagattatcttcctttctcttatgggtttcctaagaatttgactcaatgtgttgaagtctctcctcagttacccaacatcccaccccctcctttggtcctcgctcttcccttatactttctctcagggacaccacataaccacacttcgagggaagattttattcgtatcaacgtaaggtatggttgtctcatcaatagttcattttctctcttgctccatcagccgcaggttaggccttagtggggcccactgtaagcggggcatggcaaattggtgagagtttgccatgctaacctgcctaatccactagggcctcaggtccgtcttgagcggggccttcttcatgcggggcacgacgacaacttgccacatgctcccattcaatccaccaaacatgtggtgaatagggttcgttgtgccccggtaggtgcggagtccgcctttcattacctagtgagaggcagaaacttgagtgggtcctagtgaggacactgtagtcaactatgccctccgattatccatgcccgtgtcaggaccaacacagttgaagcgttagttgaagcgacgagtggcagttgctgcagttgccgccctatcttcatgctttctgctccatggtagataaccgtcccataaagcataaatgggacccagtgccagcctaaacctgttgttcagcctctgtctaaggattgtcctcgaggtgccctaagtggtgcattcttcttatcctgggatagaccacgtgccactccacatcaatctcctgtacggataacaggccaaatgaagagatacgtggcacgttcctggtgcacgtcgattgcctgagaccgcagttattgggtcactgacaaatatactctctctggcccaaaatataactactcatgaagattgttaaataaattaaggagagagataaaaaatgctagattgcccttaattgtcaccaccgttcctaatcccagcgagaagagggatgaaagacaaggtttgggaaaaatggacatttcacttcccttcagtgacaaaagattaggaagaatagcaagtctgtcatttaaagagtgacaaatagttaaactgcattgctaaccttctgttgacaaaaaatccatcctcaaatcttgtagattttgggctaagggatgttcttcacgattaatgctccgggtgtgtctcatccaactctggtgacttcctcttctcctctggttccgacaacaccaccaaactccaaatggaggacctacaaattaaggtcatgagttggggatgagggatggaagaaaagtgggaggtcaccgcctcgcagggcttagagggatgaccatggtccatgggagatggtgcccaacattgggcagaggaatgggtgggcggctagggcatcggtgctgccaaagcgcgtggacggtaggcggcggtgggcctgtgttgcaggtggcaggggtaaagcagagcgacgagttaggaagtggtgaccagtggtagcggattcgacagtgaggaaccacttgagacgagaaaaatggctgggtaggggacctcgtcgttgatgtcttgaggaggacaacggggtaggcctgcgcatcaaataagtgtcggttcaagcatgcggtgctgaaggaaaaggaaaaaaaaaagagaaagggattaggatatggatacatgtatgaatccccaagcaatccaactatctaaaattacaagattttgagtggtgtttctgctaaagatgtactccaataaatagccaatagttaaattttcccaacaggcccatcatcacgtgattcgcacgggttgcacgtcggttctggacttctgatgcatcgttcggggagtgccgggcacgcagaggcgttggtgcgttgcaaaacaaacatgtcaaaaccacggagataaccagataatcctcgcacatctcgcttcccatctcgtttccaccgcacctttttcctctcggcggaaaatcccagcctcgaatgtgccaacgagctcaccacaggcactgcacagctcgtgcgcaacgcccagaggaggccgtgggcttcctgtcccgcgtccgcgcccaccacatccgcaattccgcacccgaatctcgcggcgtcgcctcgtcagacctcagcccacagaaaacggaaaaaggaaaaaaaaacagccaagccgccgccgcgcggagcacagcggctcagcgtcagcgagcgagcggcggcgcgcccccctcgtcacgcacgccgcactcggctgctacggtcctcacgccgcttcggcttcgcgagcggacgccggcgcgcgcgcgcgttcggcgagacgcggcggcccttctccccctcttgcacaccccccagaccatgcgcgtctccgaccacgctgctctcccgtcgcgctcctcccagcagcagcagcgcctgtccccgcatggcgagccccgacaaggtcggctgctcaccggagccgctgcccctcgaccgcctcctggccgagctcgccgccaacgccgagcggctcgggaggaggtgggaggcggcgctccgcaaacggggaagggagggagccagagcggcgggcgtggggttggaggagggtaggaaggcggattcggcggcgatgcagctgcacacgccgctgttctacgccacctgcgccctcggcgggctcctcagcaccggcctcacccacctcgccgtcactcccctcgacctcgtcaagtgcaacatgcaggtctttcgccgtgttactgtagctcaaatctctagcttccccaatgactaatggaactcatacaaatcactagctccctaaatggttaatggaattcgtgtgtacaatgtattcttgcaggttgaccctggtaagtacagggacatttcatctggatttggtgtcctgctccaagagcaaggtcttggtggattcttcaagggctggatggccacgctggttgggtacagcagccagggggcttgcaaatttgggttctacgagttctttaagaagtgctactcggccattgctggcnccgagcatgctgagaagtggaagaccttcatctaccttgcagcgtcggcatcggctgagatgattgcagatgtagctctctgccccatggaggctgtgaaggttcgagtccaaactcagccaggatttgctcggtgcctgacggatgggtttccgaagattgtccaatctgaaggtgcctttgggtatagatactgcatttcttgtatacaattgtgacttctgttcaaagtttatttggggacatcctataatacaatgtgcgaatttcaggctttataaaggactacttcctctctggggtcgccaagttccttgtaagtcaaatgtctcgttagcagttatctttcactagagtattatatttgcatgtcaggtttttaactgcataatgtagaccataggtccatagtaatggggcaaataaaaggtccatagtagcaactaacatttgacagcaagggctatagcaaaatcctctggtgagttactgtttttgctcatgttcctactgaaaggatattagattttgtgtgcaataacattatgtgccacgagcgttgaccatgaagagaagtcttgaagtcgcatgctcacaaagagccatcgttgacagattgatactattctaacataccaaattgcccattctactgaatgagtgccactcatcgttgctattttctgacagaagaataactttagctggcactattttataactcttttttgagagttagtattttagtagtctgctctcctaataatgctgcaagacatagtctgttgcactttctcgaacaaactatattatattttcttacttatgtggctactctatggaaaaattgtcaattgtaactattatcacggtaacaacttcagggcatccctcgaaatttacactacgaatttaattcattgcaccctaagtagaagtcaagatcagctgtagttgtcaaaactgaaaacaatcaaatggttgctgtagctttaagctatgtatactagatacctcatttgttttgctcagcttcttagtttgctattcttggaaaaaaaaatggatggaaaatttaacatcaatttgtcaggatgataaaaggtgggagaggagataatcttccaacacgtttatggggaattggtttgttgatatcgaaatatgcccactttagaaatataccactcaaagttaccgatgcacttcaataccacccaaagtttcaaaagcatagataattagatatctgccataccatttttttaaaaaaaataaatcaaggcaatgcacttactaacttttagtggttgttttaatgaggaaaataaaagcaggtttttaggggggaaacgacttttaattcgacttttaattccgttattccagaatctagatatatgtaaaatcttgtttggctgggcaccaaaaacattgtggagtcgttcctgagaaaatacgatttttccagtttcgaggaaacttggttttatccaggatctggtacatgaaacaaacaaggatttacctaaaacaagattaaggtaaactagaattaataaaatgtagtgtaaattgcagataggaccacatcttttaaaatgtaagatgctactaagtcccgtacagatgccagcaattcttatgccgtttccttttaggttgttattctcacttgtgtctaaactactttcaatttccagatactatggtgaaatttgcttgctttgagacaattgttgaattagtatataagcatgcagttccaaagccaaaagatgaatgcagtaagccactccagctagcagtgagctttgcagggggatatattgcaggagtcttctgtgcagctatctctcatcctgcagacaacctggtgtctttcctcaacaatgcaaaggggggcactatggctgatgtaagctgctagccctctcagtgactttcatataaaaaaaaagttcttacacctactgtcaagtaatgttctactgattttgtttaactatttctgaccaatgcattgcactttcaggctgtaagaactctaggagtgtggggccttctcactcgtggccttccactccgtattattatggttggtactcttactggagctcaatgggcaacatatgatgcatttaaagtctttgttggactgtaagtacatcatggacagttcgatttttgtattgtgatgcctaccagttatttatgaatcataagcgtttgtgaattcaatctccaggccaacatctggtggattcattcctagtcctgctgccaccgatttgcgccaggtggatcatgaaaagcggagttgaccacatcgcgtaaatgttgtgctgagctactacccttaatcggagtagatgatggcaggcagttgctctgattttcatgagagcgggaacgtaggagatgacctgttgagcgaatttggaacacaattttaagatttagcagtaggaaattcacattcaaggggtttttgttgctacctcttgaatgacaggcaagtgcaaggaaggcaataagcttgagggatgtatttggcacattgccaaactgatctgatcatctgatgtttcaattggtcattcttgcctctgttggcatttcctctggtagtttccatacgactgtttatccagcgtacatgatagcatgaataaatgaaaagaatgttaaacatgggtcgcaactatatggtcctcaccgaaatcaactgaccaaagcaagagcaatttcgcatgaaagcagcccatcaaggagatcctgatcggtacatactgaattatcgatgttgtatgtatgcttcgcgcaattgcatagcacccagctcggtgctcacgggcacacaccgtcaacgtcagacaatacaagaacaatgtgcgcaagcgcaatagacaccaagtgctttgaatagaagtatcaaaagtatcaaggtggaaaatttcttaaaatcgacaatactatagtctaagagtacatgtaaatatataatgtatttgacaacatacaaatttgggtcaaaaggcattctacagcaaactaggcaatcattgcaacatttgtagcccgacctcagttgttgtcgcttgggtcatctactgctgcggcccaggaaatccttgcattggaggacgaggaggtgctccaggagtgaagttagccattgcaccaccggtcataggtgggggtgggattgatcgtggaggtccatttgcaagtgggggcggtggtggtggaggttgagtaccaccaacaggtgggggtgggatccttgggggcatacccataggtgcatttggtggaggcggcggcggagcctgtggcgggggtggcggaacctgcggtgggggtgggcgtggtggacctccagatccatttggcaaagtcccaggagccgcaggcggcttattagcttctggttgtcttgttttgaagtatagttggagctgttgcaaacaacacgaagataagttgagaaccaagattgctatgaaggcaggctaaatagcctaaattatgaacaatgaaaaactatattgtactcacaatgtactgtttcttgtctggatcccaatagttgaagaatttatctgctgacttgtcgatctctgcgcttggtatctgcaacagcaaaaattgttagcaaaatacaatggccagttgatctgaaatcctagcagcaaaacattcaaaacacacaccttaaagccaataatttcatagggctctgctgcaaaaagtagatattgatactttttatcccaagattcgactttctgtacaaaacatcagtctgttaggttactgttgatacatgggagtaacaaacaaagcaacataccacaaactgaaaaccgaacaatcaggcaggttgattgctttacctgttcatatgatgccatgaaacggtgccttggcttgctgttttcttcaatttcaggataaccaatctaaaagagaaatatcaaaagttatcaccccagcgtacaaaattatatacatgttctaatgttataaggataaattttaaaaacaaaatatcctcaaaatttgtcggtgaactcatttatccatcaccattttgaatgtgatagtcctcaaaagtcccctcatcaaaagatgaaactccaggtaacaatattataaaactagtttgcaaatgtggatgtaagggaaactatagaaagctgacattgaacttaaatatggagaaaaaaaaggagctaacttaactggagtcacaaaaagatcatttccataagtatgtaactttgatgccctacattacatgacatgaaaagaaaaataaacaaaattatctctatatatatggagtattggaaagtgaactaatttgttctggacttcacaatattaacatgtaaaaacatgtatgaattaaattcaagtgccaaacaaatgtaaacgcaatgaacactgacctcaaaaagaaatgagtgttgcttcatgtcaggatcatactgcttagtcacctgatacccaggtcttccaatcttaactgaaaaggaaggaaagataattaaaatattttgtgttagattcttccaacagattcgaccatgtccagatagctggacttaaagatagcataactatccccaaagatacagacaacatgaaagggttcagataagaaactggtcatctttgagaattgagccatactcagttttaagccaaattatgagctcctataaactttaagtatagtaaaacaccattctggactagaaattgctatactccatgaagttttcagaactaatccaaatattcatgcttaggctccaattgattagcataaccgaatgtccacggtgagttttcatttttcaaggctttttcaaggtgtcatactgtcatctcctcgtctgaatttggtaattagctgtttgaccttccatcggtagattgatttgaagaaaagattctatcattcaatcatttatgaacaattttcattatatttagcagaattcacccacacaaatttgccgctagacactaactaccaactacatacataattttggatctttttttcaactgagagcaaaccaatatgatttagccatacttggtagaaccaaacaaagccagaatgcacaacagtttagtgctaatattcacattataaccaaaggacgttaatcctgggggaaggagacgagaagagatgttttactcaccggacttgcggggcgcgaactttctcttgttgggctggggctgcgcgggcgcgtccttggcctcgcgggcggcacgcttggcgaggttggtctggtgccgcttcccctgcgtgtgagccaggtagttcccctcgttgttgtgcagcgtcaggcacagcttgcactcgtagctggacacgaaatcgagcgggattagcgcgagggagcaaaccgaatcgaggaagaagaaagctagggttttagcgggtgggaggcagtacctgccgaggtggttgcgcatgaagtaggggtccttggcgaggtcgatggtctcgagggcgaggcggcggaggcgctcccgccggtcgatggcctcattctgggcggaggcggcgccgccgctgccgggcttggagccccactcgcgatccatggcgtccccgctcggtctcgccgcctctcgagtctcgacctgtgctgtcctgctcgtatgcggtgtgtgccctctcctccctcgatttgtacacggtgcggctcaggtcggttggtttttaccagtagcggctatttttgggcccaagcccacttcgttgcggattcagcccaaacattgctttatccttcttttataccttaccagtcgactagtaaatattaacataggagtactatacaagctatacttaccaagttaccatgtttccaaaaataaaaaaaaattggactaaaaatatagtcctaaagttagagatgatatgggctaggtttttgtttcaggaaattatcatcctaagtttctgattgttttcattttcattgaatagtagccttactgtattcttttttttatctccaaaactatctcaaaattatcctatcgacgctatccgttttttaaaagtggctggatagcatctactattcaaaccgatttcttcctacaattgagtaaagtatctttttttcccaataaataacgttcattctaggaatttactcacttcaatctgacggggtggaaaaaaactcgaaactcatgagctaactcaacttgttgtaaaactcggctcgactcaggttgagtttaaacttttactcatttgcttaatgagtcaactcgagctagctcgtgacttactcggttagctcgttgagctcgtgatgcattaaaatagaagttaattgtctatatatttacaggtgtaaaggtcgtaaattcataattatccattgtagcacaatcttatgagtcatgatgcataacatgtcaatcgtaatctttggtcataggccaacaaattatattgtatatgaattttaaatcatgtattttggtgcaacgagtttagtgagtttaatgagccaactcagactttttaacgagtcgagtcaagttcagttttttacttgttatgttaatgagtcgagccaagctagctcgttaatttaacgagtttttacgagccgagccgagttggctcgttagccaccctacttactggtacattttttttctttataggacaacaccatcggccttataaatgtgagtactattcatgaaaggctaatgactatgatgaaaaagaacaaaacgtttgtacgatggtatttcgcacaaattacatccactgaaaaactatcacttgtaaacggcaaatattttttttccgatcacacgaagacacgaacgcgtaccacgatcgaagccgaaaatgagcagaaccattctgagaaggggtctaataccatcgctgtggtctgtggctcttaggagcgtcataacatgaaatacatggtagtccatgcatgtccttattacacgataactctagtactaatcttattcgatcacaatttgcccaacatttgccatcaagtcccagagatcaccaggcactttctatgatggcccggcaaacacaaacaatacatcaactagtacacctttgttgctgctaaaaccagcctatcaaagtatcaatcaccaagcacgttgctgctactctgctcttccaacgggtaagggatcgtggcgatgtggttatgagccacggtgccgatccacagcttgcgccccacctccctcacctcgctcaccagccgcatcacctcgccgccccggtcctcgagcacctcgacgacgtccccttcgccgtcgaggagcgcgacgagggtgtgcatccgcatgctgaccatcttccccagcgtccgcatcgtcaggggcagcttgaagtagagcgttcgcagccacggccgcttggcgaacacctcctgcgccgccgtcctgcagcagtcgatcgccacccagaaccgtccgccgccgccgccgctgctcagtcgcacgttgtccgggaaccccggcaggtcggcgaacacctccacctgcccggctcttggcccttccagccagtaccgcattatcctagaacagcatatgcgtgcaatgttaatcaattctgaatcttgtttaacctttagtattttcagaacctgtgaaagcttgtgccatttcacctgcagtttgttgtttcggagaagaggaggaactgctggtcgtcagaaatctgcacgccattcgggaagaccagcccgctcagcacgacatgggcagctttggtttctgggtcatatctgagcagcctccctgtgccttcaccttctagcagaacgttcagatgatccctgcacaactgattctaatcagaaaatcttgaacgatagaaggaaatagagaatcgatacaactgaagagagtgatactgcagctgcacactttctgttgtatctcgtgctcgtgtcggtgaagaacacggagccgttgcggtggatgtcgaggtcgttcgcgaagttgaccgggctcccgccgacttctctcgcgagagaggtcgccaccccgccgttcggaccgacggacatgagcccgtagtacgcgtcggcgacgtagagctcgccggtctcgccgtgaaacctcagcccgagaggccggccgcaccgtcgctccatctcgtgctgcttcttcgtcgtcgactccaccccattggcacaaactttctccgacctttttttgcaatataagaacacgtaattgtacactgctacgagaggtgttttcgtggagggcgagagcaaaatgcaggcgaggtgttcgttaccagtcagggctcatgacggcgaacgtctcccacccggcgtcctcccccatccaccgcacgacgcggccgtcggcgaggccggcgtaggggccgcggccgtggcggtcgaactcgatggactccggcccgaacacctctccgacgaactccagcctgccgtgcctgagccggctgccgttgtcccgcggccaccgcgccatcacctcgcggtacggcgccagctcgtgcctcaccggccggtagtccaccccggcgagcgggccgaggtggaacgggtcggtgaggagcagggccagcgccagcgccgcgaagaaaaggtgcggatactgcaggatgccatcgcgccctctctgtggacgctgctgctgctgcttcttctcttccatggagatcaggagcgagggaagacggaatttgcacgcagaggaaagacggaattggtggagacggtgatcttaacttaaattcttaatgcctttgcagcgaaaatatatattcgatgcatggaggttgcatgagtcagcgtgattgtttgggagtaggtgttctgttggttcggaatagccaaggaatcttgtgctttcgaagtggggatttgcatgttttgcattgctgggatgacggtgcaagatgcacaggtcaacaagcatatcacgatgcatgtaaccgaacccggccagggctgagggccctgaccatggccattgctagcgctgtaaagcaaaaggtgcatcacgaagaaggaagaactccaagtgtccagaagttcaatcgatgccacccttctaaacgtgcaggaaaaatcacaagacacaggcaatggtgtgtcgatgttgcaagaaaactaactctaagtcttagctaaaacatttactgtggttgagcatgcgttgggttatagggaagtctatttgtccctttgttttttttgttactttaaaattcaactaaaaaactattttttataaatatatcaatgaccatgaagtttaaatttgacttacataggtacaaataaaaataatgaatttgaccattcataagcaaatttattgttttttgtttctatttgtgtaagtaaagtttgaatctgtatttttaaaaaaaatcatatattcatctgtcttttcatatatttttttccaaaaaattatgttttttaggtgacgtaaaaaaataacggcgcgttctcttgagggaaaataaaccacctcttaggtttgaaaatggtcaaatatatcttaaaaatcaatgacgtttcatattaaaaaaaaccggagattatcttaaaagtcatttatatatggtttcgataacttagtggtataaattttaccatgttccttaatcaagagttaatagtcgaggggtaaaacatgcttatgctgtgttattctcccttcttttcctacccaccttcatctttttttgcgcacacgcttttcaaactgctaaagtatgttttttacaaaagttttctatataaaaattgctttaaaaatcatattaatccattttccaagcttttttagactgataattaatatcgctctaatcgctttctttgtttgcctcccgaactcaacctactatggatctcttagcttttgcataagatgtcatgtaggatcatgtgataagatggaatagagaaagaaagagagagaaagagaggaagagacgaaaggacaatctctacacaaaactacaaacttataggaatccgagagaagagaccaataaattaagtgaaaacaaatagagaaaaattagtatagcatatcagagtaagtatattaaaagcaatatattatatatgttatctcttaattaataagtagatgacgtggataaaattagaattgatgaccaccatatactataagggtctgttcactttgatgccaaaaaaaaaccttaccaaattttgttattgtcaaaattttggcatagttaatgatttcttatatagttactaaaatttggcatcaaactaaatgtagcaatttttttttacaactttaccaaaatttagtaaggttaaaaacggcatcaaagtgaacaagccctaaaccttatactatcttctctatctaatgcattatttgaccatagaaaggtgagacttgagagcgccacagccggaagattatttgaccttttgaattcatctcgaacccacatccttaatccaacggctcacaaaagcacaattgacgtggcaccttcttcctgccgatgctctttcctcaccggcatgcaggccaacaattcgtgtcactgacacattgggccccatacctcaacgaaaacttcgggtctacgagtcaatggccaataaaagacgcaaggcccgcgaccctctcaccggtctctagtctctccacgcgcaaggaagaaggttcgcgaatccccttctcccttcggtttccccttcttaattcttctcgcctcgagcgaaaatcttatcattgtagttctttccatcgcagagggtgggctagggcgatccggggggcgcgaccatggcttacgtcgagagaggtaatccgatttcccctatccggtggatgctgtgagatctgcgtctataatctgttttgatctgtgatttgtgcctgtgaattcgttggcctacccggtttcgtcaaataatcaaatcttggtttttcgtgtggtcatatctcggtagtagatttagatatgtgggtaaaatatgcaggtgtgtgcagattctgacgctagagtaacgagtacagctgctatgttacagcaaatctaaataagtatccacataccacagctagcgatttctaatagtaatggcttaatattgaccaacctggaaagcagggataaatttgatggatggagttgatatatcaaaattaaaactaaaaatggctgctctagaatgccttgtttaacgtttcctggacccttttcactttcttgcctcttgaaacttccattcaccttccatagaatggagatgttttgagggctattgtttctcatttgtgagatatacctctcaattgttagatgccaagaaaaaaagtaaagagtattgaatagttaccgaccttttcgaggaaaaaactaactagttaccaggttttctacatgaccaatcgttcaccatcactgagagtcaaatgagattgtgcatgatatgttgagttaatgtatactgttgcgacttgagagtagataatcatttccatgtatcgatggtgcagtagcaattacatgaatgcatatggttgtgtatggtgtaatataacaaagtgcatactgcatagcaaggtagctttgctttcaatacacagttgatgtgctacctgtgtaactaggcattccaattatattgggacaggttttttcaaagatggaatgatttcatttcaattggtcctgatttatgttaacttcattcaagcacttctcaatcatttaggaactgtgcgctatttagtaccattctggatcatttaggaacatcattcatgcacttttagtacccttctagatcatttaggaacagcattcatgcaactttagtacccttctgtatcatttaggaacagcatccatgcgctttttagtactcttctggatcatttacgaacagggtatcataaatggtttttggacaaaagagaattttggctgttgggactattggaatattcacctacacaagatatattgagcacaatgcaactactattggtttgattctcttaacttggtagtgaggttttaccctgtagaaaatggggagctctttcttttatagttttaaggaatgaaaatatggaatcatgcaaccagatgttggctaaggataatactagcctgaataggcaacctatcaaagtggttttatatgttcaattagatcaaagtgcactagtgcaggccttttgcctaaaatcttgaagaattaagatagaaaaatatgcttggcaaaattttacaagttagtgttttgagatgtccaaagttgttgggaacttggttgtgtggtgggggcgtgggactggaacatgtattctcattatgggatctgtagcccttcaaactggattggttataaatccaccgtgagattattttgttcctcttgaactggagtaattaaatatcgtaatttactgtatatgtgtttggtgtaaaccatgtctttctatttcagtgcacacattcagtaaggatgtggggctatgcaagaacttaagggaaattagtagttggtttaccttttactattgtcttcaattatattcagtttatttagtgtgaattcaattttatacatcttatgtgtgttgctcacttctggacttaacttatgccctttaagaaatcattttacgcttcctttcatggaactagtaagaacaactctttgcttttcatggatgctgtgtagcatacattaactgatatgttgaatttgttcaatctcctgatgttggttcgtttatgattatgtgctgaccacattcttatttcccctagctggtaaatattttctatgaattgactggccattaaacaatgcaaactcatgttattgtttatgtatcttgcaggtgttg

SEQ ID NO: 9039 - DNA, 63587 bp, Oryza sativa
gacggtattcacaatgctcccgggagaccaactaccatggccacgaggagcaaacgacctgtcaggccgccaatttgcgcgtacgtccggacgccagtggccccgccgctactacgagtcgtgtgaactgtgaggctgtgactgttccggtgggcccagcttgacccatgtgctactgttacgatgcacccgtttcttggcccacgttactaatacagatattgcaattggcccacgtaatacagtcacttgggctcggtccagtctagtactcgtaggaggccctggctgcagcgctaggcctaggcgacgccggctagaacggtccgctgctttgcccatctccgtgtgccgcgagaaggcggcggcctacggaaacggtgaaccttcacgtgccgcgcggcccagccattgcccgtgccggccgtgcgcgtgacggcccgagacgacagtacgccacggtgtcggtcgggcggccgcgcgcgcggccacgtacacggcgcagcgtggcgcggcagaggcgcacctcttcccgcgatgccgtggatattccccggcaccgaccctataacttggaaggcgtattcctttaaaaaaaaaaaaaattggaaggcgtggcgggcgacgctaccacaggtgtggaaaaaatctcttctacctaccggcacgcgcgaaacgagcagtttctatcagcacgtgatgcatcaaactcgttctatggcggcaagcatacacacagcgataaattccagatgtacacgcgcgtataatatactagcgcttgttaatatattttattataacgtcgtttgattttaaacatacatgaatgcaaaatctacaatagcaaatacatatttttgtaaataagatgaatgataaatatatttctaaaagtcaatgactccagacatattaaaaactgaaatgagtaccactgccatcgtacattcgtagtacaagataagagtggtatgaagtaaaaaaataattgtggtcaaaatattgtactatgcaatttgaatactgcatcaccgtagttttacaagaaatgtatcactggcacttcttggagtgggtcgacaacgacagtatagaaaatacagtgtctcgacgggcatcgtgtcgttttattcgcgggcgccgacttcatacacaaaggagaaaactaaagaggggatcccaaataatattcccaaaccctaaagccctcctccccttcccgtggcgattcgccggtccgtcccccaagtctagggtttatgttcgctttctccccacgcattcctcccacccgcggcgctccctgatctggtcaagcccaccagaatccgctctccagagttggtgggggcggagggggaagggaggggcggcggatgcagacggaggcgagagtggggatggccgccgcaacgatggacagcggcgccgccgccgcggccgctcggaggtactcgacgcagcagcagcagcagcagccgccgccgccgcagctgcaccaccaccagccgcagctcgggacggtgccccacctccttgccggcggcgtcgcgggcgccgtcagcaagacttgtaccgcgcctctcgcccgcctcactattctattccaggttcgtcttagctgctgaccgggtagtttaacttcttctgagcatgtgtagacaactatgaatccatgcgatatttgggtttgtataactaagaaaaggtgagacatttgtttctactatttagctgagctgcgaggactaatcctgcttcagataggtggaataagggggaatatttttggcattttgttttcccgagcaactattaagtattttgcacaacttaactgtgaagagaaaactcaacgcacaagatcttttgttgagaaatcttgatctggtttgatgtgtgaaacgaggcacaaactcatttctttttctttataagcaatgaaagcacatttcttacaatattttacttaaaatactgtggctgttaatccaatttatgtattctatgtgcaggtgcaaggaatgcattcagatgtggctaccatgcggaagactagcatatggcgtgaggcatcccgcattgtctacgaagaaggcttccgagcattctggaaaggaaatcttgtaactattgcacaccggttaccttactcctcaattagcttttacacatatgagaggtacaagaacgtaagtacagatttcttcagatgaacttgcatgctcattctctatcacaattattatatggctaatttcttaattaaatttggactgtgcagctgctacaaatgatacctggtcttgacaggaatggtggatttggtgcagatgttggtgttagattgataggtggtggtttgtctggaataacagcagcttcgatgacatatcccttggacttagtacggactcgtcttgctgctcaggtaagcctattgtcaccagtctgcatatcactggcttcctgtgttgattctcatccacttgaaaagccactatttgaaaaagtttccctgcaattagaccaaacaacatctatttccatgtgaaggacatagataactcaaaatcccctgttgattcccttctttatcagtttcacgttcagggtagaaggcatattgcatttatgctctctgctttgggcattattgaactgtaggcctttttccattgaagctttgcatttttaatatgtaatcttcactaataatgaagccttttcatcaaatgtttgcagacgaacactgcttactacaggggcatatctcatgctctttacgccatctgcagagacgagggtgtcaaggggctctacaagggccttggtgccactttgctggtaagaatgttcgacactgccattctctcccatctttttgagcattctacctttcgttatccaattgatatttatctaaaatacagggagtaggtcccagcatagcaataagcttctgtgtctatgagacattgcgatctcattggcaaatagagaggtaagttgcacaagatacaagtgggctctttattcatatccatgccacttctcgcatttgttctaactgtatttattacctttgatctttaaaccaggccatatgattcccctgttctgatcagtttggcttgtggaagtctttcaggaattgcatcctcaactagtaagtaatctgtaaacgaatgctgattactacttcctccgtttcacaatgtaagtcattctagcattttccacattcatattgatgttaatgaatctagatagatatatatgtctagattcattaacatcaatatgaatgtgggaaatgtaagaatgacttacattgtgaaatggagggagtacaaagtattctgtattactgaggtgtgacgagcttttctcaagaatgaaacgtacaatgtggaacggttgtgtgaatacacaaattatgtgcaaaatagaaagaccccactttgctagaatttgtttcccccacttctaaagaagttaccatgtaatccacaaactatttttatagttgaataacataggaactatttttttgcactgttccactagtttatgctctgattctgtctagacttttgttattggagcaaattggtcaataacacctcaaagatcaattatctgttgtattttttgtcactaagtgaaccttgctctgatcattatcatttattatatttcagttacatttccgttggatctagtaagacgccgcatgcagttggaaggcgcagctggaagggcccgtgtctaccaaactggactttttggaacatttgggcatatcgttcgcacagaaagtttaagaggattgtatagaggaattttgcccgagtactgcaaagtggtcccaagtgttggcattgtttttatgacgtatgagacgctgaagtccatcctcacggaactggcatcagatgattagctgtccaacatttgtcacgcttgacaattttgatgtttgggccagaataacacttgaggctgattagagcgagaaaaatgactttgtagcatatgttaggatctagatggtactaggtttttaagtttataatatcatggaatggaaggatattcatatggttacagattttcttgtagtgcatggtaaaagaagagccgctgccataggtcttcaaatttctgtccaccagttttagtgtatgttaacagtttcagttttgtaatggtacatgaggccattgtcttcagctctacaatactattgaaagatggcctccaagatgatctgtttatccatgttgtcctagtgagcttattacaattcacaagtgagttcggctacattattgtgaatggccttgtcattcaaatttcctggtagtgagcaaggaacgttgtatccctctttattggacgatagtttgttaatgcggcctcttcttggatgcaagtacaagttaaaagttaattttagatccacattgtaattgttcaacttcttgctcgcacgatggacaaaactgtctatgggaaatattggacatgtctccactgcttatggactgagaaacgcgtggccttttccggcaaatgaaccaatctcaaatgcttagttaactcaggtgaagagaggtgctgctaaacttcgttgagaagacatataatgaagtgtagtgtcatatgcggcagagccattatgtcgtcatcaatggctcaatgctagtgcataatgtgagaacagagttcaaatgctcagtgacatcaatgctagcagtacataatgtgagaacggagtagctaatccacagctgatggcttcctcagaatgcatgtcatctggttccgctgcttctttgcacctttgcacgagtattggctgcgattcgcaaaggcgttgatctgtggtaggggattgttaacaggtcactgaagactgttcagcatacttcagattcgaggggccattgtttacttgaaaggtgtctccctcccttcttaaatacttatcactgtttcaacttcgacattagtaatttctaaatgactagactacgatgaacgaaagctaaatgcttatatttaggatgaacacaattaagtacttatacatttttgcaaaaagcgacaaatgattgaagtttaatcatgaatagtgtcccgtgacaagtatttgagaacgaacagattgcttaggaaaatatttctcctcttctcgctgaattttcatttgaaagatactcttgcttgtatgcagtcatgcatagggctgtaagtgggtcagctgcgaacccacttataggtcaaaataagcgggtttgtggtttattttagcctataagtgggtttcgcgggttagccacttacacccctagtcatgcagatcaacagtaaataattagtacattatacacatagacgtatataaatacttcactgcattatcatgggccatactgtgcattacattagtgtttcttagtcaccttattagattgcaacctcagctcctgttaattcgagcaaatgcagttccttaactgatttactctgataggacctctctgaaaactcaaggtcacccaaatccgaaatcttactccattaccataacccatatgatctccatatgtatgtgtgtatgatatctgtatacccgcatccagtatggacatagactgatagacagtgctttcttgtgttacacaggaaagcctccggttagccgtatatggttcagtgattggcgaaggccatacttgttcacagctgcataggcagctctgaaaccatcgccgtatgctgatgatgtgtcattggcgatctgatgcaggaagaattctccaagcttcttctcggtgtgagagatcccacccttcttggacggtggtggtcgacaggaggacgacgaagatgaagcgtaagatgttgaagcctgtccatatcttgaagtggatggaaggatctctgactccagccacaggtaagacatgacctggcatataccttcctcaatctccgcctttaggttccggtaacctgtaggtgccattgtcagacaggatacaaagaaattaattaatgttcagataggatttcagaaaatgggagaaatggatgttcagatgattacctttgaggcgcaaccacccatgcatcaattcatgggcaagaatggagcccgttagcagcctgcaattgtatggaatgtttatgacttcacacaaatgatacacgaattgtagcatttgatttacatgaaaatggaaatacttgtgaagaatgcactgacctggggaggccaaacaatacaagaattgcagtgacttcgcatctcctagttagcttttgcggttgggttttcatatctagtaaccgatttgcaccaattctgggcctcctaagtatctgtagaaaatcagaacacaaaggaacaaagtcaatgatttcatttggccaacctgctactcagtggaactgtggatgtaagatctgaaagcaactactctgtctagtttattgcaactacatcattgaacagggaatctcattagatgatcagtatttatcagagaatctcatcgtttgatcagaacgatgttgatttcatattaccacttggtcttccttgatttgttagttattcattagagaaattgtaccatcctaaaaactgtttaggttgacatgcgttgtacttacactggtcacagtctgctcctctgacagacaaaggcctcgtgtttcaggcatatgatgcggtccctgcagaaatacaagatgcaatgatcaataacacatactccgtccagtcataggtatttgacgtttaggacaagatttgaacaaacttcaaagtttgattaaatcttatcctaaacatcaaatatttatgaccagacggagtaatgcattatgcattacagaacaaacagatgtaaagaacccactttgctttctccttccatagcttcattaagggcttgacgttcaaccaagagcatgggtatctgctggtctagtttcatgttcatcccttcgtagtagtctctgatggaatggtatagcggttgacattcaccggtgtccatgattgcagaatccaggcattccatgcacaagctgcgtccatcccctaatgacatatactttgtgttccttggctgcagggattcacaaaatgtcttaagtacgaactcatattttaaactgacaaatcagtacaattgcaatttatagaaattttgccgagaaaatagagaaactaataatatttttaatgtgtatttgtaagcatgaaatacattcatcatatgcaagaaaggcagtacaaacctccattttctcacagctacagcaacgaggtgttctatcatgctcatgcaaaggacaatacttctgtccccagaatggatgggctctgtactctatcaaaccagtcctgttcgttgggatctgcaataaaaaccaaacacgtaaaaagggtttcctgcaaatgctgttccaacggcatgctaatccaaaaatcagttctagcacttctgcaaatagttcatccacaaaaaaaaaaatcttacaaattgaaggcagacgtcacactttgggtgatgaagctccttgtagcacagcttgtggtatggatctgtacctagcaaggtgaactgggaaacagaataaagtaaactgtcacttcctgagaacacctgaacacacacaccttcagacattctaaactgaattgcagaaaggttacctccatctcacggatagggtggcgacaggaagaacagcggaagcactgagggtgccagtacattcccaagcagctcaagtaatggccatgccctatctcatgcttgcaacccccacagaccctgaaagatatatattgcttctttacataccagctgtttctgtgaattgtagacaggttagtgaaagcagatttgctaacctgtatcctctcgacctggcctgggtctgagagggtgcacaaggattgtaaggctggtaaggattcatgttcagactgtcctgtattgctctagcgagttcttcatcgttttctcccttgtcatggtttctctctacccaaaaaaagttgcatcaatggtgcttagtgaagagataggttaaaaatatatgatcataatatcacagaattcacaaatatggcaccttttgtatttttggcatcgtctgcaagagcaagggcaagtgcatggtccatttcttcattgttatgtctaggtggttcttccttctagaaacataacaaagaaaggttcagaaactcttttccccatgatagtgctacatcattaccataatctaactgataaaggaaggggaatttggatagtggcactccatgaaccaaagaaaagaacagaaaaatgtcaggttgcggaggaattgagaaacattacctttggtctaactggttcttcccagagcgtggtctcttctcctgccgtcacccgagggcgccgtcggttggcctcgccgtccttcgtccccttcaggaaagcgcagagccacttcatgaagccggatctcctctctgcgttgcagaaatgttagaaccggacaggttcagggcttcaggcactatgcaaagaaggatctcagacatggctagaactgaaatgtggagagcaacatcccacctaacacttcctgcccgctgaaagcaggcaaagaaaaattgatgtatttaaacactttggttgtcttatatgctcggttggatgctaattgtaagtggattaggtgatgggttatcaacaacataatttcgctagccctttgctttgatcagatagtcacagttgcacagttaaaaaaaaatcagtcatcatgtcatgtacagctaaactaaatttttaagtttttgtttgtatgaggctgttaattggactgtcatagaaaaagaaaggcagatgcgtgtacctgcattgaacaagatcaagaaacacagggacaaaacgccacacgaaattgcttgcgttgctaacatggcccctctctacaccgtgctaatcacagcgttatcttcttttcctttttcaattctacctccgattgacggggcacgcaggcgcagtcagggtcagtcaaatcttggtggccctcaaatttatcctggattataagaatcagtttgagtctcccatttatgctatgtttggataataggaaataaaggatgggattgggattagaaaatgaatcaatggctaggatgaaataaggtggaggaaatgaatggctaggattcaaagttaccccttcataagtgggaaattatttccctttcctattatctaaacggtgccttaatttccctcctctgaatagcacagtggtatgatttatgcatgacagttagaaatgttcatctgatgtgattgcacggcgatcgatgttaggatcaaacagctaaaggtcgattcgaagctagaccaataatatggacctgtaccatcaccatttgcgccacgctcacgccatgaatgtttagatggggctaaaattttctagtccatgtcacattgaatgtttagatgctaatttaaagtattaaacatagactaataaaaaactaatttcataaatgagagctaatctgcgagacaaattttttaagcctaattaatccataattatgaaaagtttactgtagcatcacattgtcaaatcatagcgtaattagactcaaaagattcgtctcgcgaattagtccaagattatggaatgggttttgtaattagtgtatgtttaatactctaaattaatgtccaaacatccgatgtgacagaagtccctgtttcacaaacaagcccttagaataggacagcctaatggcaacaagaacgttctttcagagagagtggacatgatgtggcgagtctaacggataacagtctcatgtgtaaagaaacgcctaaaaaatcggctattttgccatggatgttgacgcatcgatcgattggtatgctaaattttttctctgaaagggatcaactgggatccatttttgtgttccccggagtatcatctttaggaaagctaaaagttcattttgctttacttgctgaaatcaacctcgttttagtctatctgacgttaattgcactgccgacagtagtttagcctgccttgtttgaagttcaatcaagacagcacatatatttcaagcaggcaacaaataaaaagttaaaatcttagtcaggcaagagacaacgaccagctactggtgccatgaaaacaatagctctctgctgctgaaaaagtacgtgaaatctaatctacccatagtgcacaagcaaaccaaccatgtgtccaacatgaacaagaacgtcaaaaagtacgaggaggacgacgatggcaacggctgaacattaggatcagagaaattaccgtgactgcactgatcacaagaccgtgaggagtaggccatgtacccaagaaccgctgccgcaacgtccccaatacagcatatatatatgcacacacggagacagaagcgggagagagatggcagcagaacacttcaatcagagcgagagacagagacagagctctgcaaggtcaagtatggcgatcgcgatttctacgatgagcagaggatcaggaggaagaagaaggaggcagtagctgcgatggacggaggaggaggagggggaggggaggggagggggttcttagagaataaagcggcgtggtggcgaggagttggccgcgacagaaaggaaaggattgagggtgaagcgaagcgcggggcggccgcccgcccacaacgcacggcatctcatctcatctcgcctctcctcgccttcgcctcctccgcgttccgtgcaaaaagcaaacgatctctcaccgggttaactcgatcgcaattagcgtcttctttagcgaagaaagaaagaaaaatcgaaattcggtagtcgccgtgccgccagttgatggcgcattagtggcggatgcacggggggaatattttcggttctgtgttaacggcgggaggggaaaagaaagagattcgttgtgtcaacgcgaatgtatgcccctccatttgcatgcttttttttttttgtttttggtttttttggattggttttctttttgtgctcgctgagagacggtgatgctacgcggaaacgggaggagagcagagcggcggcgggggtggcgctgcgctgggcctgcgactagcaatgcgggaggagtacgtttgctctgaaaatttttttcccttcctttctcggatagggaaaagaaaagggaaaaaaagggtgcgaccctgaaagctggccgctgccgctgtcgatcgccattcgccagcacgcacgcgagtcggcgagtgtacagcccattatttccgttgttcgggggagcccgccccggtgttttgccccatggaccgtggactcatggtgagctcgcgtgacgcggcggtgggtagcctagcaaagcaacaaaggccaaagtttaggccctttattcaaaggaaaaaccatagaaattctagaggattttatcctatgagaaataattctatagagtcctttgaaagaaaggattgtttcctatcaattcctttgaaattcctatggaatgaaccttactagagcaattttggagaaaaataagcatgaggtctcacctcatgttttcctcttcatgtgtctaaggttcctacgtttttcctgtgtgctaatcaaacgacagtttgaagactttcctgtgtttcaaaatcccataggaatccaataagtatggcattcaattcctaagtttttcctattcctctgttttctgaatcctgcgattcaaagggacccttacttgcaacttggtagcctaagggaatgtagcgctctcgtgcactgatattcacatatgttatttgtggacgctggtttcgtatcgcctttgcaggaagaaaataagttaggacctcggtccttccacctaatggaaaagactttgttttctaattgatatgtgtgtccacacgaatcttggagcactcatcgcttacctcagctcaagtcctcaacttcgcccctctcctctcctctccacttcccgcctcccttccttgtcagaggcccaattgttgggactttggagtattacgtttcacgcgcaagaggtatcgagctcgttcacccaacttttacctctctctcctctccacttgaaccacttccactacttcccttcctctctttttctttcaggtgggaagtctaatctttgattagagcttgatgcgcagcaatgatgtcggcggtggtagagagctcttccattcgtcggggcatgagttgtcaaccttaatagcttccctagcaaggagcgcatgtaccaacatgggtgccggttgggcgtcgtggcatgctgcttctacaccacgtgtcttcccacacagcaataagaaggagaaggcggcaagggagcttctggtcaaaagagaactgaggaatggaggtggggagatgaggggaaaagttaagcacttgagttggaggtagaaggtcaatgctccaagattcgtgtagacacgtggcaattaggaagcgtggtcttttcatcggagcggagcaccgaggtcctgcccattttttttccacctttgtaggagtaggaattactgtactagtaatagttttatcatgcaccagaaatgcaatatatcaatgggaccataagaattattctagactgtttagaggactgatattatttttctttcatgatataaccactttactgtagattttgtagaattccaatgtacatccagattttgtaaaactccaatgtacatcccgttatttgagaattttgtcttagttatcccacgacaattcgcatttctgcaccaaacctctacaatcctcttcacctatctccatcctacttcatttatgtatcttctccttcctcatatgagtcaagctcgctccctatctcatattcggtagtttaagggtgtgttcttaccctaggttttccaactcatctccatcgttttctgcgcgcacgcttttcaaactgctaaacggtgcgttttttttgcaaaaagtttctatacaaaagttgttttaaaaaatcatactgatccatttttttaaaaaaatagctaatacttaattaatcacgcgctaatggaccgttccattttccgtgcgcatgttccggttgggaacacgctggagcgaacacagcctaatattggtatataattaaggaaatttcggctcgtacaaattggtttgtgcgttagcacgctcttgatcagaaattgcctttaattggcatgattacaaaagtgcaagcatctgacctgaatatacgatgcttgaactgccgatgatgcgactgggaaattagggtggtacaagagcgtgcagagaaatagcgagccattttggatagggagtacccaaaaaaaaaaaggaaattgatggagacgcttccatgcatggctacaattcaggtttcaaccatgttggcatttacacttcagtcaatgctcccccccccccaaccatgcttctcacttacaaaatggtaacattgatgcatctatcgtctaaaagaaaaatagtccaaaatcgatcgacacaatgaaataaacaaattcgatctacacattgctctgttatctgtgatgttgaaatcctgtttttaactagtattctcagttagtttagttcgctgcagatacatttgtatttttgttagctgtgtgcaggaattgaaatggaacctcctccatctatgactgccttcctctgtttgagtgtattctatggcactaaaagaacttcaagaaaacagcatttccctgtctttgaaaagaaaagtccacgtcatggttaccctatgatggtcttaaccaatggactaacttacatggcaagtcacatgctgtatcatggaagcatccacctaactgaattcatagtgtatagaatgcacagagagttacgtagggaatgggcaaggggagccagcaaggggtgtttaagatggggttaaaactttttagcccatgtcacatcggatgtttggacgctaatttagagtattaaacatggactaataaaaaaactaatttcataatgagagctaatccgcgagacaagttttttaagcctaattaatccataattatcaaaagtttactgtagcatcacattgtcaaaatcatggcgtaattagactcaaaagattcgtctcgcgaattagtccaaacttatggaatgggttttgtaattagtgtatgtttaatactccaaattagtgtccaaacatccgatgtgacaaggacttagaataagtccctggaaaccaaacagcctctgaactactagaatataatagctggaccactagataggccgtttgttaactgttatacataggccgtgtttaatagttcatatgccaattttttttacgtatacagacacacatttaaagtattaaatgtagactaataataaaataaattacagattccgcctgtaaactgtgagacaaatttattaagcctaattaatccatcattagcaaatatttactgtagcatcacattatcaaatcatagcgtaattaggctcaaaagattcatctcgtaatttacatgcaatctgtgcaattaatttttttttcgtccacatttaatgctctatgtatgtgtccaaacatttgatgtgacataaattttggaagtttgaaggaaactaagtgtgtgttttagttcatgctaaaattggaagtttggttgaaattggaacgatgtgacggaaaagttggaagtttatgtgtgtagaaaagttttgatgtgatagaaaagttggaagtttgaaaaaaaactttggaacttgttaaagttagtcgatatagtggaacaacaactaaccttcccgatcgcttcagtcattgatcacctaagacatgtgttgatacgaaaaacacacactggcctgggagatctgcttagcttcagtgcaggttgctgagatgcgggcgtgccagttagtttgatcctgcaactgacaagatattcaaataatagatcaatgagccgatcggctgacaagccgatggagcaatctcagccgatgccgataccagccgatagcgatagggttttgatcaatcggctatatgtccaacgtagataatgatataaaggcaatcaactgatgataatataatatatcaatataatccagtagaaaccaatcagctaacaatatgatgtaaataatgatataaaggcgatcggctgatgatgataaataacaataatatagcaatataatccagtggaaaccaatcggctaataatgatatgatagataaacatcaatccaaaggttaaagcatacatcggctgtaggtccattgtcataaaatctacaagattagattaaatagtgaaacctttgttccgatcagctaaatccaacttatatgtatatgcaatccttacaagccgatgcaacgtacagataacttatcggctagcaccccgataaaatattagcatgaacctatcggcttaataagacttatattatcaacaacaatatagtaggtcgaacctaaccgatgcagcacgagattgtatatgataatctaatactcggtgagccgatagatctatctaatgtgatggatataacaaatctatttagaacagcactgtgatcgtagagatatatcggctaagacagaagatcgaacctaactaagacaatcccaactaaaccgatgtgtctctaaacataatacaattagagatagaattgagatatcaggtaggcggatatatcaaccaaaccagagcgatccaagagatcgaagcgatgcagccttgaacaacaccaatatagccgacagattcaccagggccgacgaaacgtaggacttaccccttcgccagagatcgaaaaccgatgcagccccgcgtcaggtgccaagttccgtcggatgataagtaaaaacctcgggaaagagggtggcaatgcgccaagagtagttgtattgatctgtgtgataaattacatagaccccaggtgtacatatttatacccatgggttgatacaagtccttgtcggacaagaaagaaactttcctaaagataaaaggaaaacataaagtccttatcggacactaaacacactttcctaaagataaaaggaaactaacaaactattcctaattaatagataaactgccatgctgcatctttcttgaactcggactcttctggataaattccccttagttgatccgactccatcgagaacacggttgttggagatttgacgactcccattggatgattccataactctgaagccaatactgactctaagctgatgatgactttgggcttaccaaatttcatcgttaacaacatgccagatgacgacataggaacacacgatatttgttaacgaggttcagccgaagcatacatccccggggctctgattatgggcgctcctccccaaccaatatagctcctagccgctacgagtctatggcctcgtcgccatcctctccctgcgtgtctacgatatattgtagttgccatagttacattgtggtgcccccctctctattttagagagatgacgggttacagagttcgactctaactccaccctctaacacctattacagctccaagtccaattgtaaccaaatagaactagtatattcgacacctattctaacagaactaaacacggcaaaaattttcctacacacataaattttcaacttttttcttcaaacttccaattttagtcaaacttccaattttgacgtggaactaaacacaaccttggtacaaatcatcatgcaggggcatgaaaacttccatttttttcttgggagtgtcagtcacttttctcatcccttggatgacaatccaatggctcttatcattcccactattaattattcaaaagaaaatcctttattttcacaaataaaagattaaacaaaaaattgcactgacctaacatggaataaattatcaagttataaataaatacatgtaaaagtatccaacttggataaacataaatctacaacgacaaaatcagggctagaatgaacaaaacttgcagaatgcatagcactaaattaaatttagtgtaggcttagcaatatgtatgtcgagggatgatcctctctagcgggaggtcgtgagacccccctttcatgagttcggccgggggaagaagctcacctctagaaaccacgtgtccgtccctaaggctactagctagctcgcacacaatcaaattatacaggtttgggccgctgagaggcgtaataccctactcctgtgtttgggatttagattgagagttacaagggttcctaaactcaggagaacactcttctcctagagctcaagttctttgagggtcgtccccctctctcggtgggcaaggtcctccttttacacctcaaggggataccacatgcaccgcctctacctactcttctttcgggtggggacccaccctatcttgactggaactcgacccgtgccttcgcctggaagctaagccacagcttgtccttgagtggggcccaacgccgtccctcgcctgacacgggggacaaccctgtcattcccttattaataggtgaagacttgtggtggctgccgtccgaatgaccctccgatgggacgggtcatacgtacctccactccgccggaagcagacgcgacgtgggagcacggttgtcgatccagtcagacgtgaccggcgtcaggccggtcacagaccggtcattcttgactatggcgcgtcagcttagcacgccgcacgtctgcctcactgtattaaatgcgacagggggcagttggggcgttgcgctcattaaaggaggctcagcctgggccccctcctcgctcgctccccccgccaaatggcggctgggcgagggcctcggggcaaagcggtgcaagggcccgaggggcatgacgtggcaccccgaggcctcgaccccccggccgctcctgcggttcgcggactgcgggggcaggactaggctgtagggacacatagcaggatagaaaggtagattccccacacttcgcatacccccggacccatatatctgacaatgtagttttagccaactgaaaaactatgaccctgttcttttcttcgactaaagttgaataaaattatataaatttccatgcccctgaaatgcagcggaaacccttctttcttctacatatccacatgcattttcccttgtcagtgagaataacacctcaaatcagagctgggcaccttcaaagtgcgagaactctggttggctgctattgcaaaaaaaagagatctggatggccgataagctgcaaattagacaatggctcaacaatcacttctgtcaattctactattggaacttgaaaagtatgcaacaccgctgtaaagactgtaatgtcgtgcggcaaatgtgggaatgaactttacaaggagtaagacatgacatcgcaaacacgcatggcaaagatgatacattggtgaattggtggattaggcgaacatcacaaggagaaaagcataaaacgtagatcatgaaattaattcatatgctagtgatttgagggatatgatgtgagcggaacaaaagagtaccacgcctattgagcaagaccatcgacgaaatcagggtgtatagcatgtgtgtctataaagatgtcacaagaatatccattagataaaaactgctcgacgtgtatttttctctctttgttcctgtgttgttgggtccatccttctttcaacaacgctaatttctgaacggataaatgcatttttcgttgttttctacggtaaaaccacaggcgggtataggatttgtgcaaagaaaagatcagaggtggatcatgacataataaggaggtgctagtatacctgcatattacgtggtggccgttggcgcttccgccaaattggagaccgaggaccccacaccgcgccaccacctcaaaaagagaatttcttttcgagaagtaaaacgaaataataaaataaagaaaaggaaaggaaaatacacgtagtacaaacgagccagcggcgagggcgaggcgagtttatctagccagcggcggcccaccgcccaatctctctctctctctcctcctcggccgcgtaaaacacctcccaccgcctcctccaccccctcctcctccccccgcagagccgaaaccctaactccgccgatctctccaggtgcccaaggggagggaggggatggcggcggcaccgggggcgggagggcagggcggcggcgggatggacgccgtcctcctcgacgatatcatccgccgcctgctcgaggtgcggacggcgcgcccggggaagcaggtgcagctctccgagtcggagatccgccagctctgcactgtatcccgagaaatcttcctcagccagcccaatctcctcgagctcgaggcgcccatcaagatctgcggtacgtgctcgccccccccccccccccccccaaaccctctcccgccgtcgtgtagatctgctttggccgcgcggccgaaagctggtgtattgtgggggagactgcttctctgtgtcgcggccttgaacaaggctagcatcaatctgtctctcttggaaagtatggtcaagggcgttatctattttttttgcaacttttttctcgattgtagttctcgtgaggtagatttttattgaacaggttgtttcgtgaacattttcaaaacgagcacattcacaagggctgagtgagatttcctttaattctgactgtgttatttcaaattttattagttcgcttgatattttaattttcggtattgttcgtgtgcacagcagcttctattgtctagcgccatctgattctactagataattaaacctatctgtcctgacaactgttcgtccatagatgatttgtaacaacatctagttaggcacggcagagtgtagatagggtcatgttgaattgttttctcctgatgacactgattaatgatgaaacgtcaaccactttgtacatgccaatttgaaaatgacttcaagtttgttgacttgattttctgtggtcagtgagttaatagtaaatgtgggcagctgtaaccacttccaggtttgcagccgtattgaaattcccaaccatgaattcgtaattctgcagtagtttccttagcaatacgatctactgagcatttgctcattgagaacaccagttggtagactatttatttgctactttcatgtattgttagtatttttatcctctgctgttgaattgctggcattgcatcatattcggtgaaacattgtaatcatgaaaatgagattatctatattagcggtagcactaatcatcccgtaagctagtgcctccttttccgttcccagcaaccatcctgtttttttttctgttcctgtccctccacttcggcatcccctctcccgtgatcccgtcttttatctgaataaaaagttactatcctggtatcccctgccgccctcctgctttttaagtccgtccacttctgcatctctctctggtccgagtaaaataattacaactttgagatttattcttttttttataaaaaatactgtatgtcatctgagtaaaaaaatacttctataagttcaattaaaaaacccactccctattaaggtggatcagtggtaaaagaaattatacacattcgtcttgtctttgcgtttaggttcattagtgatgttgtgattagtaacatatttactccgatcttccggacaacaaaaaaaagacgagtaaatcttacaccgacggctaacctcaccatagtagtgtccttggctgcagatctcccaggaggggccagtttcctccctgctcctcccgctgacggagatggaggagcttggcgaggtcggtgaagtagggaagcacgagaggagcagatagcacggattgcgttgattgcgcagatctgtcgccgatggcctcgtccttgacccaacctccaccttgggctttgcttgcgttggaacctctgcctcgcttccaatctgtagcacactgccacagtcgccatcgatttgcagttgatctccgccgtggaggcaccgcttgccaaggggtggggatatggttatggtgcgctagtaaactcactatgtcccaaaatatagcaagttttagctatgaatctggacaaccacttgtccaaattcatagctaagagttgttatattttgggatggaggtagtagcggaatggaacggataagtgggagagcatggtgtggcatagtgtgtgacgagggtattggaggcacgctacatgagctaaatagggtgctaatgctctgtgcaataattctcctaaattagagtgaatttcataaactgcaattaatttatcaaaaccattgctttgctacaactttagatgggtatttcacacaatagcaaacgatttatcacaaaaccgcacctttagcccccctttgtgtgtatgacaggtgcgactaaaacttgccaggcaaataaaattgcagttttctgataaaatcgtacgctattgttgcaattctctgaagtgtctagataaagttgcagtaaattgataattttgacaaaatagttgcagttatctgaaatttactcttttatattatctactacagcacctgtttgtgttgtattcatctaaaaaaagggttgtgtttattggagtccaaaataatgttgagctcatttctacttagcgccttcttggggagtttcaatctgtagtgagcctgtaaatttgtagctggtggctctaaggtgtgtatttaacttttttttcacttgtcatttggtatccaggtgacatccatggtcagtacagtgaccttctaaggctttttgagtatggtggttttcccccagaagccaattatctattcttaggtgattatgttgatcgaggcaaacaaagtttggaaacaatatgcctcctccttgcatacaaaatcaagtacccggagaatttttttcttctcagaggcaatcatgagtgtgcatcaataaacaggatatatggattttatgatgaatgcaaacgccgatttaatgtgcgtctatggaaggtcttcactgattgttttaactgtctccctgtggctgcgctaattgatgataaaatattatgcatgcatggtggcctctctcctgatctgacacatttagatgagataaagagcttgccccgtcctactgatgtaccggatacaggtctgctatgcgacctactttggtcagatccaggaaaagacgttcaaggttggggcatgaatgataggggggtctcatacacttttggtgctgacaaagtttcagaattcctggaaaaacatgaccttgatcttatttgccgggcacatcaggtacaattttaatgcaacatcttttcctttcagtattttttttggtcaactgaggtgatcatatttatatttcatgtgatgtcaggttgttgaggatggatatgagttctttgccgacagacaacttgtcaccatattctcagctccaaactattgtggtgaatttgataatgcaggtgcaatgatgagtgttgatgaaactttgatgtgttcttttcaaattcttaaacctgctgagagaaaaggcaaatttatggcatcaaacaaaatgtgaaatggtgaagcccatttcgctcatagcgactctgaggtcagttgcattaccttgttccataagtttgccatatagtttgtgtggcttgaaaatgtaacatgtttactgtgtgctgcatttaactattcacttgaaaagttttaaaatgtatggtgtatttgctctatgtttgatgtagtaatgtgtatcataacttacaactaaattttattttataagtatgttaagttgttcttagtttttcttatagtttgttgtatgtgttggccttgatatttctctccggagtaaaattggctctaccttataggccatacctgtatcagaattttatcccagtagcatatggtacacaaaaaaaaagctacctgtccatggagagtaaaagaattgattaggtgctttgttctccattgctgatgttatgcaggtaggaatacaaaatagatccctagtcgcctccgcgcaaatctattttgtatgtattacactagttgagtagtcattatcttttgagtagtcgttagtactcccttcagtcgcaaaaacatataatgtattattcatgattatactttgttttggaaaattgctagcagaaaattacttgttctacactaagcaatataatagtattgctagtgtttttccaccaataacattttccagaataaaatccttcaattgtattgtgcacaatcttgtggagtactccctctgtcccataaaaaaccaacctagtaccggatgtgacacatcctattactacgaatctggacatatgtcgtactagaatatgtcacatccggtcctagattcattttttatgggatggagggagtaagcagaaagactatgctggtcgccttgttgacaatcgccataccaggtcaagttcatagtgcctactttgagttacaaattgtaaccttggaatttcattaggttattggtttggttcaccagcaggtgttatgcactcagtgaatatgaatagaataatttaggagcccttcagacgatacagttgttaatttatggttttttattaaaaaaacactattttttgtccttttgatataattattgattgaaataatcttatctgggcctgtaactgtgagttgtgacatcatagttggaaacataatttggcaatataatgtgtggagagaaacaactgcaaatcgggcccaccaccaattttgggagaatatttcacatatacaaccataactcatttgcaagagcctagctcatcatgtaagtaggctggtgcagtcgtacggcaaatgttctgcttgtgttaggcagataatcaaccatcacaaatgttctgctcgtgttagtcagatatgatactgcaaacatcattttatggtttcagctggttggcgcttaattatgatcatgtctactgtaggctgtcctgtggatgcatctagacatcaacgtgcaggcgttaggcttgaagcaacattgggctaattctaccggagaagccaaataatatcatatctaacagttggtctggaaggttactcttcatggcaagtgccaattttttttccattttctgttatgatgcgtgaaactatcttgtagatgtagatatattgattatggaaggatgaagttgccaattgacctgaggcggtttccttctgcagccaggaaaaatctgaatatggagtttctgtttggtagtttcactatttaaaagcacatgtatcacttgtatggaggtaacaactttacttatgcaagcccgtgttttctgttgcttgtaagcaaaattggatgagtttttatcttgttttctatagcgtgctaatattgccaatggcaacaatttgcgaactgcaattctagaatgtactggatgattgaacctttaagcatttgcgaactgcaattctagagtctagaagtcctctggaaaggctaatgaatggtttatcctgtaaactggaccagcttgacaggtgctgcgtgatctacattgtatacttattttgtcatggtgtttccttccatgtgtcccactcaatgtttaggctgcgttcttttcaggctagtcggcctcgttttccgttagcacgcttttcaaactactaaacggtgcatttttctgtaaaaagtttctatacgaaagttacttaaaaaaatcatattagtccattttttttaaaaagaatagcagatacttaattaatcatgtgctaatggatcgctccgttttccgtaatcactgttgagaagaagaaagaacgcagccttaaacagcaaacgtgggtgagccttgcatctgtcgtgggaggctgggtggtgatttctttgccagactccagattcttatgccagctataccatgatgcacgtgtcttcacctgtcaaattctgcccgtatggagtgtcactttacctaaaatgagaataaataaaagccactagtacgttgtatactactccttctgtccaaaaagaaaaaaaagacaatccctccgtccaaaaagaaaaaaaagacaacttttaggtttatgtgtccagcgtgtttccgtgttcagcgtttgatcgtccgtcttatttaaaaaaaattaaaaagacaagtcacgtataaagtattaattatgttctatcatttaacaacaataaaacactaattataaaaaaatttcatataagacgaacagttaaacgttagacacagaaacccagggtttttcttttttttggacggagagagtactctccaacaacccagggtttttcttttttttagacggagagagtactctccaacggagattttagggagatagtacaatccaactaatcctttatatttttgggatggtgggagtaataaactgagttgtagctgctcaccatccatacctgcatagtatcatcttcgtacctaggattacctccatcccaaaataacaaaggacaatgagtttatgtacgtgaatgtggacataatgagtttatttatttcgaaacggaaggagtattaaatcatcgaaagtgctacacataggccttgtaacctatgatccgatacatatgaatatcaaatctggtaccaataggtatcagaattggaagatttggtaccctatgaatatctatctatgggcttgttcggctgccctataccacggctgtacagcagcggcagctgccaccatatatcttcgggcctgttcactttgatgctattttcaaacataaaattttttttggtaaaattgctaaaattttggctacttttagtttgttgtcaaatttggtaaatacataagaagtcctgccaaaattttggcaatattgtcatcttgtcaaaattttagtattgctaagatttattttggctacaacctaaacatgctcttcattgtattatactgtggctggctgtccactagcagtaccgaacagaccctgtatttctaacgtcggtagttctgccggcttgtgattggtggatgtggcaagcaatagtttgttgacacgtgttgcttctcctctctcccaatttgtgtgaattgtatgacaagccggttcaaaaaaaaagaaaaataaataaattctagagactattgagtgtcaacataacatccagatccttcatatcctttcaatctggtttgatccaacaaccaattcaatgaaaaatctagaagcgaactaaaggggcaaaatccaccaggaaccaaaaaaaaaaaagtatctaccacctctcagacagaaaagagtccacctgaaaccagagccctatggtaacctcgagctgccgacacgagcgatctggtttgaggtggcttgttttatcgttaaatgaattttaagtctgatttatattttagcatatttaccctatttttttataaattgaatggtcaaacatcatgttaaaagtcaatggtgtcccttcatccaaaaaaaaaaaaacttaggtaagtatggtaaacaatctaatgacaacgaatctgacagccacctatccggatttgttgtcttaggaatttaaaatgcattaaaagaggtcagtttaaatgttttttctttaaaaatacaatctactacatgttaaattcaaaactaaaaccccacaagaggttcttccaaatgtatggtctttgtagaaatttaatttgaattgaatcaattctcaaataaaatgttttagaatggactgcaaagatgacgacgccaacaagcacgtcagatttgttaccctatgaatatcatcaatttgttgtaggttttgtacttaacaggcgccaatacctatatgtaccaatctagtaccaacaggcataagacttaatacctaggagtactacttatatcataccatcgtaccgttccagaacagaaaaccgtggtataacagcccccttaatagttttaatttcaacacaagcaaatctgattccaaagtccggtggcgggtgtactcgttcatttgttactgcccccatttccaatataatacaacagtgaaccgaatgtacacgtacaacaatgttgactatagttgattgtaactctacaaatgatcgttacttgctgtaagctctgccttttgtgtgtaggcaggtaaggggggaaaataatcggtcatccaaaattactggatcgttgcatatgtttcttgtttcattttcattaagttgctctctatgcctcttaacacaggtctatatctgcataagtgatggcaacagttaaatttcaccaaacagaggggaaaataaaatgcagaatcggacaaacaataatagtatacttacaggcgtgcgaggttattctgcgcttgcaccgcttttctgagttcagctgaaagtttcattatttctgccgacaacccctcggatctgctctgttctttgatgagctgatcctgtagacaatgaaatatgcagttgtaaaccaatgacatgacaataaatagatttgactagtcatggtatagacaagaaaatattctcgacagctccagcaatcaacctttagggagagattctcagttacaaactctggcgggaatgaaatgctggtctcgttctgcccatctggctggatagtggtattacttgttttcaatagagtagcttgctcaagtcttaacttctctaagtgagagcgtagctcttcattttgcttgagacaatcttttacctggaaattgtgattaattgaacacgcaagatgctggtatcatccataaatgataaatgtttgtctctccatgcatgaaatgactgataacagcacacctggttttcccattgcattgtaacagctacagcttcttggtatgaagtagacaaggctgagttctcctcaaacagcttttctatttctgatgattgagaatcaatctgtcaaacacaatccaaaacttagccagctcattgggaacttattttgttcaaagaaaaggaaggcagcatcaaacacctccattaacaacttttggcggctgccctctagcctctcaaccatcaaagccatatcatgcaattggctttcaagtttttccctatcttcctgcataattaaaaaatggccagtacagtttaagattgattcgagcccagcaagaagattacggcgaacacttagcattacaagtttctaatcacccctgaaaattttgaattaagacaagggcattcaggcttacaggtgtccacctagcctgttgtaatgcaagatctcatctcagttttacttttgagtccttgataactatggactaacacatgaagtatttaccttggcaaaatcttaactcatggaaaaacaaaaaacttgaagtttgttcgatacattaccattgaaaatgccttgcgtgcagcaaattcagaagcttcatctgcatggtaggggaaacttatttcatgcagtttaccagtaaaatatggaatatctgaaggaacggaaagcagagcagcatgacaaatgtggaagtaaaagactatgctgaatggcacgtttactagagatagagtaccctatatgaagctacaaaatatgtttcatatgcacctgatgctttcttcgtcaaggcagcaattttttcttccaactctttcttttccgcaaccaaggaagcagcatgagactgttctccagttagcttttgttgctcttgttgccttaatagggactcttcagaaagtttctgttgctcctgctgccttagcaatgattcttgctgcattaaccattttatatgttagtttgcttagatagaataatcaataataaggacaagcataacactgaagcaagacaaaatgacctaccttcagctgagcctgcaaattttctacctccttttccatagcaagaatgtgctcatttgatacaccaactggaaatccagtataagagttgctcattacttgctgctgcagggtatttaactgtgctctcaatgatgcagagtcctcttctgcctgtaaatcataagattagcacactaatgatatgactaaggatgcacaatttttcaaaataccctgtattgctcctcttctgcctccttcagtcgtttcttcatgctccttagttgtgcgagagcatcctcctacttagcataccaggtagaagtgataatggggattagacatatcagaatcgtgaataccataaacacgaagacagtcaagtaccttagcaacagctgcggcatctttctccaaagaaatgtcattcacagcctttttcaaggagggtactatattccgctcctgcaaacagcgaattaatccccaaagtaaaacgcgtgcaaaatgtaagccatatgcatcaaactgcaacacaagtaccaaattaaaatgcacaatatgaaactcacaaggtcgttcaagcggttaacgagggaatccttctcgacttccttctcagcaatctagacgaagctatgctttgttaatactacttcatccttcaggtaactgtaccacaacaatactgaactgcagagaaaataccttggataacagcatttggttttccctctccaatgctatgttcccattttcaagttctctaactcgaccaagaagctaccattcataccaaaagccttagttatagtctagaaacaacatgagaatttggatacgtacttgccacgatcaatgttcatccgaactattcgacacaaaggaaaggggggcaaacctcagctccggctcctgggttccctacagaaaacaatcgccattaagcccacaagattagcactgaactacgaactgttccaggggaagagagggatggaccaaccgtaagggtcgacaagggacgccgcggcggccgggttgtgctgctgctgcatcctctcggcggctctcttctgccggatctcctccagctgccagacaaacgcgcacacaaaccccaacacaaatttgagcctcaaatcccagatacaaacgagacgcggatctgaaacgcctcgcgtcacagagaagcaggagggagaggagaggagaggcatacggtgcggcgcccccgcgaggcgtgattggcttccatctccggcgaccggccgacgaaccggtcggctttctggaagctcgggatccggaggcgcgacgcgaaggaggatggccgatggcgggggctcctccggtatcgcctcgatcctgtgatgcccggagaagagaaggggaagaaacccaaactcgtgggcctagccaacgtgttggccttctagagttcacaagccggcccgtacgagcccgatcgggcaggttattcagtacccccatgcgttccaaaatggagtaacacaatcctgaacaggcattttatctatgtacatagttaaaattagttttttcatcctaaaaataatccaatcctaacgaagaatttgaacatacatttcatatcttgtctagatatttagtctgaattgttttttcttcaacggagggtgatatatgaacacgacaatgtactcactccgttctcaaataattcatgcggatactattcaatttaaactttaattaactgtcatttttatagataatttataaattactagaaatgtaattatatcatcaaaatgtgtggcattacaaatataaccatcaacctttctcaaattcttttcttcttattacgtcgtgtaacaaaattcttttcttgtaatatactgacgtgcaattattttgcgcgttcgcgaaaaataaccatcaacctttcatttatagtaatataatcacttaaaactttcatttatagtaatataatcacttaaaagtgatttatggtcaaagcaggatggctctagtaaattgtcagttatttgttttagttgtgtcagttattcaagaaggaagagagtattatccactccagtcaaatctattgggtgcattggtggcggagaaaaaacacacacacaaattcaattcataattaacaggacttggacaagttagacagcacaactcaaaatcaacgatgacttggacaacatatgcagtgtaaaagcccaaattttaatgaacaaaccatcgaggtagcagtctgctttacatgtccacaaacgaccatggtcgggccttcagctgccaacctgagctgcctgataatcaggcgtaccatgcaagcacaccgagctcacgttacagtaggcagtttgggcaagttacactggatttttcgctacttctccctaatcggagcacgttctcagacatgacatatcttacacgccctcgtttgggccaacgaatatatgtacaggatgaaagaatattgtacaggtgagcggtcagtgccgctggtattgcaacgggacgagcctagcgttaacggcttcaatgtatgtgcgcaggcggcgtcgatcatctcttgttagggacagagcggggttcagggcgagtgacggtgcctcagtcaggagaaagcgcagcatggatactgccttcgagtacagcaccatggcagatgctgatttccccatcatctcatcaacctgcaatttagcataacaaaacacacaaaaagagtgggataagagtgcacaccaagctttcgttctgctatgtaagacagtgtgcttgatattgacttacaccaccatgtcttcccaggttaagcgcggtctgaaatatgatttctatcgcatctggcatttctgtagcatctgcaagcataagctcacaatcagcaattcagcattcaagaagttcaaccaacgatttaaagctcctaggcaaggtaacataccaactgtctgtcctatagtgttggcaagttcttcagcatattccatttgaaccaaaaactgactctctatctccatgcatgtatcatataacagttgagagtttgcaagcaaatggggagcatttgagccaaaacccttcgcggtgacatcatgggaaggattctctcttgtggcagaagatgcataagaagtgcagatgtaaattgcttgcttccaggttgcaagaacaactagctgaatcgagaatccctctaagtgcttggcatctttaatctacaaaagtttgggtggttgatcagcaaaacaaaagcatggttagcatttgcaattgcatagataaagacttgtctcaggcagatgaatgaaacacaagaccttagtttatatggtaaataagcttcaccacaatgttttggacagagaatccaaacatatcaaaaggatgagaactttggtcaatgttaaacagaaggaagtcaaataggaggcaaggaaatttgagtccactgagaagaaagttaccttttctttcaccaattctgctatggtagacgcatactgctccaataatctaaccctggtcagacaatcagatggtggttgatccatagcatcgttgagatctgcagatccttgtgaagtaccagatactggagagcagtgactgtccaagctaccagttccaccagattgctgtctgttaattgccatgccatgtattggccttggtgcactcacagcagttaataacttcggtggtgaaagagaagaactgtcaagttttgatggcatggtgcgctgtcgggagtcattcatcgaagaggaggatccctctgggtgcacaaagacatattcctgatctacaaactctaatgaatcaatgataggggaatctacatttacaagtaaggaaataacaaatttagtaagaactttttcacaattataatgaaacatgtgatagtcacaacagactgcaataccttctggataaccacctttagggttgtgcccttcatcacccttgttttccttgattctcctaggatggtccaggcgttgactactagatgcgtaattatttcccctaatatatttagagaccagacttgaatgtttcgttggactctgacctgaagttttatcaagccttttactcgtggcaaacccataggattttattgcactcttactatcagaaacaggaccttcatcctgtccagttgactcatcatccaaaggaaaaggcatacaatcttcctgagaactttggcttgaaggtctcgtaggactgctattaatgaatggaaagccatctcttatgtccgatggtgtccggctgtcaatgcaatacagaatatcaaacatgtcacgtgatgctgtagaagtaaaactatagcaaagaatatattacctcaaggttctctccaaagcatgttcagcgagaaatggatggttcacaaactcttcaacggtaaggcgttccactgcattaatattggcacagaatcattaagtattaattctcacttgtaacgtcagcataacaataatcatgtaaagtgatagttaatctgctacttttgaacaaacttaagttgctttataagtgcgacagcccacagggtttcaggattatgacagacagtaagcagtggtataaactgatcgagtgaagaaaccatacaactgcaatggcttctaacacattgttgatcagataaactactgagaagcaaccaaatatataaacttccttgggtgcagcatagttcatgagttgtgtcctgctgcatgccatggagtgtaacatatttcctgcaacagctttatacacgcagaaccttttttttttctagcacgaataaatctctaagctgtcttcatgtaagacatactgattacaagactacatctagaaggtcacatgtgaataatataggtgagaaaacagggactaattacaatgtcacccacccaagtctactcttgcatgatagtcattcatgtttttctttggcgtaatatcagtcatgtcacagtataattctggaaaattttacccttcctggtaaggatgtaagaaaaaataatgacatgtggaagtcttatgaaacttgtttttatatataactatacataagtgtagcagaggattcgtacctgaattgattcgcagtaactttctgcataagtcaatgcagccatggctcaagtcgcaatcagatggaaatcgtatttctcgtgtattgagtatatttctcagcaactgatgggaaataacatttttcagtagtagcctgatttaataatgcactagaaatcaggtcatgtggaaaatttgaataaacctggatttgactatccccggtaaaaggaggagatccggtaacaagttgatatagaattataccaacactccacaaatctgcctgttctgtcagaaatcgggcatgaagcacgagtcaagaacaggtaaaagtacatgataaagctcacaaggaagcagaaaaaagccctgacctttgcatcatacttctgagcttgcatgacttctggagccatgtaaagcggtgaaccgcaaagtgtttcagccagagaagaaggttctaaaaacctgcttgcaagaatagaaaaggtaagtacacatttctgatactatccgcgtctaaccctcccaccaagcctcacttgatccaaccatcgatgaatgagaagcagagagaaagctgaggtgccaattttgtcatggctgtaattaaatatgcaaggaagcagagaaacacaggatcaagcacaaagcaacatgatcttattctctttccctgcacgatacttatctagttgtcctcaagaatgtttcgtacttagcttttatgcacagatttttgtgtaaaactctgtgtgaattcaaaggacattacattacggagtaggactgttcaataaaaaaaagtagaattgagtgtagagaattaattggactcaagatagcttttttttttgtaacaatgatagcttaattggagtaatacatatgcgacataggtgtattggtacatgaaatatttttttgtaacaatgaaggcatgctgtagttgtggagccaaatcctgaagggggcctaaaaagtgatgcacataatatttcattctttaaatggaatgtctctaacatctttcaagacatgaagatgagactttcaaatgatgcaccttttcttttgaaatagtgcaaattgactgtatttttttcagaacttcttgagaagttattccattttaaaatgcacaacaccgtttctttcacaatactgcaatttcatttcaggtaggagcgatttctacagacctattaggggattcttaaaccaggtatcaaactcattgctgataaactcaataaaaaaggccatgtggaaaataagataatataactccaaaataaaagcaatcaaacataagtaacttactttgcaaatccaaagtccgcaatcttcaagagggaattttcattatttgcaactagaagaatgttctatttgaacagccacaaattcaggatagaaaacaaaacaaaatgtcaggaaattccgtttctttcatcaattctttgtcattaaatatgaagatataatggaaatatccactcaataacagtaaattaaataatttaacctgtggttttagatctcgatgaaccacgttgttttcacgcagcatctgcagaccagatgctgcataaagaagagaatgtgattttggctctggggagagataaagcaataaatagtgcaagacactgagggtctgagaaagtgcttgcctagctgctggatgaaatgcttagcaactgtttcagaaacccttttatgctgctgaaggtatgagtgtaagtcaccacctcgacagtactctaatacaagatatattttcccaccatcctaaaatcatcaaataacaaagagatacgcaaataatagttagatatgagagtgaagaaataattatgtccaacaatctccctagagggaagcttccctttcgtggaacacctagaaatattaatatcggaggcataattaaacatgttaggtatgcttttgaactctaaggagggaacaactaatggtatagtttcctaaattccaccagaaaatatatccaaaacaaacaagttaccaaatttggaattttaatgttttgcttccacagccagcgaacaaacatccaaagttaaacaacttacgctatggtactagcattaagttaaaactttgcatagtatcaccacccaaatgaacgtcaagcccaatgagttctcctttgcttgaggcatctgaataccaagaaagctcagaagaattcaactaaaagagagactataagaactcccgattttattcatccgaggtttataaacagtcgccgtccgcatgaaatcctaacaaatcgaacgcaattgcgcaaaatataaacagtagaagggcgttgatccgaggatcggggtaccctgatggactcgtggagggcgatgacgttgggatgacggatgcgccggaggatgtcgacctcggagaggaggctctcgcggagcttgctgctaagccgctccacggcgatctccttcaaggccacctccgtgccccgcgtgcggtgcttcccgagccagacccgcgcgtacgcccccgacccgatctgccgcaccagcacgtagtcccctaccctccgcacgccgcttcctccccctcccccgccgccgctccccgcggcgcggtcccccatcccctctggtcccgctgcctggagcgcagttcgccgcgaaggacgtgagctccgccgccgccgggagagatgccgccgcggccgcggggagaagcaaccgaattatctcgccgcgcggaacagagagagaaaaggggaggagggccaggtctctactcgcggcgtatggttatccctttccgctggttttataaagattcctccgtcttttgcaagattctcctgatgtgcccatttattttggccgaaaaaacgatatagtatctgcatcataacgtttttaagtactaccccacagtaagtaagtcgtttacaataatgtttaaatcaacccttggaaatataaatcatgaataactctcaagttgttgagtttgaaaaatgtaaaaattatatgtatagatttgtcttgaaaaatactttcataaaagtatacatatatcacttctcaataaatttttttatataaataagaagtcaaaattgtgttttagagaccgtgtcactgtcctaaacaacttacttttacgagtatgagtatggaggttctagcatgctttattgtttctttttttctcacagaattgtcccataatattcagtaatattcaggagtatggaacaatttgacattttgtgtagcaatagtaatctggtcatggcagctgcgaaattctaggcttggattgaatctttgtgtaagttggatttctcctgaaatcagtttggcatatttttggtgtagttggtgcggaccggatgaagacagaaaaatgccatgatgcgtcgaatggggggtcaattgctaccacaagcaagacgacgcatcacgtcacagctttgccgctgttgcggctactctcatatagaaaacctaagtcccagaaggcaagttattttctatcaagtggcacacaggatgacaggaatacaaggatacaatgatcatttttaattggaaaaggagcagcagcacgccaacaaaaatggttgtgaaacaccagacaagatatctttaaaattgtgccaaactcgggaagcaacagtaagctttacattacacaggctacatgaaaagacagcattggtaatcacttcaactgccgcacatttacaattccaagatatgatgcattacagtaactgatgtctgatggacactccacaattgtgaaggagaattgcaataccagtgtaccaccatagcagaaaacaagaatcacccttgtctgttcagtccttcgtagttttggagcaaaagataattgcgttacgtagttagttccccaagccaagttccctgggctgttagttggcattctattgtcattgacaacagcgtgggaagaaatgactgtcattcctggagcctccagccaagttccttgcattgctgttcatcaggctgcagagtattcggtatggcaccaaaaacacaacgggccgtttcaaacccagaaatcgcattatgaaaaaatgccgacgcctcctccatgttcttcttcagttcatctggagatatatacatgaaatactggggagagggagaatgctgcttgatagacatgattggtgcaatatcagcaaccctgacaaatctctctgttgctgcctcccaggaaagctcatgtctcagttcctctgacagtgggattggctcttcagccaatgctttcatagtcaatctcacaaactctttctcagtattgtacatgtggcagttaggaaaccttttgaagaattcattcgaaggatggtttgcacatatcacaattttccccatcgccaaagcttctgcagttgtcgtgcataccacatctgtggtgcttgggtttatgaaaaccttgtagctgaaaaggagataacaaaattcagttagatcataagtaaatcaataacataaatcacttctaataaaaacatagcccaaaatacaatctagcagctaaattgcttgtgaataacatttaaaccattacttttctgctaagtactcactcatgaaatatggaatctccatggtcacgaccaggatagactcgaacatcaagatttagtttctcggctgatgctttaacctcatcagaatcttctccactgccatacagctccatcttaagaccagataattccttctggtgcttctgaagcagctggagtagttctgtataacctttactccagaccatctttccaatataatatgcacccttgaagaatgcttgttctctttgagatatctgctgatgcttcagtttaccaatttcaataaattttggatttactccatggacattgcaaactattgaccttgggacttcctgagttgctgctgataatcttataacctacaaaagaaataacaatgaaagataaaaataaagcacatgattacatatcaaattatagacggaaaatgccataacttgataagaataaattctcaagctctcattatttaaataaatatggatacattacaaaggtttttatgccattcggcatcatactgtgcataatatgtggaacatccttaactttattcaaaaaatggcaatatttatctggtcactatgcgaacatggtgattccatgcatgatggaggcatatcacagctgttcatttcatagactaatgtcatacaacagctggtaatgaacttctagaagttaggcaatgtcacatacgtccaaagagcaaagaatcatatccatgttaagaacatattttgccatcaaggatgaagggtattactgagacaggagacttataaggttatatgaagcaaattgagatgttcatagttgaactactgaaaaactttaaaaatatgcaaaccagcaaaatagaatagaaaagaacttcaaaaacatgcaaacccagaaaaatataatagaaattgaaggtgctaaccttatggcagtagatgtcagtgacccaggaattgatatgttttaagagaaatgcatggatatatccatttctctctctcttgacatactccaaatagttggtatgaacaacacctataacttttctgaatttgtttttccaccttcgtccatgatggtaccatgtaagatgctctggctcttcaagaactgcaatgtctgctttatcatcagatacagtctgggtgatgtccccagcaggtagaatgcttcttttctccgttgagaactgtatggggagaaaatatgtcaatcaacctcattatgacatcacaagaacatcaaccacatgaccacccgctcaacttatactggcctttcaagttttataacactcagtgtctcattttctgctcactccactaccatagatatttctagtaattcttgtgttgaaggtactagatgcatgcatttttttaaaaaaaagaaccaacttctacggtttattggatttgcttctcaaatctcaacaagaatcagaacatacaatcctgctccattttagttttgacactaacatgagctaagagcaacgtgtgtagtgtgtacaactgtatggccaagcaatttaaactcaactgtgtgatgaatttttgcgaaccatgggaaaatcagaagcatcatatcaaacaagcaataaaccgtaccacgccattcactttgacattacatttagatcatgataatatcagatagaactatacagtactttggaaattttggtttactttacctttccaggatagaattttatctcaaacttcggcagcagcccaattcgctcctcgagccaccgtcgcacatagccttcttgctccccgggcacactgaatttcatcttgttaggataaaccagcagctggtcccccttcgaaagccatggaaccaccagcgtaacctcccagtccccggccttcgcgaggtaggccgctcggaagagggggttgacggcagttccagtcatccatggcaggctcgccgtggtgaatatggcgatatgctgcttcctcgccatcggcaccgagaccaccccgaccgcacaaagctgctgaaatgaccaacaagcaccaccccaccagcccttaaatcacatcgccaaagcgtaccattacaagtggccaaagaacaatgccggcatcccgcaaagccgtgccatcatttttcccccttatcccgcccatacgcatggagaatcgaatcatctcttggggatatttttttctttaaagaaaaacagagaatccagggagcatctaattcggcgcccaccaacatgcagccgtgattcacgaacactcggggggctaaaacagagagatccagcatgaccgcagcatcgatctaattccaaccctacccaccggcgattcaaactcaacccgcccagctcgagatcctaatcgcggttccaggacagcgcgcgggtgggaggaacccggcgaggggaaggggaggggaggagctggttacctgtgcgatcggcgcggccgcggatgtggatgggaggaggcggagaggagggagaagggggagcctggtgccgtggagtggatggcgtttcaggtttggccgttgggtgtggaggttgccgtcaccgctcgcacctcgcagtcatccccaacggaacggcaccggggcccgcaggaatctgccatgagggcccagattccccgtgcggttgggcttgggcctagaatgagacgtgaatctttcgtctctccatctattcggtgtctgtctcttgggccctccgacacatatcttttttttttatcttttccaacacataacttctatcgtttcgtttgtgcttgtatttgttcgtactacttaggttgagtttgaggaggaggagattgggaagatacataaaacgaggtgagctattagcgcatgattaattgagtattaactattttaaatttgaaaaatagatttatatgaatttttaaagcaacttttctatagaaattttttgtaaaaaaatgcaccgtttagtagtttgggaagcatacgcacggaaatcgaaacaaactcactcattttcttcagctgccgaacgcaacaaattaagaaattatctataagtaaaaaatttatgtgtatgtacttagtgattctaaagcaaatagtataaaataaactacgtaaaaaacacaaaatctacttcggaaggtataagcgaaacaataaagctacaagagttccttcaaatttgagcaaacttcaaagcagtgagttgttgctctatggcaaaatcatacgtttatattatggaataaggagtagaattttcttgcctctatgttcggtggatctcgcattctgaaatccagcaaccagtagcagtctagcagtagttttggataactcaaaaagtaaagtacttcttgttagaattaaattagctaggtctaatttaatcataataaattttatgggtctataattaatattaaaatattaatatcaccttaacaaccaacgagaccagtataccacctcgaattaaatacacactccgttccaaaatataaatatttttagaatagtgtaaagtcaaatattttttactttgactattaatagaaaaaataaaaaaagaatcaatcatgtaaaattgatgttactagatttatcattaaacaaactatcataatatgtaactcttttatttaaaaaatcttacttttatagatattattggtcaaaatagtatctcacaaattatgtcaagatccaaaaatacttatattctaggtcaaaggtagataagatcttcctccttgtctctttggttccatttctagttctccttgggtagactctgttgttttgtttatgtgtagctcaggctttccacggttttgttggtagactcttgttgttctgtttttgtgcaactcaggctttcctcggtttctgggtatttgcgcacatgggtactcgggacgagcaagcctccggaactttgtcagttggagtacctgcataagtaggcgggcgatcaagtttctgggagcgcttattcggcgcgactgctttgctacgtctccattgcttcctctgcatcaccatgtctggggagaatggcatcaccatgtctggggagaacggcaggaacatcgacaccaacgtcaaccccaacaccaacaccgtctctagatatggagtgttctctgagtatgttgttatattcacttttgtgttaaatatgttactagacgatgctattcatgttattagcgtgttcatgttttgtactatcagtagattatccttttattgacatgccatatttagcatgttacatttttgaattaaaatataccgaattatgactagatttctttgacttcagcagaacaacccaagagggtgtgtttggataatgggttataaagagtggaattgaaaatggaaatgaacgaaagattgtgatgaaatcctatttgatatcttcgtatccgagacacaacaaattctactatgtatttttccaaaatctttcgtcttcgtttttctttggaggtgagataaatggatggctaagattaaaagttttcattcatagggtggcattggatgacattttcataacccattttctaaacatgccatagtagcaaagccctttttaagctcaagtgtctgcagattctgaatttactactactagagaattttgccaggtggagtactaaaactcttgttttctgtttcatgctcagatggggaagctaggaatcctaggagctttgaggagttgttgagggagaatcaattgagcgctggccatggaagtctagctgtaaaactgaaacacgctgcggttggaagctgataaaagaaagtttctggtgaagacatgtgcttgaaagaacagcgtccttctgttaattgtggtgagggaattaattatccagcagtgttagtggcatgtacactgcacaccaccaccatcatctgcttccttgccaacatcgagatcttggatcataagcattcatcgctgtccttttcctttcaacaaataagaaacttctgcatcagggccaccaagatgaaaacgtgacaaagtcatggtctcatggaccccatgtcatgatagggctgttttaacaacctgggtacggtaaagtcgccatggaaggatccgttgttcgatgaaagctcgtagccttaattaactggattgtttcgagattgacaaaaacaggtaatagtactctaatgctgagtctgactctgaaagcaaggtactgcaagagccagaagagcttgaggtttggtaaatggactgaaagtcacataggagaagagagaaaaaacaatccagttatgcaaagtcgttctcaaaaagttatgcaaagtccatgatgaagaaactctctccctcttgtaatgaaacaagaacacagaaatgcacacgcactttatgataccatgtttagacaaaaagaactgcctttttttgtttttttttccattcatgtgacacctatctacaagcaaagactgaaacttggactcattcaaccatatagcctgatgacacatactacttgggacaacatgttacacttccagtttcagagacagttcaggaacaaatcaaacaacaaacatatcaagcacataatggcccccttcttccgacgcacttagcatcgtcaccaccatgtaaacgaaagacgcgcagattaatccttcgcctcgcctcgccttgtcacatgacaatctcgggcttgaggatgctggacttgatctccttgtgcgggagcaccacgccgccgttgctgtagacctcgtcgcagacgtgcacgtcctcgccgaggatggtcatgttctcgacgcgcgcccacatgccgacggtggagtgccacccgatgatgctgctggagatgcacgcgtgcttcttgacgcgggcgccgcgcatcaccgtgcaccgggacagcctcaccccggcctccaccacgcacccggggccaacggcgacgtccggcccgatcaggcaaccctcgccgatgacggcggtctcgtggacgagcacgttgcccaggacgtgcgcgcccgacgcgagcttggcgggcgccttcttcctaagcgagtcgaggtacagcctcagcccggtgatgtagtccctcggctgcccgatgtccatccagaacccaggcaggaccatggcgaacaggccattgtccgcggcgatgcgcgggaacacctccttctcgatggacgtgggcttcagctcgatgcggtccagcaccgacgggttgagcaggtagatgccggcgttgatcttgttgccgacgaacaccttgggcttctccacgaagcgctccaccttgtcggtctcatcctccatgaccaccacgccgtacttggaaggctcgtcaacctgcatcaagcagcaacatttctcagtgcactgatggtctgacactttttccacgaatgccagattcttcggtgtctcgtgataccttggtgaccatgatcgtggcctcgccgccatgggacttgtggaactggatgagctcggcgaatgggtactcgctgatcacgtcgctgttgaggacgaagaaagggtcgccggagccgtcagcgagcttgtcgcgtgccagggccagcggcccggcggttccgagtggctctgtctcctgcgagcaggtgatcttgataccaagcttgctctcgaagtccttgagaaagttaagcatgacctatgattttggcaaagtaaaacagtgtgcatcagtaagatctcagcaaccgacagaagcacgatgttcaacagcgccccatgtgccatgatatgtcagtttacctcgggctggtaattgatggccagaacaacttctgtaactccaacttctttcagagcttcgatctggtgagcagtgcattgtaaaatcagtccaaagatgcatcgagaaatgatgtatcagtgcaagtagcaacaagtcctttttcttctgaaaagaacgactaaataccagtctgaatcagatctttgattgggacatggaaaaggtcgaatattagttcacttcgataggaaaatggagtactaattgtttactactccctccgtcctaaaataagtgcagttttgcactgttcatgttcaacttttgaccattcatcttatttaaaaaaattttaagattaatatttttattgttattagatgataaaacatgaataatactttatgtgtgactattttttttcaatttttttataaatttttcaaataagacgaacggtcaaacgtcggacacggttccctacgactgcacttattttgggacggatgtaatatcaatttgtcacaactatttatgactagaatgaacaaattcagtgatgcaaatagatgctactgttgtgaggaatcaactcatatggatcgatccatcataagagacatgactagagtgtgaggccaataacatcaactgtctacatcttatccccaactcgggtaatggaacaaactgacatttttcatcttgcattaccatttccccaaataagttctccataactactctattgtcatgcctgacgaactgaaaagactgtattgtgagataaaaagattggagtatttgtgctgacctgatgcaggatcatgggcttgttcccgaaatcgacgagcggctttggcacgctgagagtcagcggccgcaggcgagtgccgaagcctcccacgagaatgagcgccttcatggtcgcagccctgctaactcagctcctcctcaccctgcgaaaaatgcagcaagcagcataagaacgatgagacgatctgatctgatctaatccagaacccgcttaatgcccgcgtgatcacggaggccacagtgcgggagtcgggacatgcccctgaactccaagacccatccgccctgtctagtacgcagatgccatgtgtgatgtgtcccaggacagcacccatgtcatggcatctgcgccgctgcagccgctgcagaagcggcagaattctgaaagtacaggtagcaagaacgcgatacgcgtgcgtatacagtagaaatcggactgaaagacggcattgggataaggatcggcgacctgatcggctgatctctccaaaccccgtgcggaaaaagaggggagatggagagggaatgatgatctctcttgatcgggtaggtaacgaggaagacggcaaattgcaggcgtcaggagagatatggcggcccgcctcctaatctatccatccacctaaccttgccgatgaacgcgtcgttgtccgcttgtattgaaccactctgcttcccaccgaaaaaccaacctgctagccaataatagatctcgagccagcacgaagagacgactctatctatctctcctgtatgacttttgtggggttcttctccatggctggatccatgatgaggagagacgagatagagatgacggagtggtcgcggccatcgagcacccacgccgcgccgcgccggcacgcccccaccctccgaccgggacacgcgagagaaggacgagaaaaagggaaaaaaaaaacgaaggaggggagcgaaattaaggagaaaggaatgagcggtggggctaccacccattgcagatctgggtgctggccttctctgccgctctgctagctcttgtctgtgggcgctgcctgcgcgcgccgcggcaagaaagatctcgcctttctcgatctctaccaacggaattgccattcgcatcccatattcccattgctaactctaacggcacgagcacggaacaggtgtcatggtgactcgacatcgataagctacgaacagagatgcatagcaagtaaaaaacagagcagagactcgggcgtggtgtacgcaccttgaggcagccgaagaacttgcgccgagcagaggagagcgggcgtgccggggtggcgggaattgagaaagaagaagtcagagaaagagagagagagagagaggggggaagatgattgatgacgaggaagaagacagcgtcggccgcgtcgcagagcggctgccagcgacgcgggcgctctttgtactagtagcactgctttgccttcacccgcctccgatggcctctctcccctccagcagatgcatgaagttgacgtgtttaacacaagtttcgatcctaatcaatccctgcgaggttgcgacctgccatctcatctctttccttcttccttttatctcttctttattatgtcatctttttgttttttaccactggatttgctgtcccggcttaatcacagcccatttgtttatccataacaataattaaacaacaggtggcccaccagctcctgtacagtgtgtgtatgacatgcgggccaccaggtatcaggtgtcaccccttcatccaacacatgttttgccatgataactttatcgtgagcactgtgcttttgtgttagtaaagaaccggataatcggtaaaggcgacggttagcgttagtacttggtttttaggcgcgtttttgggcggatggcacggtggaagaaggctcctccgacgatggcgagacgaccgggcgggagacgacttgacgtggcttctccgcttttctcctcgccgccgcgcgtggtttcgacgtgttttggtgggcggggcttggctccatggccagtgggccagccgccacatttctcggtggcacgccaaccccgtcaagccgagagatcatctggcacatggccttttgccccttttttttctcatttttttctgaatcaaatttagacgttttatacattgttggtaggtactacaagcctataagggcacgaacaggtcgttcacctctactcgtatggagtagccaggccaacatcaggaccaaagatctcagaacttgacaccgtttcctaggtcaacgaacgggtaccgtcccattgtaaaaaagcacgatcttttcttcatgtgctagtgctactacatgtttgacctggctagcttcagcggttgatgcattcttcaacttgtacaattggaagcaatattgcacagagctcaataatttcttacgctacacaaaccactaatgcagcaaatgcttatgatgttcatgtacctgcttgttgtacatttgtgcatctgcccacttctgttgaaaatgaactgtccatctgcctttgagtgggagtacggaatgaattgccacagaatcacacaagcgcgccctcctttaagtggtacacaaataaatcatgctgcagctggatcatgtcaaaaagagaacaatgcagtaaatagagttacctgtaaattaacgcttttagagtatgttcagattgatggcatttctaactatacctttttttttataaagttgttaaagatgtgtttgcatttagtttttagccaaattttgataacgcataagaaatcctgtcaaaaatttgatattaataaattttgataagatttattttagctacaatctgaacaaccatttagttatcgacgttccaagtaccagctatatactgtatgcaacagcagtactccaaaatggaagaacgcatcgttcattcgtattagctgtcttaattctgacaagacctgaataactaatctagtactattgcataataccaggagtacttgatttaagctctgatttcggcctggatcatgatttaagcgctgattaaagaatcaagatttccctgcttgcagtacggaaaattgaaagaacttaataaataatacagaattagtttgttaatcccatgatcctatatcacatctgtgcaagttcatagtcagagtgtcacatgatctgattagataatatcataataccaacctgattcagcccgaggtgcagcagacagtgctgcttgagcaataatcaagaacgtcaccgacacatctgagttttgcatcttcttgtgcacctaatggactgcacagcaatcaggaccagcatttagtgcgctgatcacaagttagtagtactcctatctcgtttgttattgccgtgtactagtgtctgatttctatcagagtatcagttcatgtgatgatggttaagtgtaaaaatttcatgtttcaatacagaacattcatggtgcgcattctagatttatacgtaggcctcatcgacagtgctatcaagtctcaatcatcctgttcgattttcattctgggggaagttcagcttgtccattagctaggtgaaaacactgaggccttcttaatttgtcggttgggctgtcggttgatactcctggcaacataagagtaatgtaatgtatgatgacctgtcaatctgttcatatgtatatttcggttgttgttgaataccgtttgtatattgtagtcatgtacattgtttatctgatccgtgcaacttgcaacttgtgagttgtcattttgtcagagtttctatctttcgtgatggccgatgggagagtaagaagcaaattcagctggatgataatggcactatagtcttcagtcgataaattgctcctccaaattttccgagctcctttgcctcaattttcttttctgagctcttcatggttcagcacttattcgatctaaacattcagatctccttttctttttagcacaattcagacgtgtgaactaaatttttgttaggtaatatacacacagcatatacgcatgacatatctaactttttttaaatgaaccactcaatatagtgcaatgtttcatattgatacaacagaagaaaattctaggaccatagccctaggaggctataatcaagaaaaaaacacagccacacaacatgcctacaacaaaaataactccatgagggtaaaacgggagtacaacgactcaactacacgtggctcaatccatgtctttggattggagagggagagggcgagcgaaaagatggatccgtccgcccccacacaaaatcttacatacacctaagaattactggaggcaccaaagaactcccgggtagagattggcagtgtggcaccctccaatcctccatcataagtaccatgcataatcatatactccctctatctcaaaaactatgacaacctatttaccttggtcccaaaaggaaattactatgcatacaatctaattgttcgactcacatacgattgcatttaatcaatggttgtaaacagttacagtgcatatgaaacatgctctcctttgattgatctatagttgcatatctctaattatacatgagttgtacaactgggtcgtacgtacagtagtactcgtcccaaaattgattcaaaatttatcataaaatacttatcactctaaagtgttgcttgtcccgtctatcatctttcatttaaactttttcctattctactctcaaccatcactccacttccaaccatacatcattctaataagggactattatctttttttttcttaaaccttaatatatatgctaaactatctaaaataataaatatttgaggacggaagaagtatattggattcgacatgccataatactacaaatttggattgtcaatccagtactacgattctggacaaaggtactacgaatatggacagccccacaatcgaatttgttcaaatttataatctacaatatatataatttattactaggttattatattttaggataagtgtgtggtaggtcttagttccaatttacttggccaaatttcttgaggggaccagacaatcgaacaatgaaaaaaagggcccagttgttttcagatccataattttgggggcgccttaaacaaatgggccctttttgaccaatcatgatcgagaatagtcattttcccctactcgatcgcttttccccagaacaggcagaactttaccaagaaatttggaaggaagatctatatggtttgccggttgcacatggagcgcaatccccacaaagaagccagtaaacaaccttcacgcagtatattttcccttttggaaagaccaaaccaagaagctgaaagaacagaggtgaaagacaaacacattacacgcacaaactcgcgttgtaagcagcgcaaaagtcgaaagacaattcacgaaatccgaagagcgtgctccgtctgccgtccattcacgaccgagcggacgggcggtgatggcgaggggacagtgtgccgttgccggctgccactgctgccggcagccaacgcggcgagtgtaccgtgactactgccccgccgagaaacggcgcatccacggttgtggcgggccgggagtaggttccggagtcgcaggtggcgagcctcttgtacgcggtggccgccgccgccggatcgtcgttcaggaacgggttgccgatggcgcggtggccgtccctcttgtgcacgatcgccctgtacacgaacggcaggagcccttccattactccgttgatcggtttcagatttcagatcaggtgtgcatcgtgcacgtctcgtacgtgggcgaagcagcgtttatagcgcttcgcggttgcggtttaggaagtcggcgccgtgaaacacagcttgcgtgaagaagcagcgggttggtacagcagtggcaacccattgtcacagttgggagatttttatggttccagatcgatgcaagtactgtgccagtgatgacagctttacaaagggcttactgaaaatactatagtactcgattttatcctttttttccccagctgcaagggctagatcctttgaatgctcaggtcaaagaaatctaactcttccagctgatgctcttgcattcagtccggaccaattcagtccaaacggagacgagggacgcaccactcgatagtgctcgccatgtcgctgcggagcagcgtgtgcaagatataggtggtgtttgaatctcctaataataaagatgaagtgtttcacgtaaaacgaggtgatagtaacgtgtgattaattaagttttaactattataaacttaaaaaattgattaatctgatattttataacaactttcatataagttttcgcgtgaaacacgccgtttaacagtttgaaaaacgtgccactttaatccaaaacttgaaaagcagttcgaacggtgcatactaccccatcaccaatgctacaagacacaaggtacatgactgtcgtaggcggactagtttttgctgagcatcaaggattcaagagattgatctgcagaaaaattaccatgttggtgttggagaagatcatagcatatgatacgtctaaatctgacagcccaacttccccccaaaataggaataagttcactttgtgacgagaatctaatccgttatcaaaaactacaaaatacggatatctcgatcccccaactcttgaaaccggtacaatttgacttcctcgacggttttgaagggcggtttcactgacatgacgcctacgtggcgatgttgacttagtcttcggtccacgtggagttagacgtggtgcttatgtgttctagaattaaaaaaatatgtgcggtacctatttgtcattcacaccaaaacaatgtgggacccactgacatgtggggcccacatgtcattcatgtttccttcttcctcttcctcctccctttctctcccttctctctctctcccatatctcttcgtcttcgtctgcaggcggcggcgggcgctcaagggtccaagcggccgcggcggtgagcgggaggagaggcagcaacccggcggcggctcggcggcatcagcgacgtagacgaaagagggagccacgaaggactcgaggaaggagaagagcaagaccaattcgtcctccaaaggctcgctgccgccgccgtccccgacgcgacgacgaggcccactatggtggccacggtcgccgcattccttgagtccagcaacttcccccgcgtgctcacgacgctccagtctgaggccaagctcgagtttatggcgctattggctcgtgctgtgccttgccattttgggcacgccgtgaaatgagaggatttcacatgttcgtaggttgattcatggcgggcatcgccggtgagcctggaagagttgatttccatattcttggactcgaggtacttagaatcaacgacgcgatgctcaatctcgttaagtagctttcactggtaatccatatcttgtgccataattggtttttcattggaatttggttgtggaatgcagcaattctccctgtgggtcgcacgcctctgctgccgccgagctgccaccggatcgccgcctcccttcctgctcgccactgcggccgcttggaccctcgagcgcttgccgccgcctgcagacaagacgaagagaaatgggagaaagagaaagagagagaagggagaaaaagggaggaaggaaacaggaatgacatgcgggctccacatatcagtgggtctcacattattttggtgtgaatgacaaatggacccgcacatattttttttaattctataacacataagcgccacgtcaactccacgtggaccgcagactgagtcaacatcgctacgtagacgccatgtcagcgaaaccgccctccaaaaccgccgagggagtcaaattgtaccggttttaagagttgggggtcgagatattcggttttgtggtttagggtcacggattatatttcgatcactttcgagggtcacatagtgaacttattcccccaaaatataatctgacagcccatggacggcctaacaatatgtgaacagtaaacttctatcttgggccttcgaggcctcatgagatggaccaactatttcggccccgttgaacgactcatgacggggacaaatgccctgtcatactcatgctccagcaatcctgtaacgagaatactaccccagttggattcgcaggaccgcccaattatgtcgcgagatcccaacgcgaatgactcgctactcaccgagtcgccatcccagtgcgaaggcttatcaccattttttttggccttcgttgaggtcgaaccgattctgctgtctacccaaagccattatccctttcccccaataaaggggctactttttgctacgtttttatttgctcttctcatcgctgtcaaaacgacgagtggaacagagttgagatcagaatgttgaatgccgagctgggttgcaagtgacctctgacgtgctttgcatggtgcgaaagctctcggtttggcatctctggttctgcggcctgagtagtttgccgctgcaccgcagataacgctagctttgctcgtttttgtgctcttttttttttcctgaacttctgaaggcgtgtgcaatgacagcagggcaggtggacagggtaccagacttgcagtgtaagagtaaggttaggagcgtgtatatgcttattattgtggctgatctgggagagttacgcaagcactcgtgtttcacggggaacgaattgtagagtccacgccgcgaagcaaagtggggcgagaaacgtaggatgcgtccttgggtttctaatgcttctgaaactaactgctccggctttgacagactgacgggtgaattctctgcagtttatgcgattttttttatcggaattttggttagttcaatactatgaaggatcaagtatggatggttaatgctgcactttcgtgcactttcttgaaccgcgcattacttccgacatgttcctgtttccaaattagggatgctttggagttctcctcgtatagccgaccatggtgggttgggcaaaaccatgttattttactttgactatattcataaactatttgcatttgatttccaacacggaaagcattaggggaggtaaaagccaaaaggccccgggacgatccagcaggcaggagccaggttacactgcgcgacctgtgtgtaacacacgacgacgacacagctaccttccactagagggacgaaaagtacagcatcggcatcgtcagaaagagatagaggaagaaaaaaaaaaggaagaacgaatagaaccgaaaagtcccagccgaggacggcccccttacgtggcgcgagatgataaatgccgtcccaatcaaacaatgcacaatccggagagagaatcttcgatgcgatcgtagccatatcggccaaacagaggaccacgcgacagatggcattcggcttcctgaaaacgtgatttcatttcacccatcttttcttttctttttcatttttctctcctgtgttcgcctgctcgtcaagtcgtcgtagcacggctgcgtgcctcgtgtccactattagtttggttgctaatcttaggctcgcgtgtttgttgactcacaccactgcacggttcacccaccagcaaggacttttcagcgaccacgaaagcccgcatcatgatcatcaaataggggaacacgacaccaacgacactatgataatgatacgttttttgagtttagcgtgcgaaaagcacacgtatattgtatgtgtgttgaagcctatgtgttctacccgttccaaactgaatttaaaatcggagcttttcggaaacggcaagaagagaggaacatctgtggggtgttattaattgactaatcgagacggcacaagcgattcggttgcccaacacgtctaatacgtttgcacaatcatcaggatgaacggaaataatttaactataaacgcatgaacacagcagtgtgtcgcaatctagtaatctagtcagagcaaagtaggaacttctttatatttccacgagcaaaggggacactcaattatactacaatttctctgacgcttgaggaagtttctcttcaaacatcggaaacacatgagctttttttgctgaaataaggagcgggctgatctgtctgacgagatcacaaacgcccaaagaaaggaagtgaacgaaataatgctataataatctgcaattatatgctttgaggatgccacattctgtttgatcacataattcggaacgttctgtttgatcacggcttcgtccaggtgaattcgagttagagatggccaggaaaccgagaggagtagtatgtctgatggatccacttgtcacaatttccggcgcctgagatttacgacgacgacgctgacattgtccgaggtttgccgcgccaaagccagcttggtcagcaggacggccgcctcggcgcacgccttgtcctcctcggcggcgctctcctcgtcgctctccgagccagcggcggcggaaggagcaccgtcgttgggcgcctcgtcgccgctgctgctgctctgcctcgggcttaggttggacgtcgggctcgaccggttcctctcgcgccgcccgctgctccgcaggcaggcgcgcacgacgttgcaggcaacctcgttgctcaccacgtcccacaggccgtcgctggccaggatgaggaactcgtcctcgccgtccttcctctccatcaccctcacctccgggtcgcatatcacgtacggcttcaaatagctgtcccctgcaatggcgcatccatgtaaacagtcagcacatggcgcttgtttcttttgtgtcatagcgagagattttcaaaagtactagagtagagagctcaccgatggctcgtgacatggcgagcatgccaaagacgcgggcgccgtcccagaagatgacgcgccctcccgccgcgtggatccgttcgagctcgtcgggccggtccggctgaatcgatcagagcagatacgtttagagcaacgcgattaaagtaagaaaaacttagattttttttggttgaccatgtgtacgcacacatccccataccttatggtcgcatgagaggggtatggcggcgccaccgcggcagaggacggcgcgcgagtcgccgcagttggcgacgacgacgtggcgagggcccagaacggcgacgacggccgttgagccgacgtggtcgcacttgggcagctgcatctcgcaccggcaggtgggggccggggcgacgctcccccgtgacgaggccacggcctccgcgtccatccgcgcgaagctcctctccatgacgcccctccaccgcgcctcctcgtccaaccccgccgacccagcggcggcgccggcctcgtcgaccacgatctcgtgcatccgctgcccgcacgacgtcgccacctgcatgcacatgcaaaccattccaataagtactactctccgagtcaaaaccgccgcacatgcgcgcgccgcgcgtttcggcgcatagatctattgacaccatcaaaaaggtgttcgattaaacaactcgagcaaagagagcaaggcacgcacatgagagcagccgtggccgtcgaacaccccgaagaagtggtggccggggaggaaccccgggcaggcggagacggagtcctccatgtccctccggcgtccgcacaccgacgtaaagccgtacctagcgcgctccacctccctgtcctcctcgtccgtcgaggcctctcccccgccgccatcaagcctccgcctcttcccggaggtctcctcctccgccccacgctccgcgaccaccctgagccgccggatctccatccgccgccgcctcgccgctcggctcccggtgtcgcactccgggcccttcccctccgacgacgatccagccacaacctcgcagcaaatctccgccatgaactaacaaaatctccgaaagatcccttgcaacagagggagagaaggtgggagctcctctgctcagctcagctcagctcgtcaagcaagaaatgttttctctcctcgaagcggtgagagcgattgagaagaggtgatggcaagtagcggccggcgatataaaagtgggtgggggaaggggtgggggtgggagaggcgacgtgccacgcggcgggcgcgggccacacgtacagttgtgtgatcgcgccgggggccgttggatgcggctccacgtgacgcgcgcccgtggccggtacgtgccgcccggacgcgtgtcgaggctgggacgcgtccaccgggcggtcgcgagctgggaggcttcaccgcgcgccacgagttgggcgaggcgctagtagccgcggcggtgtttgctgttcggcgcgcgggatgggcggggcgacacgtaaacgaggcgaggcgcgagcgagccgcggttcggttcactcggctcggctgtgtgcggggtgcggagggggtgggggaccgtgtcgacgtggcctgagcgcggatccgtggagagataagagtaaccgcaatggaaaatggtaaagtaaggtgctctctataaaacatatacatcttagcaatagattcgattaataggaaaccacattaatagtatatctacattggtatctgtcggtgacatgggaccgggagtatcatgacttagagacttgaggcagacgcgatcacccacgtggcctaaccccctcgggggggtcgggcccgagggtgatacggccgcccttctctttgtctccccgaggggtcgggctgcacccggggccgaggcgccccgacccctcgtgggttttttgctccgcgtgtatgggttaggtgagcacagtggggctcacctaaccacatttattgcggtttggctgagcgtgtcacgccgcatgtaacgcagtgcagtgcactcatttatccggtctgtgaccagtcacagaccggtcagatcgcgggttaggtggcgacaggcggtctgacgcacgcctcgccccatcccgtcaggacgagggcttctaggcgctcgtccccagctggagctagcgtgttacctcccagagatggcacgttagtcctggtcagatatatgccaggcttcaccctaaccattacaggcaagatgttgtgtgaagaagggccaacgtgcagattgctgagctgacgcgtggtggacaagaatgaccgatttgtgaccagtctgacaccggtcatgtcgtcagcagacagccatgattccgcgtcgcgcctgctcccggcgaaagtggaggtaggtgcgggccgtcccatcagaaggtgactcgaacggcaaccatgcaaatctccgtccatttatgaaaaggtagggtaagtccccacagagagggaaaaatggtgcatgtggtatccccttaagatataaaaggaggaccttgcccacttagaagggatgattttttgggggggacttttccagattgggaacctagaacgagggagaggctggctcatactttgtagctccttcatacacagatctcccaaaacacaggagtagggtattacgcttctcagcggcccgaacctgtatacatcgccggcgtcttgtgtgcttcctgtctcgcgaaccttccacagattgggagcttagagtctcacccagggtccccggccgaaccggcaaaggggggcctgcgcggtctcccggtgaggagccccacgctccgtcatctggcgcgccaggtaggggactctgcgagtgatcttctgagctctcgcactccttcgtgtgcgccaagcttttcctgttcagcccaatggccgagccagcaaaggcgcgcgacctctccccgagtatgagcggtgacgacggggagccaaacccacgccgtcgagctcgtactccaccgccccctccacgccaaagtcctaggcgggaaaaggcgctcgagagggctgaaggatccgcgacttcgacatccacaggaggtgaagaagggcggcgagatggggagcgtcgtctcctcgtctaccgcgacggcagcacgccccagggcgcgctccaagctgcaggcgcgctcctacgtcacccgcccgtcgcccatgacccggagtctccagcccaacgttggctggacgatgtggccaaattggtcatgactgcaaggcagcgcctagatgctggtgggcggtcctccgccaccaaggcctctggtgctgctaccaccggctccgcgtcgtcaagacgaagggcacgacgagcggcagccgctgttcgccattcggccgccactcctacgtcgactccttcgacccgggaagatctgcgtggggggccggacgcccgcaccagcatcgagcgccggcgtaatgaccgacgtgctgcccacacaacggagggcgcttcctcgtccagagtgtcacctcaccacggacgcggggatcagccctccgtgcccccggttggtggtgtcggctgtagagcctttgtggcgagccttcggaatgtccgttggcccccaaggttccggcccaccatcgccgaaaaatatgatggagcgtcaaccccgccgagtttctccaggtctacacgaccgggatcgaggccgccgggggtgacgacagggtcatggcgaatttctttcccatggccctgaagggacaggcacggggttggctaatgaacttgccacccgcgtctgtccactcttgggaggatttgtgccaacagttcaccatgaacttccaaggcacatatccgcgccccggtgaggaagcggacttgcacgcagtacagcgaagggacgatgagtcacttcgatcgtacattcagcggttctgtcaagtccgcaacaccataccatgcatccctgcacacgcggtaatctacgcgttcagggagggcgtgcggcacaaccgcatgctcgaaaagatcgcctccaaggagccccagactaccgcggagctttttcagctcgcggactgagtggctcgcaaggaggaggcctggacttggaacccctccgattccggtgtggcagcttcggccgtccccgggtccgccgctcggtcagggcggcgggacaggaggaggaagaagaggtcggcccattccgacgacgagggtcatgtcctcgccgtcgaaggcgtttcgctggccacccgaaaggggaggcctgcgagcgacaaaaagaaggaagccgacgctccctgacctcggctacttggaagagcgaaggtggcgcgcggcccttcgagccgcgcgctaccagcagagcctgcgacgctaccatcagcgccacgtccgggcccgatcactctgcgtcgacgacctcgtcctacgccgtgtccaaacgcgtgctggactgagcaaactctcaccaatgtgggagggtccatatcgagtgatcggcgtcccccggccgggctccgttcggctggccacgggtgacggcacagagctgcctaacccgtggaacatcgaacaccttcgtcgcttctacccctaaagggggatcgggtgtcaggtttcggactcgggccaaccccgcacccccctcgggcgtgcagggttggccggggccttttcttttttttctcttccgtatttcaataaaagcattttcgatttcctaaaggctgtatctgtgctgttgtttccttttgaagaatcttgacttgaaataggtcactcgtgttcaatcctgccctcgggggctcgggtcggctaaaatcgccaaacggggcccagaaccgagccgtgccccagggcgtggtgaactccgggggggaatcggcaaaaacccacaatcgggtcacccataaccctcggtcaccacgttcccggcctggccagtctcgacatgtggatctccccaggcactagccccgacccgagccatttgaggactaggaccagggcacgagcccttgttcaaaccaagacacaaaaggaccgcggcacaggcatcctcgtctcatacacacaacaaatagaattgacacaaaaaatttcctctttatttgattgcagattaaatcagcctataacaagaagggggcccgaaggcctcggaagaagaaggaaaagctattaagattggcggaggcctgggggctcactccgacgcgcccgggtagccggcctcgccgtcgctgtcgtccgcaccgttgtcaccgcactcctcgtcggagttgaaggcaaacgcgagccgaggggccgctcattattgtcggtcggttttcccttgctgatacgcgcgatttgcgaccgccgggattctgcccgaagaaagagagagcagggaggagaggcccccgagccgaacggcggcccaaggcccccgacggccggagctggccctccgcctgcttgtccgatggtgccaggcgcccccgacccccaggacggccccgaggccactgtgggaaggccgcccctgtcgtcctccgaccccgaggtcatcggcacagaagacgagtgcgccccgcgaggccgcttgggtgaagagcgccccagggatgcggcccctagcgaagaggatcggccccaccgaaaggtgcagcggcccgtctactttgttagtgaggccctccgggatgccaagacccgataccctcaggcccagaaaatgctttacgctattctgataacttcgaggaagttgcgccattatttccaggcgcatcgggtcacggtggttacgtcttatcccctcggccaaatcttatataaccgagagggtactggacgggtggtgaaatgggcaatcgaactctctgaattcgatttgcgctttgaaccaagccacgcgatcaagagccaggccctcgccgactttgtggcggagtggaccccagctcccgagctcgtctccgcccccgaggccagctcgagcccatagcagctgcctcacaccgccctctgggtgatgtagttcgacggcacctgcaggaaccggccccacctgtcaccaggccttagaagtggcgtcacgcccgaccgcttccctcgaggagggcgatcgccctggcataacgccgggggctactgtcggtgacatgggaccgggagtatcatgacttagagacttgaggcagacgcgatcacccacgtggcctaaccccctcgggggggtcgggcccgagggtgatacggccgcccttctctttgtctccccgaggggtcgggctgcacccgcctcggccccgagggccgaggcgccccgacccctcgtgggttttttgctccgcgtgtatgggttagg

SEQ ID NO: 9040 - DNA, 72830 bp, Oryza sativa
  unsure (1)..(72830): unsure at all n locations
catatgaaatataacacaactgtcctggtatttttatttggttttcctatattatgtattgaaatcaattaaaatgtatataactaaaggatctacatgctgacacactttgtggaacctgattttcctgcttgcagttacttaggttactagtaactacagtgtatgcacttgatctcacgatggtgaatggagcaaaagaaaccataccagtatactctgctaatgcagaaagggcaattggacttgtcttgaaccgttcctttttgcaaatgtacttgagcctaagacccaacaaagacatggtcattaacaacatggaccataatatattgtggctacataaaaaaaagtttggtgtagtgagatgtaacaagagtatttttacataagtacctgttgacaacacgactaatcgttggctgaacaaacatatgaaccctgtaaatttaagcaagtccttgtaagaaatgcttagatgatttaacaacggcacagaattacagtaaaaaccacacaagaattattacttagctacttggcgaagttgtctcagagctggagcataaagatcattgcatatacaaattacctgtaaataaatgcattattatttaatcataatgttaaggcgctaaaattatggcaaggaatggctagattgcttacaggtctcatcagttttggtattttgtgacctttctttgaggactttcgtacttgagtatcttcagcactagtgctgctgttagaactgttgttcttttcagcattgatctgcacaaaagagtcaattatcaatgaactacagtaacatatgaattaagctagaattgatgcagcatttatcactagcataatgcagaaccataaaaaaaacaagaagagagggaaagtaagaaaaggtagcaaaacatcatgttgttgaaagtgtggattaggtgctaccatctttaaaataacctcgactgcacctttgccatcaccaagtgctccatcaatttcatcaattacctacacaagacagcagaggtctataggatacagtggaggtaatttatttatctgacagcatgattcaactcaccagacacttgggtttcgaatcagacatgattgagttcatctgaatgacatcaagaattttcggttcaatggatgaagcagaacgatcatcactcgcatttatctgcatgtagtatgatgtaagtagtgtataaatttttaaccaaagataaagggcccaacattctaatactcaattagccaataaaccataactaacaagaggtgatgaggtcagagaaattctgctaagagcatatcattattttctaataaaaattgcaatggtcccagttttccagcttataaaatgtaccaaaataatatgaaacggaagaaatcaattcgtgactagatggtatgtacagaacagtagacaacttggaaggatatcaacagatatgtttgatgcagtaccagataaaaggggtgtatactcctcgttatatatgaccaaacagtcaaacataacagattatacaacactatgttgaagaaccaaaaagaactacacaaaggacatgaaatcacataatcagacctccacaacatggtagccacaatgtttagctgcaacatgggcaagtgttgtcttgccaagcccaggtggaccacatagtagtaacacctgcaacatcgaaatgttatctaattgcactagccagcaacttcttggtagaaatatatcctgcggtcaaacatatcactaaagacatacaaaacaatgctactaagccaccttttgttctggtgcattatcagtcgtgggcctcttgttaaaggagcttgtcaaatcctctgagttgctaccatgtgcattttggagcatgttgtcttgactcataccaggacctcccttactcttggagaagaaatttctgttacttgaattcttttgaatagcagaagaatgtcggcgtaaggcagacaaaacatcatcacctgtagcacgaacgtgggatccaaacacacaggagtcccactgttttagccacagaagtacctgaatggcatgcatccgtacatgtcaagagaaactcaagcacacactggaaacctgacaccaaatagcaaaatctctatggcggaaggagattattgcagtaaaggccttatttataagtatatattttaagagagttgaatagacatttacctccctgtttgtgtgttcatcacttaacagctctgtgaaagaatttggtgagtatttttccacccaaagttgctctgtaactagcggagtcactgggcaactctcaagattttgtgtttctgcactctcctgcaatgccttcataaccattgcaaaatatggatcagtaagatatactgcatttagcttatgacctactgcaatcaacatggtcttgagcggatgaaaaaatgttatggtaaaaaagaaaccatttgtaccatctattcagtataaaataatgttaattatcattacttaaagagtacttcacttttttaaaaaaaaaactattgtcaataatctcatatacacatatacctttgctagagcctcttgctcagcacgacttgtcagcgaatgaaaggattctgagagaagccctgcagaaggacaaaaggcgaaagcaatataatgggctatcaaaaatattagtcgagtgcatgttggttctcaggagatatttgaaagcgcaaaatagaagtacacttagtaactgacccttgtaattgaaatttggtttggaaatgcgagtcctttgtctagttcccccgattcctcccccatccaacccgtctgttgcaaccttcgcataaaccctctcaccattgggcgcggtgacagacatacagtccccccggatgtccgacgcgaaccgcgagattgtcttctcggcgacaacttcaacaacaggaggcggcgagtaccgcagccagtcctcgtccccatccccggaatcctcacgatccacattcctccgcttgctcctctcctccccctgctccggcggaggcggagggggaggccgcttcaaattgccttccgacacttcatcttcacacacatttggccaaccgcatcagcagtcgaaacaaaatactctcgagactaggttaccatctaccgtgagggagactgtgcacgcacctgcaggtttcgagggggcagcggtggtctcctgcggggaacgccgcggctggtccgctccggcggcggcagggaggaacccctcgtcctcggggtcgtcgaagtaggcgtactcctcttcctcctccgggaggagcccgtggctctccatccactcgagctcctccggatctggcatatccatgtccgcctccatcgccgccgccgcctcgccgacgcagcaccgagcagaaggggagggagctaggcggcggcgaacgggcgaagtggcggggaatgggaattggtgattggggtgtttcgcgccttccggcgagtggttttctcggtctccgagggagacgcggggatggtggtaggtctcggcccaacttgttacttggcccaataatgtcttcgaagtccattggattggtgggcttctggataggaataagtccactttaactcccttaaaaattatagatccaatttgattcatatcgctgaaccgtaatgtttggatatcttaaccccctaaactataaaaactggtgtattttacctctctcatctgttttggaagacgatttcgctgatgtggtactgtgacttgatccaacccattgagtcattttgtggggtccactcatcagtgacccactgacccttctcttccttcctttacccctcctagcttcgcccggtagagcatccatccatggcacgtagtgagtgaggcagcggcgagttctttcgatccagctgcatgctcttgctctatttttccctttcctttgtaaatttggcgagttctagtcttctaagatggaggagaccgttgtggaagttggaagcaacgagtggctcgaagagcaccatggcgtcggcagtggccttggcgcacgagctgccggaggcccggctcggcgctagggcgcggctgaggctaggggcgaagctccggaggaggtgtttacacgagctgatgcgcaccatctcatgcttcaagctcacttggtccttctcctcgttggtgagccgcatctgcgtcacctccagcttcaactcctagttctcctaccgcaccgacacgtagttgacctgtggcgacatcgccccgctcccccaccccactccctgccgtcgtgcgactacgtcgcggtggcgatggcggccacacacccgaagaatgagcgttgtgttgtgcccgccgccgccctggattgtgcgatggagctgctcagctgctcgaaggagagcatgtgcaccgctatctgcacaggcagctactcgttctgcgccgtgtgcaaaatcctgtgtcgttgctctgctggcgggtaggctccacatgatgactcagtggattggaccaagtcaaagcgccacatcagcaaaaccgtctttcaaaacagtcgagagagttaaattacatcggagtttatggatcaaaatatctggtatgcagttcagtttcaaagatatgaatcagattaaacctatattaagggagtcgaagtggacttattacgtctcaatattctggcgagattgggctttccagtttgtaccttggatctgacgccgaaagctcatcagctgacagcaatggtgaaacaaagatttgcagtagtcccacttcgccttcgctgctacggcgatgctctgcgaatctgcgaaaaacgcaaccgaccaaacaaagttttccagctcggaccgcatgcgattctttgattgtgtcggggtgtcaaatgaccaaacaaagtgttgattcgttgtggacttgtggactcggagcaacttgttcagttatcgttgtcgttgaaggggaagttgcaaaatccatgttttgtcccttcatattgcttgatacctgctgggaaattcagggtttcaggcacccgtattcacacacagatgttcgcctctatgatcacttctcttctattttgccagactattgctgtgtagttgcagttgcaggattcatatagccaagctcaaccgtgcaagacatccgtgtttaattatcaccgaaaaaaatgcagcagcatcaacgagtacaaaatgctagagcaagttgcaacacagctcgccagtctctttctttattctccactccagatcttgaatcctgattagcaccgctggttttccacccacggaacgatgtggagacgagagaattgcttcgacgacaatagcggagaaaagcgaccgaaagaaaacaagcatccgcggttaagcaaccttgcacgccatttcctgaatataaacccgatctttgtttgtcttgatttctacgaaagctcaatgcaagcctgtcgttggctgagaatttgagaagtggagatgcttgttgcacctaaaatggaagcattccgctgggcccaactgtaccatcctgaccatggtgtctgtctacagcttgtagtagtaggacagcgtaggagccacgagactgcacgatctgctgttccagataaagacgatgatgaatgccagatgctcctttgtcttggaccagctccctgtcgtcaccattcaccaacccatgaggacgggaaaaatcaatcctccgcatttttattctctgcaatcaagtcagcacacgatgggatcacgcccggcgccggcatgtcgatcagtagtctcatgttcccctacgacgggggaccgtggcactagctttcttcttttcttcggtgttcaacacaaggatctccaacttaccacaacttctagatgaaaacgaagtggaattggacggataatagcaacgcctatattctaaaaacacccgaccgagtcgctctcacccgcaccaataatgccacatgcagatgatatcacaccgggaatttctgctgctctcggtctcacgaaagcggtcgggcagagcttttttttttttttagagaaacaaccgtggcggcagtagagaaccatatagatggatctgactatctaagtaaacttaggctgtgtttagttccacgttaaaattgaaagtttaaagaaattaaaacgatgtgacggaaaagttagaagtttgtatttgtagaaaagttcgatgtgatagaaaagttagaatctaaacatggccttaatagaatacataaaacatcacaaggtcatgtgagaaatacgtgactccatgtgcgtcccaaaccaacgggaaaattattactgtgtgcagatgcagttgtagccagttatggccgccgaagaattgagggtttgagaccgtgggagtatgatacacagtgatcgtgacagtaatttacaggtgcctgctttgtcatttgtcagctagcagctttggcatcttaacgcccgccggatcagcgacctacccccattttcttttttcttttaccggacatgcgagtagatctggctaatacgaggtgaaaacagatgctttgcttggataaccttcttaatcacaatagctgagttgcgtcaaactccattccggaaaagaaaatagctccatcatacatccatacgtagccagtaggcggtggcgtgttgccaagacatcatggtttagcgacgggggcaagttgtttgtacttgattatacataattatttttaaattatagtcgtgtgttaatctatgtagataaacgtatacttaagtatgaaatatctacatttagcgatatgtttataagtatccatcatttatttttgatagtaatatatgttaaaagacggtgttatatttgccgagtgagtatgcgtgcgcatatgatccgcgcacaatagacagagagttccacatccatgatccgtcgtgtttgaaaaatgtttgccattaagaaaggatatcacaatttgtttctccactaaagaaagagataggcatcaagtacttcaccttgctcttgctgatcgtatatctcaattatacttagcttaaacggtgggcaatcctcaattgccatctgctggtcatcgtgacaaagaaaaaaaattttatcaataaacatttatatttatattatgtacttggtgatttaaaaggtaatataaaaaataaactaagataaaaaaacttaaaatcaactttaaaattaagtttcggtcgctgcgataaaaaaaaaaggtgaatgataggaggctacaacccttttctttcattggattttgccagattcacggattatttgttatatgcttccaaaagcatttttaagagaatattatactaatgttttgtttaaattacttgttcaaatatattggttaagttcatttatgggatatttaattatatcatactcgtatcaataggcaatggaataacacgtttagtcaagtacataatatcacaggttctttgtgaatgcgattcatggattatttatattaaaaagatagcaagagatggattgggagaccaattttcaccgaacttcggcttacaaagataccacgtctatgtgagggactttgaggcgaatctcggttgatcccaagcctcaccaggtaaccaccgagatcgagcttggttcctaggttgtcttgccttgcggaggtggagcaacgccttcacaaacttcctaggttgtcttgcctgcaagtgctggatacttgcgtataatgtccaaccagctaggatgagaacatataagattaacaaacttgaagacgaaggccaaccaccgatcgccaagtgctcaagccaagtcctggcactcacaaactcagatcctgcaagaaatccactccaatcttagtttcaaaacaaaaaggtgatgcgccttgagccatttcactgtttagctttcatttgtggggttagcaagcctttagataatcatccattggactaatacatgtgttcaacacttaactagctcatttgtactttaattattgctggaggtaggccataagatttttttagctggcatgcatcatcatatggtaatgaagcataatggagcatggcgaagccatgagaagcatagcgagacatggcagagcgaagcgaaatgcaacaaagcagagccaagtaagcctgccaatgggctggattgaaatgggcccaatggattggtttcagctttgggtgtagtttggatggatggaaatggattgaggagtttaatgggctggactggttagggtggaggtggaaacggtttggattggattggtttttggtttctgatttttggatccaaattggattcagtccatggatttctttggatgcactagacagtccagtactctccaaacctagcgtcatcagtcgtccacggctccactccttccaccgccgccgctccctccccttgcttcgcctcctccacctctccgccaccgtccgcgaatccgccgccaagccgtcgccggtcagattccctcccccaccaccattgcttttctttttccctggtttttctcggtctttgatctatcctggttgttttgtttgtatttttttttgggtctcttcctgatcttggtggttgcaagtgcaggtgaagcagaagaagaggaaggtgcgtgcgccgccgggcgttggcgaggatgtcctcctccggtggtccggccgcgtcgccaatctccctgagaagcccaagtaccacgacgtatgtgaacagtgtgattggtgtgatagtttctataagattttgttttttttgttggttttactgaggagttaacttgctcaagattacaatcttcgatgggtttatgtgcaggagttccaagatttcaagaagaagataaggaggtatagtgaatgcaggttcccttcatctcccaatgaaaattatttaacatatcattacaaattgagtcctgatatgattttgagatgcaaattaattctatggtcaatcgaattttagtgtgcaatttttagattgtagcacgtgtacaatgtgtgaaaaaaataattatagaccatgttctttcaactatcttgattttagatttcttcctctatgcagacaattgaacaaactcaataataaatatgtccatacaaatgtcagagagttcaggtactaatagtccaaataataatcaatcttcaagaacacgtaagagagctaaagtatgggaacactttcagcaagaggttgtaatgatagatggtgtccccaagactcaatgcaaatattgtagcttaagattggcagccaccaaaaagtcaggaacaagtcaccttattaatcacatagccgaatcatgtccagctattgatggtgatgctagaatcaacttccttgcaacaattaagaaacagactggggaaggtttcgtgtttgttcccaagagaagccgggagctaatggtcagattcttcattcatgcaggtgccattcaagaaaattgaggatccttattttttggagtgggtggagtccatgcagccaactttcaaagttgtgggggcgtcaaacacttcatgatgatgcctttaacttgtatgagcgaatgagggaagacttgcatgctgaattacataatcttgatttgcacgtatgtctaacatccgatatgtggacttcaattcaaaatataggctacatggttgtcacagcacactatattgatagagagtttaacattaagaagaaaattataagctttaaggaattgaagtatccccacacgggattcaccattgaagaagctataatgagttgcttgacatattggggcattagaagcaaactgtttactataactttagataatgtcagtaataacaattctacatgtcaagagttgataaagaatcacaagaatgcattgatgtttgagggtcagcatttgcatgttagatgttgtgcccatatcctaaatattttggttcaggatggtatgaaaataattaaacctacaatacacaagctacgtgagttgttgaagcatttagattcttcagtatcaagaatgcaagatttcaattctatggcaaactcgaaaaatcttccttcgaagttgagtttttcttttgatacaccgactagatggaattccacctataaaatgattgtagaaggattaatgtacagatctgtcctggatagctatgcaaatcaacatggtgaagttgcacctactgaactagaatggcagaaagttgaatcaatttgtgcttttcttaaagcttttgaagaagccacattatcagcgttagcagataggaaaccaacatcacgtaggttcttgcccttggtgctacaaattcgtcatgcattgaatgaccctgattggcagactagtgatattttaaaggtattggctgcagctatgctctcaaagtttgtcaaatattgggacagtgggtttaactctgcacttgtcattgccacaatgttagatccaagaagaaaaggagattatttgaatttcttttatgagaaaacatctaacagtgtgacagagattgtcgaaaaagtgggttctgctgaagattggttgaaggattattatgaaaaatacgaagggtttgtaagaagaaatgatgaacacatgctttcacattctcgtgaaggcagcagcagtgttggatcacctgttcttgggaaaagaaaactcgaggaagagtttgctttatacaagtctcgaaggaggactgcacggcaaacgaaatcagaatttgccatatatttagaagaagatgttgaggaggatagtgagagtttcgatgttttggactagtggaagagacatgctaaaaaattcccggtattgtcatctatggccggagatttcctagaaatacccctcagcactgtatcttccgaatcagcattcagttgtgggggcaggatacttggtgacacacgaagttcgttaacacctgaaatgcttgaagctctcatttgtgcgaaagattggttaattaaagccaacgatcctttgatcaatattccaggtgctgaaggtataatagtgataaatgattcctccataaatgttctgtgtatttcaatcatgaagtagtgatcataaatccacccgtggattgtgttgaatttggactgagcaactttgtgggttgggttgggtggggttagctcaaggaattcttggtctggattggagtgacaattttgctatagtcactttgggttgggttaacccattggcaggcttagagccaagccaggcggaacattgcgaagcgctctggagtcgggtgaagctgttgagtccaagattgcgatcggcctatggaacagatgacaaaggccaccctaaaatgccttccgagaaaggactgtcccagtaggcgacctatacataacccactaaaaataaaaaatatatctgtaaatatttctatcaaagggattgaaatataaaagcctatgtaagccaaaccctaggattagctgtttgagctataaatttataaatatcccaaaaaaaaaacactgtaagacattggaaaaaataatacatatcttgctgttccttcatcccaacaattactactattattatcaatcatctaaaacccgtaacggcacactttcgtccatgactgatgctgatgaagttctccgtaatgatatgtcatggagttgtttgtttctaactatcaacacgctacacgcagtggcggagctaccacagggtctctggggtctcgagaacccactaccgtactataaccatgggagatcccatgaaaaccccactaaaattttctgtcatacatctattagaagagggggctataattttatatagtttgttcaaaccctccagttaatcttttctggatccatccctggctacacgtggttgtcatgttaggttgtgtggcttgcgaactgtgttttcctcgtgtctcctttggaatggagggaaattaaagcatttgagttcgtatgggttacttatttgaattctaagttcaaaccggtacttcatgcgagaatcacgtcaggaatatgaaaggctcaaagaggggaaaaaaacatgcagcacgaaccgaggcccaccggaccgggcacatgcgcggccactggcaggcgggggctaccgctggctgcgggggctgcgggccagagtctaggctggactggccggacgggaatcgcctccccgtctcgcacctggcaatcagcatcggccggcgaccacacacacgagtacacgacacatccgatccccatccgtcctccgtacgtgccaatgaaatattcggccggtggggcggaggcacgctgtctgcagccagacgcagaccaccggcgagtgcgatccgagtggccgagcccgagagaaaaaccacggccacaccaaacccgccgtgcgggggaagaaaaaaagcacaatattctccctctcggcctctcctcgccgtagtgccccctcggacctcggttgattttttggttcgcgcacgtcaccaccgagagtccaccaccgcggcgcacgggaggaggcccgattcgattccactcgcccgttcgttcgctcgtcctatttttttcttccccccaccacggcaattttttctctcccacggccgccacgccactgccagtcaacagctgcacctgggctcctcctctcctcgtcgccgtcaccgtcgcgcgccgtcgtgttggtggtggtggtggtgtgcgggcgggcgggcgccgctcgcgtccccgtgacgctgcttcccagcgccgctgcctccgccttccacgccgcgtgggcgcgaaggcggggcttgggagttggaggaggaaggatagggggcacggcacgggtggcagtagtgcaaggcaagcaggtccccgtgtataattcgggcggcggcggcggcgggttggatcggggaatcggcgacgcgggccagaggaggaggaggatggggcagcaggcggcggaggcgcagccgctactgctgcagggggaccaggtggacgccgagtggggctgcaggccgcaccgcattgtacttttcgtcgagccgtcgcccttcgcgtcagtgctctctctcctcgtagtcctactagtcagatcatcgtactagcttagatcagatcgagatgtcaaacctgccgctctttcgatctattgaactgcaaagtcaatagtttttgctcgttgctgtttcgcagttacatctctgggtacaagaatcgcttccagaacttcatcaagcatctgcgagagatgggcgatgaggtatatgatctttttacttcatctggctgctggctgcttgtgtgtgtagggcgtgtatataccttggaattgacgtgtgctctttcgaaacagatgttggtggtgaccacgcacaagggagctcccgaggagttccatggagctaaagtcattggttcgtggaggtaatccaatacaaactagaaactacttttaccttccatttagcattcggtctacctgaggagcaccaaacacagaatacaagaattactttcctgaaagcacaaaacttgctctcactgcgaaatagggccttactcgcatgctgaagcaaaaggaaacaatgcaagcgaagtgtcatctagtcaactagcatgctgatttggaacatgtgcttgttgtgaggtgaaattggtgatgttgcacttgttttccaatattttgtctggtcaagtcgtcaagtatatatattttagaggacactagaattcttcttgttgaaatttcttctatctgcatgcacttaattgcctaaatttctatttctcagttttccatgtccgttataccaaaatgttccactctcgctggcgttgagccctaggatattttcggcggtggctaaatttaagccggacataatccatgctacttcacctggagttatggtaatcattaaaaacccaataggtatcattgtcctttctttttgtagtttctcactatatattgtgatttcaggtttttggtgctcgctttatcgcaaagatgctttcagtcccaatggtgatgtcatatcatacccaccttccagcgtgagtttctcttcttaaaatcatgaatacttctgcgatatgagtcctgcatgcataatattgttacgagcagatcttacagcctctaaattagggaccagatatagtactgtagggcaagaccatcatagtccagtgatttccctggcagagatatttactttcgaaattttgggaaaaaaaaacacattactatgtcatgctattggaggattaaaaaaaaacttggatgcatatgcatggaatcaacaggcaaaagtgttgcctccccaatgttgattaaagcatccaaccgaggcacatcattacaacactaattctttctgttgcaaattataatacctggtgttgattcttgagctgaattcttgtcatgactttcaggtatataccaagatacaatttaaattggttacttggacccacatggagtcttataagtaagcataacatcacctctcagtttgttcttcataaaagaaataatctgacagcaaaaatacaactgttctttctcattaaatttgtactgacactcttattttgttttgaaggatgtcttcataggtctgcagatcttactctagttccgtcagtagctattgccgaggactttgaaactgcgaaagtagtatcaggttaaacaattaagataaatctatatttcttcatttcattccttcatccatcataaccgtagtttccttgtctcttcagcaaatagagttcggctttggaacaaaggtgttgattctgaaagtttccatcctaaatttcggaagcatgaaatgcgcattaaattgaggtttgacctatttctttaatattcaatagcagtatgtgaaaaaaaattgtgcatagctaacttattttcctttttctctcttgttagtggtggtgaaccagaaaaaccactcataatacatgtgggtcgtttcgggcgtgaaaagaatttggattttctgaaaaggtaatctttttggcttgtacatatcactgtttgtcagtgtaaaatcaactccaaacaaaatttgaagaatatagatgggggaaaaatggaaagagaaagctcctcaactaacaatggattatttcatagtacatccgtcccaaaatataacaacctagaaccgaatgtgatatttcctagtactatgaatctggacaactacagtgaaaacatctgtggcatgttgttttctctggcatggccattttcattagttgtccctgagttagcataacttgcaatcgtcttagccttttagcttgaatcatgcttgtaatatgacttacatggtcctgtttatgactttaaccaagcagccatttcaaattcgtcacatgtatcatagatcacttatctgtatgtcacatgttcactacatggttgttattttgtcatgtcatcagaactttgcttattttggtgacaatacagggttatggaaaggctcccaggagtaagaattgcttttgttggtgacggaccatacaggtgcattccttaatgttaaatatttttcgttatcaacaagactcatacatgataacatatatattgaaatgacactatttggagcacttcagttttatcttttgcgtatgactggtattatatgcacaactgtaggtgcctagccatctgtttgatccctatagtttcatcttgaatttggagaaacttatgcggcctgtttaatctttggcagggctgagctggaaagaatgtttactggcatgcctgcagtattcactggaatgctccaaggcgaggagctctcacaagcatatgccagtggcgacttgtttgcaatgccttcagaatctgagacacttggtcaagtagtgctggagtccatggcttctggagtcccagttgtcgctgctcgtgctggaggtatacctgatataatacccaaggacaaggagggtaaaaccagtttcttgtttacacccggggatctcgacgagtgtgtgaggaagatcgaacagctcctttcgtcgaaggttctaagagaatccattggaagggctgctagggaggagatggagaagtgtgactggagagcagcctcgaagacaatacgcaatgagcactactgtaccgcaacgttgtactggaggaagaaaatgggcagaactaactaggtttcgcttatcgattcaggaatcgttcaccgccgtctccacctagttactgttaataaccaaagagtttgtacattgtatccaacagcagctcgcgagtttgtgcggctagctgcattcatgtgttcacaaatcacaatcatgggatggccactgaccaaaagcttgtatgcgagtcatgtacattagacagctctttgagattggcgattactatcgaagtgctaactgctaatttagaatactggaggagttgcctgctgtagtgctgtctctagagtgaaagttgaattgtgtgttgttactgtgagctgctactgccaactttctgcctttctggtagctttgctacatttgcgttttgaacattgccatagcgtaaaacctcgagactacggctgtgttcagatccaaactttggatctaaactttcaactttttccatcacatcaaccttacatacacacaacttttcagttacatcgtaccaatttcaacccaaactttcaactttggaaggaactaaacacagcctactgcattttttcatgccgactgcgagcttggcagagtgttgagtctgttccaccagcagaagtgtgatctgtaaccctgtatcggccggcagttaagctgcaggtctaaacagcacatttcacgcatacctatcttatcataatatttatgtatacaggaatattattaacttatataagcacaaaagcgaagatgaagtcaaacagcaagaaatacgtcctgatgtaaatatgtactacttattgtccaactccaccaaaggctgcagtacttaaaaacaaagctacaacttaggaagaaagggtcaaacagcaagaaatacgtcctgttgtaaaaatgtaatgtccaactccgacaaaaggctgcagaacttaaaaacaaagctacaactttatacttcacaagatgaatcaacaaattgaatgagcgcggaaaaatgtggacttaatatggttttccacagaacatatacaactattgcagcaaaactaacactacttaaaacaaagctacaactttccattttacaagatgaatcaacaaattgtatgagtgccccaaaatgcggacttaatgtggttttccacataacatatacaactattgcagcaaaactacactatctctatcaacacaatcccctccgccccaaaaaaaaaggtgatatccatgcaaacagcacaagcaacatgttttcattgacaattgattaacaccacaatattactccctccgccaagaaaaaaggtggttttcatgcactatggcataagaaacatgtaattgtgcacagtcgatgtctcagcaagcaggttttctgtctctgctcattacttgtttgcatttgacttgctgaacaattaaacagaaaggccatggaccgtgacagtagtagaaaatcatcagctgtacgtttggagaattggaccttccatgtactgaatggccctatccattatgctcaccaacaaaatggtaagttttcagaggaattgcagctgcagatgcatctcactacaaaatcagtcctgaagtatgtacgggtaacaacaagtaacaactgcaagtcacatatgagaagcttcaagctattgctgtagacttttggcatttgaagcagcattgttattcatcttgcagcactatcatgacttctccaccttgactgagaatgctgtctagaaatgcaataagtttttctttgtcctgaaactccttgggtgcagaaaaatcactatccaaattaaaccaagtgccattaatgcttcgaattgccacccaatgccggccagtccaaagccctctgaacctcctgacgggtacattgatcatcagaccaaacaatgcatctgcatccagatcgattgaagaagcccctttccgatgatcatgccagattaccttcttctttctagcttctaatgctgtgatgagtacatttacatcatagttcccggtgaatacgttgtggtggggcttaaaaatcaatgacataggagtccagtgctccttatttggatcaatctggacgagatttccagcaatcccatctaactcagctcgggtgaaagattccttttcctgaaccatacaaagcataattgacagttaaaaatcggtacacccatgctgtttctggtaggatcacactaccttttctgatttggtcataaacggttaagcaggcaggaattgaaaaacacttgtttgtaatgctcatgcaatcatatagactccttgcttgcaagtacaaaattactctcagattcacataagcagcaatttcacatgtcgtgaagaaaatcaacaggacataaagatttatctctactaagctatcagctgaaattcatgattgacgagagctttaattatgattgaacaaaagcgtgctagacgaatgtgaaatagatataaatgtgatgcgcggttgatgaattcatggaaaacattgtccaatccgccgaaccgttccaacaaataacactgagagtgaccgacttaagtatgctgtagctttcagatgcgaaagaacactattccagttttcctgcgtccaatatcgtgagatatttcaccagcacacaagttttgatgacatcgattcacatggaaaaaaaaatgcacatcatggacaacagaattggagtacaacgttcaactgctaacaatttcctcactaatatcgattagtgacataagccacgcaaaataaggaaatcatacgaaaaaggaacggaagttatgtgaaactctcgagagaaaaaaaagtagagacggtagatagaacttcttttgtttagaacacaacaggataacaccggaggggagagagacgacagacgagctacctgcataaggttgttgagggcgtggaggagacagaactgcagccgttgcctctcgtgatacaccttgctgcttctgctgctgccgccgccgccgcccatcgcactcgatccctcctcgtcttgttttgcttccgatttgggccccgattccatgcggagatggtgcagggaggagaaggagggttcgggttcgaaggaaagattacagcggcccaagattcctcctctttcttctcgccgccgcccgacggccgccgcgccgctacccccggcaggaacttctgggtcgtccttcccttctttaccaaacgcaacagcacacaggacaggagattcaccgagtcccggactcaggacacgtcgcgtgttgtggtcattgctatttcgcgaatacaatttcgaaaagaattctctccatctcgcttcctataacttttttgctaccgaaaacttatatactaccggtcactgaaattaggaaaaacttcagccgacaaaactataacattgcaaaatcacgagttaaaaacacatgttgaaaaatattatcttatgtgtcattgatacatctgtttagacttcacatattatgatactttactactcgcttatttttatgatggcaatttttaaaaaatttctcaattagaaactccaattagaattgctgaaacaacatcacttttacagctttaccctcttttctagggtagggaactgtttacactaaaattgtctgtgctctaaatattcgtagtttcaaaagtaaacatatataataaagaactctaggtttttaaccataccagcaacctcaaattctcgcttcatcgcataagcatgggtttggttaaatgattggaatcggttgggtcgggataaacctattttttagggtgtttgatttggatgtaagtgagatggaatgttccttgaaaataaatattccccctaaattcgaattagcactatacttagagcatctccaacagatgcctaaacaggtcccaaaaattaaattttaggattttagttcaaaggaaagctccaacagctgcccaaacttgctcccaaaaatcccccacgcccaatccagtcccaaaaccgagtcagatttggggcagccctgggcgttcccaatcgcagcgatcacacgtagatttctttgctcgcgccaatttcttcctcctccctcctctcctcgccgtgccctgctgccgtcgctcagtcccctctcctagctcgcatcagatgccgccaccctgccggtatcgggctttctccgttccattcgtctctgtccagaccggcacctccatccacgccgtcgtggccgttgtcgtccacgccgctagggccatctgtctgcatactatcggcaggtcatcctgatccacccgccgatctgtaagctgctcaagccctagtactgaatgaacctaacggcctgtttggttggagggagtttttaggagggattgggagtttagagggatgaggctattaagagttttgtttggttgggagacatgagaattttggtaggatggagatagggaattgaggaaggaactcccttcttttcaatacctgggtaggggcaggtaattgggagggaattcctcctttactttttctaagcaaatctcagccatccctttttattaatgacataatctccaactaaactccttatcaatttccatcacctctaccaaacaagatattaggattaaaaatcaaattcccatcttaatctcatcatcaattccctcgtgtaaactcccaatccccttccctcgagttaccaaacaagccgtaaagaaagttttgacgatgtgtatcgttgtactttttctagagcaaattgaatctgaatattgtttggtggatgtctatttgctattttgcttgcacacaatgacaaatatggtgttaagttttggttgattgagaaatcattattttgaggttaaattgtcggatgagggcaacactgcacttggttttcagtttgctcaatgtttttcaatttgcaacactacactgcactgcctgtcatgaagcaattgcatactgaagcttcaagagattctgcaagctatcaagtctttgatgctgaataatttggcgttggtagtactgacattgctgaactgaataatctggtttagaatgtagtctgaaaatctaaaccatattatgcgtgtggtacagtcaaaatttcagtaaataataatatgtttatgcctttttacataactcaggaaaaggagagggcatgacctagccttattcttgtgatgatttgtgacaccaaatcagggaaggagagggctagaaatggtaatgtttgttggcaatcataattggacttcagaaattcaatgtatttgttaggaattcacctagatatattcacgggtattatgaattcaagggatttgttttgtagcgatttcagggatccctgtttatggttatactttttttagataatggaagctttattaatctcaataaaactctatcaagtgatacaattattctgagagcacctccggcttctgcacccaaagagtgcacacaaccaacaagaaagaaacaaaagataaactcatcatccaaatagcatggacaaaaagaacttcaggagccctctaaccgtagcctagaacaccacccatgcgccggagtagaaaactccatggccactagctccaattgttgacaagccgcaatgatagtaccccgcaaattgaccttctgaaggatagcccatgagcggagccaatgtgtaataaaaaagataacctgcaaaggagaagatatgttttttctttcaaaaaccacatcatttctgcaaagccaaatagaccaaatagtggtagttgcccctaataagaccaaagatctcaaattgcgtggttgtcttcttatccaatgcccaaacatatgagttgtactattaggtaaactaatattcgaagcaaactggattaaagaccaaactgcgcgggcaaaacgacaatcaaagaacaaatgattaatagtttcatctttgtggcagaaagaacaagacttgtttcctctccaattccttttaataagattatcttttgttaagactactccatgacgtaagtaccataagaagatcttaatctttaggggggctttgatcatccagattcttttgtttatattgggaacatcggtctgcaccaacgaaagataaagagatttaaccaagattctgtcatcagtggttagattccatttaaactcatcttggtcatgagataatataatattagcgatgcgtgagagaaggtgattctacgccactaacttagagcgagtaaggtccctgcgccaagaaagtttatggttatactatgtcctcattttcaatttcaagtaaagcttgtaagcatttgccaattatagtcatcccaagatccatgattgttggagagctcagtttcagcacatatgtttcgtcaaaccagaactttgtcatagtgtaatctttacttgacctagatccacgatatagtgtcataatgcaaggcttactagctgctggcaccctcaccgtgccgcaggctggccgcgcattgcccgggctaccggctcccagctgcaatgccccgatcgcctaaccgtcatgtctctatggtgattgcctgctagcctgctaacgactactccctccgtcccaaaaaaaggcaaatcgtgggttcccgtgccaacgtttgactgtccgtcttatatgaaatttttttataattagtattttcattgttgttagatgataaaacatgattaacactttatgcgtgacttatctttttaatttttttataattttttcaaataagatggacggtcaaacgttggacacggaaatcagggtttgtctttttttgggacggagggagtatgtggccgcgatcggcctgccatgccctgatcttgccaacgatcagcctagtagcgacatactccctccgttttttaatagatgacgccgttgactttttctcacatgttttactattcgtcttatttaaaaaatttatgcaaatgtataagatataaatcacacttaaagtactatgagtgataaaacaactcataacaaaataaattataattatgtaaattttttgaataagacgaatgatcaaacatgtgagaaaaagtcaacgatgtcatctattaaaaaatggaggtagtacaagagaaaccagattgctagaaatagttgaagaggacccaccagcgatgatgtggcataattcaatgcttttgggaactaaaaatagggaagctcgtggacaagggggtgatttttgggctcaaattattttgggatgaccccaatctgagatttttgggagttaaattttaggcatctattggaaatgctcttaacaactagtggaccaattcaacccacttcctctcattgattgtggaccacaccctccgattccttaaaaaaaaatcatcacatccctcacgccaaaatacatacaaatggtccctttgaatcacatgagtggaaaacggaggaataggaaaaacataggattataacagaaatgcaaatgtaaaataaatgattacaaaacacaataaaaacatgtgaatgaccgtttgattgatccacaagaaaaatacatgaatttgaggagagacaaaaactcaaaggaatttttccatgaagttctacctcatgttaaactttctcaaaaacttatatgagaagaaacattccataggaatttcattggatctcatggggtattcaaagagcgaaatcctctaaaatttctataaattccctttgaatcaaatggagccatcccattccaaaacaagggatggacctaagtacctaacatatcccacctcatgccaaatcaaatacatgagtgttgttttgaacacaatctaagatgagaatttgttttcgccgctcattgaaatcatatctattgcgccatcgacaattttgagatcctcccgtttgtcattacttagttggcgctctactgctcatccctatttatcttctgtcattcctctctatcaatagtgcttggtcaacaaatttgccccgaaagacgattaaataaattttatagtgggagaaaacacatgttttttttaaaaaaaaacttcaaaaaaaaatcagcattacaattgtcataagaatgggaaaacctgcaacgtcccaaacaaggccttgcaaaggatcataaggtcttcccagcgctgatgactgatgagtgatgagaacgatgggcgatccaacgagaaatcaagggcagcagcatattccaagggttcgacttaccgccggtaaccgcgtgtttaccgtgattaccggctttatcgcgggggtacggtaatataaataccgcggtaacctccttaaattcaaataaatttaaaaaataatttgaatttttgataaattttgcaccatttcgtacggttttttgcggtaaccgtgcttactgccggggcacggtaaccccgcccccggcggtttgggaaacctgggggcggtttgggaaacctgattccaactcgcaggaactcaagtatactcaacgcagcagtacagcgcgagaaaaccatgttaacagtaaatctatttatacatcgctgtccagtcttctcctatgaagtgtacagactgcgccatctccacaacacgccaagccgtgagatattctgcaatatccctctgttcccttttcatctgaactaaaaacctgaagggaaaaaaaaaaggcccactgtttcacggttgaagaactcgtcgatttaattttgtcaaatctaatctttaaattttaactattcgtgtaggagtaccctccatctctgtcgaattaaaccgtgtttttaacgtaagacgaccaatttaaaaagagtcgaagtggtctgaagtctgaactctgaattttgttgggggaagaaccgaagaggcagtgccgtaaaggcaaaagaaacaagaaacacggcccgagtctagtcgaccacgccccgcgtccgtcttcccccccaaaacttcagcaaaagcaaacgaagtcttctcagattaattctcgcgtcgtgtcagaccacgctgccgcgggggatctgccgggtggcgaggctgcggagatgtcggacgcgctgatcaacggcgtcgccggcgccggcggcgggatcatcgcccagctcctcacctacccgctccaaaccgtacgcgccacctctcctccatccttggattgctagattgtttgggtcaattgcttggttgtttaataacggagggtttgggggtgggtgcgcaggtgaacgcgcggcagcagacggagcgcgacccctccaagccggcgttcaaggacggcgccgtccgccagatgtgcctggtgcttctcctcctcctcctccccaaattcccttctcgtgttcatgcgagctgacgagcaatctaacccgacccgagtctaatgctaccgcgatctctttgttcttctgttcttctgtggtaggtggtgaagcatgaagggtgggagcggctgtacggcggcctcatgccctcgcttgttggcactgcggcctcccaggttgctttcgttttgctgatcgattttcaccagcttccctgccttgttggaggattagctgtaccagcttctgaatcgaatcattgtgtctgtagggtgtctactattacttctaccagatattccggagcagggcggaggccgcggctctccagcgatccaggagaggaatcggcgatggatccgtcgggatgctccaatccctcactgtcgctgcgctttctgggtaatcctattttgcttgtgcgtctgccattggcttatgctgttatgcattgtgttgtctttttctcggtatgatagttgtaagctcattcttgttcttaatggtttacttatgatgaacaaccttcggtgctgttgttttgtttgcgcagatgtgttaatgtacttctcacaaacccaatttgggtaattgttacacgaatgcaagtaagtaatgcacattattgcagtattatttcccaactgactacttttagtgtaataagaaattcagtggcacatcctgaagtataattcattcttgtctgcagactcaccggaaggcaaacaaacagcagagtcctctggatttgacgtgtgttcttgacaaggccctacaagctcccgctgttgaaaacatacctcacaagactatccatgttgtatgtaactttgatcatttctctttcaggatgagatactctattcttgcaattacatgctgctgattactggatccaagactaacagctgttcttatatggaaaaaaggcctcatttagtttttcctaggcctcatcccagttcctaaactgttagctcagctttttttttttgtccctaaactgcggataaaacccatccttcatctctgaaaaccaagtaaaacttgtcctcctaagtacttcatatagtcaatatgcaagtgctaatgattcagactttgtttggggcatggttgattgactccgtttggctgcagattcaggacctttacaaagaagctggatttttgggcttctggaaaggtgtagttccagctcttattatggtaagtcttatgtcgcattttcttttgctaagttatttcttttttacaagttattgtttccatgtttcatctgtcatcaggttagcaaccctgcaatccaattcatgttgtacgagactcttttgaagaagttgaaaaagagacgtgcctctaatttgaagggagctgatggactgactgctcttgaagtaagcttttggcttttggcttttctggtgactgggatcattgtacagatttattaggatataaccaatttgcatcatgctaacttgctgcattggggcctgaatctacccgtaacgctgacttgaaagtttgttcttctagtaacgatgtttcatgtccagtaattatatgttgcatgtcttaacttcatttaccatgatgatttgctgaaaacactagtatttcttatatgctcctaatactactatttctttgttagttagctatgttatagaccgtcttcatctcacgctgtaaaatccttgttcagattttccttcttggtgctgttgccaaactgggtgcgactgttgttacatatcctcttctagttgtgaaggtgattatttgaacaccagttacagcagcagccgtttctgtgcacaattgagcagacatgtcaagttaaaccatgttttttttttctacaggcaagacttcaggtgaagcaaataattgatgatgacaagaggcaccgctacaaaggtacatcgctggcctttattctttaaacttcattttattatttagagtgaattattatttaatgagtgatgttgctccatatcctgtttctgatagtctttacttctcttctggtaataatatttgctgttctctgactttgttaccaaatacgctatgcaaattttattgcttgcaggcacatttgatgcgatcacaaagatgatacgttatgaaggtttgtcagggctttataaaggaatgagcacaaaaatcgtacaaagtgtttttgcttctgctctcctttttatgattaaggaggaactggtgaagggcgctcgattattggtaaccggcaacaccagccttgttaagaagttaccatcgaagccattaagatgatctaggttgtacaagagttagttccctacttataccacaattgtttccataaagcgatggacagagttgccaagcgcccctgttaggagatatcaagttatctgtgagactctgatcgactgtaggctctccaaaaaaaggagattaaagatgtagtacaattaccactgtgattcttgtaggaaccaataatgatggtatatattgggtaggctatctctgttgctcgtgtaaagtatactgttatggaagattgaaacactagaaaataagttggcaatgagaatcgcaagcgctagtcatctgttcagattacttgagtttctttagcttgtttgttagagctaaccgagaagaggatcgcaatcgtgaaaacttcgcaagtgttcagaacaaaagtagaagtagaaaatttggagttcctgtccatttttagcataactgtgtctatggtgcgccccatctgtcaatgtggttctcaggcaactgttctgatacacaagtgctaatgagcaatctgacccgacaaaaaggaaatgaaatttaatttgattatttcaaactcattttggtgaaactaagcctccttctttactaagatgcaaattcttcctaacacattttttaaactgctaaatggtatgtttcatatgaattttttacataaaaatattttaaaatatcaaataaatcaatttcaagtttaaaataatcaaaacttaattaaacataagctaatgggccgttttcattttgctttcctattttatttcatctttattagaaaaaaaacaccatctaatagactaatactgcctcgagggtttttctttaacaatatctaagtttttttaatgaagagatgcttcttctaaaatccaaacacatagtagtgtgtgtatcttactggtctggcgcgaccgactaagctgacactcgcgagagtgtggccggtccggtcgggtgggggtggataaggagatagagaagcggccgctccgcagctgcagcggcaaagcctccccgtcgtccagcccacgcagcgcaccgcagcgagcgaagccgccgcaatggccgcctcctccgtggcctcgactctcctcctctcgctctcctcttcctcctcgcccttcctctcccccacctcggtctccttcctcccatccgccgccgccgccgcctcctcctccccgcgcgtcgccgtcgccgccggcaagcagaaggcggctatctccgtcctccgcgcccttcgcgccgaggcggccaccctcccggttctctccttcaccggggagaaggtcggggaggtcgccctcgacctcaagtcggcgccgccctccaccgcgcgcgccgtcgtgcaccgcgccatcatcaccgaccgccagaacaagcgccgcggcacggcctccacgctcacccgcggcgaggtcaggggaggcggcaggaagccctaccagcagaagaagacggggaaggcgcggcgcgggtcgatgcgcacgccgctccgccccggcggcggcgtcatattcgggcccaagccccgcgactggtccatcaagatcaaccgcaaggagaagcgcctcgccatctccaccgcgctcgccagtgccgccgtggccgacgatgcattcgtcgtggaggagttcgacgaggagttcgccgcgggtcccaagaccagggacttcgtggccgcgcttcagcggtgggggctcgaccccaaggagaaggccatgttcttcgccacggattttgcagacaatgtgcggctcagcggaaggaacattggctccctcaagatgctaacccccaggactctcaacctatacgacatcctcgatgcccgcaagctcttcttcaccccggccgccattaactatctcaactccaggtatggtgccaccgtttttgatgaatatgaggatgataccaatggcgaggatgatggtgaggaggaagcagaggagttgcaagaaggagaagggagcgcagaggaggctgctcaaggtacatagctatgcatgaacaatttccaggtgtctttttattgtttctatggtgggcatgtgcgaaatgactttgagtaactaatgctatccagtgatcctttattttacatgttttagttgatagttaggagagaaaatgctctgctttaatggcatgtacagtagtttttttttttatcttttaactcttagctatgctctgttgtaaatatcatgatcgatgctatacgtatgctgataaagatcctgacatgcgttttaagggtaaaaacaagataacgtggcaaagaaacagaaaatgtagccagttttgtcttatgaataccatcttaattattatggagaaattctttgtggccttgtagacttatggagctaatttttttttcgaaatagttctcttatccttaccagcatgcaaaaggaaaaatgcttaccatgctaatgtacatcgtatggttttttttcctcctgaaagatccaataagtccatgacataattcaatggtctattttagaagcatgcttagagatccacctacccctatgctagctctcagtagacccactgagtctgtattttactcgttattttgcacctccttagggtttttattcagagctcatgagcaactcaacaatttgcgaatagaaaatgacttcacctaatggtggttaaattttcggctgaaggtggattaagtcctaagcactaaactaaaaaataagaagaaatgagactgcatggaatccatgaacaccactgaaccagaactctggggatactggtacactccttataatagtgtcacaatctgctgtgccacacagctacccctatcacctatcacttgaaacattgtcagccattggcactgtcatcattcacttcaaagatgttctgttagaccttagaaccatcttaataaagtagttagctgtgaatatgctggtttaagttgctttagaggtaaaacctagttaaacacatgttttctccatcactcaagcacttccttttcgtaaatactatgcatagctacaggactaagttattattaattgacattcagttctctgttacattttggtgctgcatattataactttctcttattttgagcatttctcaggaacttctttttgtatgactttcagatgaggctgcagagactgaggctgatagcaattcctagggaaggaggtgtagatcgcgtgtttttcgtttgttggtctggtaattgcttccctgatgcagaagctttttggcttacttttgttgtaagtttataatgtttttttttcactgatgcagtatattagatcttcaaactgcacatatattttcaaatacaatgtcgtgtcaaccactgcatatttttcttccaattttatacagaaagtgcttcccaatcttgcttcaaaaaaccagtgttgacctgctggttaccactaattttctactccctccgtttcatattataaatcattttgacttttttttcctagtcaaacttatttaattttgaccaaaatgatagaaaaaataataacatttttaacacaaaacaaacatgttatcaaaaatatattcaaagttacatttaataaaactagtttggtattataaatgttaccattttttttctatatacttagtcaaacgtacagaagtttgactccgaaaaaagtcaaaacgacttataatataaaatggagagagtaacatcttgagtaggggtatgattacaaaatcttgtctccttaaattgttgaattgttccttgttatgactaactttttcgctgggtgagctctaacaagtaacaactaacaagtcttttcagaggacttgctgcattttacaatgtggaaagtagcctagctcaacttggacatggagcactggagcagcatagcccgggttagatgctgatcttgaaactctaagcccagatcagtcgtaaacaacagaccattttgctcaggtttacttgtagatcacctgagggtttagtgaaccaaccctctgcttatgcctaaccataatgattccatcatttttctttcttacctgggtcatgcaagaagagttgttgggccatccttaagtccacccagacaactttggaccagatcatcacctttctaattgttctgacattgcactacaagtggattatgggcttatgggcaaagctgcgtctgtactttagaaaggtgcaagatctggtcttttgctatgtctagtattttatgtcatttttagctggtgctatcggtagaatttacttatagtttgctctgtcttactctgctttcaacaatatctaaagaaatcatttgtgagattgtgactgacataatagtgctgtatctatgaaccgaaaagggaagagtcttgcttaggttgagccagcttctttggcactatcttttaaactttttggtgggcaaaaagctatccatattatactagcccactatgcataaaaggcatacaaattatggggatggacctgagcacataatttcactctcttttttttttcttgagactggccattgattggttctagtttggaatattggatcgattgactataactgtttccgtccctacatgttaggtctgcattatgctccttggaaggaatcattagaaagaaaacttaccactacactaaatgtcactcaccgtattaagttctgtgcaaatatgcagcagaattctattgtgccactggctgctgttgtgcaactgaatttactgggtgggattcttaaactaaaaatataccagatcatctcagagtctccggaagtaacaggaaaaacggttgattcatccttcaggctactgttaggacacgaaaacaccagtggaagaaataagttagcatgatggtataaatcttagacattatcgtcgttgtcggttgcttttcggcgtgttggtctgatctccttcggagctcttttatcatccgtgtcgtaaagtttgcacacgtcgctgtcgattagtccatccacagctttgtggccaatgggccaagttactttgctccgattcatagtgctttgtggttgtttgacccaaaagctttacagtccatcttttcatttatatttatacttattagctaaaatttaaatttttaactttaaatttaaagttgatttaaaggtatttttatcgtagtttattttccagactttgcttttagatcgttaagaacacatctataaaagttgtattcacaaattaatttttgttacaaatatgtcgtttcttttttttcctccaatgtaccaaacgatgggtctattagtttatatgtcttttgactgttgtcgcatttccgtgaaattttcctcggaaaggcatctggtatggttggacccaggcctttatatcctatctcccaatcgaatgtgcatgcaacttatggctctgccgtctatacgtgttctgctcagctgctctccatgctctgcatttgtagtgtggaaaataagaatttagggccctttgaattataggaatgaaaaaatagaggaatagaaaaaacataggattctgacagaaatgtaagtgtaaaacagaggattgcaaaacacaggaataacgtaggaatgaccgtttgattggaccacaggaaaaacacagaaatttgaggagagataaagactcaaacgattttttccatgaggttctacctcttgttaaaattcctccaaaacttatatgggaagaggcattccataggaattttataggattccatagggttcatttctttaatttaaagggcttggtaggaaaaattactataggaacgaaatcctctaaaatttctatgaatttcctttgaatcaaagggtacaagtagtctatacgtgttctgctcagctgctctccatgctctgcatttgtagtgtggaaaataagaatttactaggtacaagtagtttgagggtaattgaaaaggatatatttagattgatatgattttaaaccatactattgaaagtggctatacattaaacaagcctgtagatctagatatatcgatttatacaactagaaatatctagttttacaaaatcttggatccgaaagtgtgttaaataagatgttaggaaattcataggaattttaggcccctttgaatcaaaggatttatatagaaatttcataggatttaaattctataggaaatttttcctatttggccctttgattcaaaggattgaagctttccaaatcctatgaaattcctatagaatggcacattgcatatggattttggaggaaatttagcaagagctccaacctcttggaaaatttcctttgagtctatctctctcatccgattcctacgtttttcctgcactccaatcaaacgaccattcctgtgttttgcaatcatctgttttacacttcaattcctgtcagaatcttgtgtttttcttattcttccgttttttctaccctgcgattcaaaggggcccttagaggattttattcatatatgaatttttcttacaaagccctttgaataaaaggaataatcctatggaatcctatgaaactcctatggaatgcctcctctaatgcaagtttcagaggaattttaacaagaggtagaacctcatggaagaaatcctttgagtctttatctctcctcaaattcctgcgtttttcctgtggtccaatcaaacggtcattcctatatttttcctgtgttttgcaatcctctgttttatacttacattcatgtcagaatcctatgtttttttctattatttcatttttttcattcctatgattcaaaggggcccttagtgaatcctatgttttttctattattttatttttttttattcctatgattcaaagggacccttattgacctagcgagacaacgtatggttctgtaaaataaaaactgtaaacacacagcatgagcagccgagcagggagcggtgtagtgggccaaggcagccaccgtttcttcccatttccccccaagacaaaccaaatgaatcgctagttgctatgcctattagcgatgtctgttatctttatgtctttcgattgactctaattttgatctttgagcaaaagggcatttagctgagtagttacaaagagtctcagtacatcttaggtccagagtttgattttttgtgggagcgaattttccaacatttaacggctttgtgcttttaatggtagacgacgtatctctaggatggatttgccgacccagtcttcgaagatgcttataggggtagggtctgcatgcgtgcgttcatagtggtgtgagtgtgcgtgtgttgtgaatgtctgcgttgtaatatgtaatcgggtagctaagggtcttattccaccatgggtgacatagttacattagaattgctagctaaaaaatcttcgtggttagtcaataataaatgagagttgaggatttgtcccatctttatttcttattctgacttatttttatctttactattttttcaacaaacttataattgtgcgtctcatgacagaagccaaagatacaatccatttttattacctaaaaattagtgataccctaattcaatcaagaccgaaggatcccaaggctcccagctgcccattccagatggacggcacggatgtacgctgatgacatctgcgctttactggttacaaatatagaggatctgcgcccctcgcgtcctgcctggccttttccgtgacgagacgacgcagaacagaccgatcgcccgccagccatgtgaccatctgccgtcgcggtcgcgccggaagcccggaaatcgcacccgcgcgggcacgtcgtcgtagctttccgccgaaagcaccggtcgatccatccatccgcccccaaccaactgccgtttctcgctggctcgctgcctctctctcctcctcggccgctcggcgtcgcgcacgcccggaagcgcgacaccaccacgtatgcacgctgaaccggccactccgcgtccgcgagcgttgatgagctgacacgcgaggagggcgttgccgttcgttaacgacaagatcgattctggatagcgtcatggtctcatggagtcttaaattaaataaaaatgatagcgtcatggcgccgaaaggtgttgcccattgcccattggttgccggcccgagtacagctgcggaatgattgaccgggatcgagctgaactcggctatactctcgtatttgccggtgcggccggttgctatgtgcggataagagcaagtttaatgagcaattctactgtgtttgaggagtcctcataattcctaggtatcaagaggtataaaaaaaatggtacctctgatatctcctcaaggacataaaattactcaagtttaatagtatagccaactactaactccaaatcatcaatagtcaatttaatagccaacttatacaatagttacatataaacatatactacacttttaatagcatagccaactgctgactccaaattatctatagtcaacttaatagccaattcataacaatagttacaattaatactagtcccacatgtcatacgcacatgtatcttggagttcgtgctgcagctggctataaatctgtagcccgctgctattctttcttctcttttatcttctcgaaatgtgtttatagcttgcttatagtctgttgttgtatctgctcttatacaagggacaacctccacacaatctccaataaaaatacaagatgatgtgagagtaaactaatattagagtatttgttacctattaattaataggaagatgatataaatagtttaaattagatgtgtcactcgtcttcactataaaacttgccgttttagacgccgaaatttaatgacgcgctcggtcaaaaaattttattgttggtactgctattcttagggcgtatgctaaataaagaacccccatgcgtgcgcacgtgagtattgtaaatctcttcggatgagagggaaaaacggaagaatatgccaatggtacccactcgttcgagcaatctagaaggataactcaactcacctgccctcgtctctcgggtcatgagaatatgccggtaacaaatggcaacgtgctaatataacttcctccccttcttacccctcggttcctgatgcccaacatatatatatccctccttcctccatatccaaggttagttctacatttcacatctcttcattttctttggctcttcagagttttgtccatctctatcttcagagttcttcagagtttgcttaccatatgatcgtgatcaggtttgtagccagccaaatcttaattcataagaatgcaagatattcatgccttgacatgtgatttctttatttgtctatccttttcaggtatcggaattctctttatttataactacaatgcaatcgctcattttacccgtaacaattaccaagagcttgtttagttgacaatagagatatcaagtcaaataaggttgtttgtgttacacaagataccgatgaattttgtagtgttgcccttctattgggaattcataaatgttgccttgatgagatactacagtaccaataagttttttttaatgcctagaggttaatgaaacgtatagcatatggtccgcaaggctaaccaacagtggatcatcccaaacgaaaaaaaaaaactatgcatgtctctcccacgcgcattatttttcaaggtaacatacatgagccttttatgcacaagtgcatagaattgcaactataagatttttttataatagctttgatatatttaaaattttattacacatgtcctatgctaagtttcaaatgtaagttgaaaaagttggtagataaattcatggcctaataatgatacctacatgaagaggaacacttctacaagcgtcatcaatgttatatctagctatctgcaagttgagggttttcgtcaaagtatggcatcactcaagtcacacctacttaattcaagcatggcgaaccaatgaaataggactaaaaccataaatgctagataaatcatgctagaaactcctatcataatatattgctactaaatcacttattaccatcattagaaagagaatatcattggtactagctattaagagccatgtcagccaagtcacgttctacttgtgacggggcaatgaaggacaagtataaaggtgtgtgtgttgtgtgtgtttggggggttgggggggggggcaatggaccaacatccggtacttttacatgtaaaaactaataaatatttcatattagtgttagctatgtccgatctcattcgagacaacttgttgatacttgctaccccaagtctacatatagattgttgacatgtcagatcaaaactatcattattaaaagctcttctaaatgcaatttgagcttaactcagtttttttcagcctattccttttatccctcatgcctaaaattgtacaatggttagccctactgcaaacgaccttgcacaataaaaaaatcatgcataattgcatattcgagtgtaaattctttttgcatatgtcttttggacagtacacctgatatgtactcactccatttttaagaaagactaatttttaactataaatatggatataaactatctttagatttgtgttaaatggtgtgaagttaaaaataaatgtggcatcctaaatcgatccatacacactattttgtctattggatgtgcacttctgattttttttcttaaaagtttaacttgtctagtactatcgtaaaactatgttgttaaaagttaccattgtatatacattaaataacttgccctcacgtctttacaatgatgcttttgtagctttccctcatttttaagattgaaggtttttatgttggattaattttgccatcggatatcaattgacagcgtattacattgatgcaatttttcttttagctatttcttatcataccctacaggtaattctcaaaatcggagagatttacaaggacacaatagcgatataagtatgactccctcggagctctaattatatagcacaaggatgattcaggactcatccaccatataactataactctctcagggctccaatcatatagcacaaaaaggattcagaactcatccataaacagtgacgatgacccgcaaccactgcgagaaaaccttgaccacggacaacgtcagagattttagccacaggataacaaactcacaggaaatggaaggaaagtgagaaatatctgcagccgccgtcagcctcaggcctcagccgctggcaaacgcaccgcatcagcagcagcagcagcagcagccatcccaagcgagagagctttgctttcgcgagtcgcgcgactccgccaggacaggaaaaaaccggaaaaaaaaaaccccgcaataaaatttccccaacttccgctttttccttgcctctccccaccacaccacaccaccccatctcccatctcaccatccccctttcccaccctcccgtgcgaacacacccgcggcgcggagcccagatcgggatcgcgacggatcggcggcggcggcggcgatgggaggcgaggcgggggagcggcggctggggagggcgatgagcttcgggatcccggacgtggcgctggggctggtgatggggttcgtggaggacccctgggaccgggacgccatctcgctcgtgtgccgccactggtgcagggtcgacgcgctcagccgcaagcacgtcaccgtcgccatggcgtactccaccacgcccgaccggctgttcaggcggttcccctgcctcgagtcgctcaagctcaaggccaagccccgggcggccatgttcaacctcatccccgaggactggggcggctccgcctcgccgtggatccgccagctctcggcctcgttccacttcctcaaggcgctccacctccgcaggatgatcgtgtccgacgacgacctcgacgtcctcgtccgcgccaaggcgcacatgctctcctcgttcaagcttgaccgctgctctggcttctcaacatcctccctcgccctcgtcgcccgcacctgcaagtaattattttttacccttacaaaatattactcgagtgagtcatttaaggttctcctttgttcgcttaaaaagtgttgttgtaaaagggatttgggtatggtttgcttacggaagggaatactacgtcttaggagttctctcttgctttggtcactataaaaacatcttagttctagaattcaactttggagataattgtagctcataggtattaaggaaatggtgtgctttaactgtcacaccctaattttctagtgaggtgcgaggatttagcttagatccaaggctacttagtggaaatggataagtagaaataggttactgcaagagtgcggtggatttctagataattgaccagccatatgttgtcatttgcaggaaacttgaaacgttattcctggaggatagcataattgctgagaaagaaaatgacgaatggattcgggagcttgctaccaacaatagtgtccttgagacactgaatttctttttgacagatctcagggcatccccagcatatcttaccctccttgtgcgcaattgtcgaaggctgaaagttttgaagattagtgagtgcttcatgcttgacctggttgatttgttccgtacagcagaaatattacaagactttgccggtggttcctttgatgatcagggtcaagttgaagagagtagaaattatgaaaactactatttccctccttcattgctccgcttgagtttgctctacatgggaacaaaagagatgcaagtgctatttccatatggtgctgcactcaagaagttggatcttcaattcacattcctttccacagaggatcactgtcagctggtccagcgctgcccaaatctggaaatcttagaggtatttcctggtagattagttgcatgtctttttgttatgtttcttgctttgaggttttataggaatattcaacatgggctgataatcctttttctcatgtcaatccaacaggtgagggatgtcataggggatcgtgggttagaagttgttgcacaaacctgcaagaaattacagagacttcgagtagagagaggagatgatgatcaaggaggtcttgaggatgaacatggtatggttacacaggtggggttgatggctgtagctcaaggctgccctcatttagaatactgggcagtgcatgtcactgacattacaaatgctgctctagaagccatcggtacatacagcagcagtcttaacgatttccggcttgtcctgcttgatagagaagcaaatataacagaatcaccccttgacaatggggtgcgtgctttactgagaggctgcaccaagctccggaggttcgcattttatgtaagacctggggctctatcagatgttggccttgggtacattggtgaatttagtaagacaatccgttacatgttacttgggaatgttggggagtctgaccaaggactgcttcaactctcaacaggatgcccaagcttgcagaaattggagctgaggggttgtttcttcagtgaacgtgcattggctgttgctgttttacaacttaaatcactgagatacctatgggtgcaaggatacaaggcatctcccaatggcactgatctaatggcaatggtgcgacccttctggaacattgagattattgccccgaatcaagatgaagtttgcccggacggtcaggcacagattcttgcatattactcacttgcaggaatgagatcagattaccctcactcagtaattcccctctatccttcggtttgagtgtatatgtctgataccaggttgcgaaactcacactctagtataggccgatattgttccaaattctacagtttgctgctcttattctgtttagcaatgagcacagaacaaatgacaaataaaagcaggatagctgttagttcgaggaacatattataacatcttgggactaagaattttattgcatatctgaggggtatcacttctgcgaaagctcagctcaattggccagcacggatatgtaaacttctccattttgattaggatcggacacacaattttgtaataatgttccttgttcaatgtttagtagtattatttgactctttagctttgtgtcacattgtctcttggaagatcgccgcactgtgttctaataagtcattcgctgtacaatatttttatcatccacagatcacactactggctgtattcttgctgtgacttttctatttcttctctctttggttgtgtaacgccccttgattggtctgtatgatggcgcgctgcttcttactttatcttgtttggtggaaatgtggaatcatgcatatcgatatgtaattacatatttcaataagagaaacaatagccaacctcacttttctaatctatctatgtttactcctaaatcctaatagatttgttgataggttctatgcgtttttggtgcctattcattttgtttggtttgggagtgccggtttgtaattgtgtatgcacatgctcctcctttacgtcctgtccacccttttttatttcgagtatggtgttgtcggtttacaaatttatgaggtgaggtggatgcaatctacttcctccatctcacaaagactttatttttagattttcgtatctaacatttaaccgtatatcttatttgaaaaaaaaatgaaaaaaattaaagaaaatagtcacacataaaatactatttatattttatcatctaatactaataaaaatattaatcataaaaaatagttaaataaaacgaagagaaacattatatctaaaaactgaaaaataaagtctctgggagacgaagggagtagcctataaacttgattcggtaacttgatttgcccacagtagcacaaaacccagcctgactgcctgaaccaactgtgtctgcctgcgaaaatgacagcataacagaacctgatacaacacacagtaagtatcaatatgctacagattgtagatctggacaccataacgaaccaccaataatatctgcctacgaaagtaagcataaacatatagaagtatccgatacaatacgacacaaatattatggtacacggtttctaagttggaaacaggtgcaaagtaagcttcacgagatacagacatacacttaggcatagagagctttattgatctctagaacatcaagcttcaattcattctgagcgctccctggagacagaccttgagtaggaactgcggctgtgagagtagctctccctagaatgcctcttacccgacgacctgctgcgcgacggtttcctttcactgtatcttttccttggagaatagctccctgacctctgagaatccggggaacagctatgggagtagctcctctgaggtgatacactgcgagaatagctccgtcctctagcacttggagaatagcaccttctatagtatggtgaaacagaatggtcataggaacatgacctctctcttctgtaacggtatggagatcttgaacggtagcgggaaccacggtaagatgagtatgaccgacgccgtgaaccacgtgtgtcatagggagagtatgatcgccgtctaccataaggagaaggggatctgccatacggagagtaggactgtctcctttcatgtggagagtaggatctacgcctctcatagggggagtatgatcttcgcctgttgtatggagaatatgatcgccttctaccataaggagaataagaccgttctcgctcaggtgagtagcgtgaactgtagcggtctctttcaacaggcgagtagcttggggaatacctccgtgctggtgtcactgtataataaaaaatattcagcaatcagttgtattatatcaggaaaggctagcaatgcttcctattttccagagaaatgagaccaaaccatccagacacagcagcagttaaatcaaacttaccacatgatgattttgtgcctagataccttccgggcgttggtgttcgaccacgtcttctcttggcctgtggaaaggattcaaataagccttttcgccatattagcattaaagagtgatgcaacaaattgggaatctgaacgacatgattaatatggagactatataatgtagggcatacaaccctttggttgaggtagcatgtttggctgttaggttgtaaatcttttgaatttgacgtagagcagcaacggacatctaccctgctgctgtcaacaaaagcttcaaacggaagagcactcaaatattcagctcagcaagctaaatgagcatataaatttcactccaagtagaagtgaagaaattcagtaaatatattgtgattataccttctctacagttatcacacgaccttccaacactgagcggtctagatatttgatgcaaagatcagcctccttaacagtagccatggtaacaaatccaaatccccgggattcccttgtccatggatcaagtactatgctagcatcaataacctgtaatacggtgagcttaaaaagttgtacactattttggtatccctttgcagatactctataaaggttacctctccctcagcagaaaagtgtttctccagatctcgatctgtcacacgagcagataagccagtaacatacaggttgttcccagggttttcaacatcacttgagtccacacttctaaagacatcaaaaggatatcacatactcatcagaattacagtaggcaaaaatgttcaccctcgaatatagagtgaaggcagaaacatactaagcgctaagataaataccatacctagaacgactcctataccttgaacggctgctccgtctgggcgatgtagaatatgagtcggactcatatctatcagtaggagccaatcaataatcacaagacagggcttcaaaaaatgtggaaaaaaattaagtttggtaatgcgtaccttgatcctctggagtacgacatctgcaagatagacatatgattgcatcaatatccactagagaaacaaatatatacaaaaacatgagatgccacttgaaaatgtaattataacaaacagtgggttcatagccttttgaagttgtaactgattaatttatgacaccttggtgacaatannnnnnnnnnnnnnnnnnnnngcaaaacaaaattattatcttcagaatgaagagatgacccagagtatatacctagcgcacgccaaaaataatccacaaaccaacataacgaaatgaacaagaaactgcaagacaggagattctttgtttattttcagcatggtaatcatgaactataacttatgcaattgcgctcagcaattgaagcttccaaccatacagtccctaagataaatcgacttcctaacactgtccctaagtttcctccgaggcatgtaggggcactatgcaagtttcgaactttcgacagttgcgtttcaaactacatatacaatggacaaaaaatgattatgccacaagttgtacaacaatttgttcccttcatttcttcatttcgtgcccctctagaaacccatgtactagcaatctatacctcttcttttgcaaagcaaatacacgcaaatcagatcattttaacaaatgagccgctatccaagatggggaactcctgccgcaacgcttcgaactacagctaggatttatctttatatagattaagaataacaaaaataaataaatataaacggatgtttttatacagatcagaggggcaaaccatcgccatactggaacagagaacgaacggattcaccgtctttagcagagataaaacatgaggagaatcagaggcagcaataataccttccttcgtcgcgacgatccgtgccctagccgagagcgtctctctgtgccggcctctcttgttctcagtcacggcgctgcctttctgcgcgtcggagcgcgtgcggttgggagaataaatggaagtgtggaatggggaaggttctggacggaggcggacgcgaaagtttctcaaatctggttgatgaatcggttgcgcgcacgaactccgccttcctcttcacgccttcacacatggcgcttcttggagccattggtttttctttcggtttgcagtaaataaaagtttcccttcagggtttggtttactttccaactttttcttcaaacttccaattttttcattacatcaaaaatttttacaaatataaacttttaattttttttctttaaactttcagttttaaccaaacttctaattttagtgtagaactaaacacacagcctagacctcttttggtcctatagaaaattagagcattttaattataatgataattctaacgagttttttttaaacaaataattcaatcctatactcccctgtaaaatttctataaaatggacacccccaacagagattttaatgaaaatataagagttacaatccttatgtgtcttacaattgtattgttcatctatgttacaaatattagggcatgtttagttcgcggaatgaaattttttgggtgtcacgtcggacgtttgaccggatgtcgaaaggggttttcggacatgaatgaaaaaactaatttcataactcgcttggaaatcgcgagacgaatcttttgagtctaattaatccaccattagcacatgtgggttactgtagcacttatggctaatcatggactaattagactcaaaagattcatctcacgatttcccccctaactgtgtaattagtttttcttttaatctacatttaatgctccatacatgtgtccaaatattcgatttgatatttttggaactaaacggggcctaagggtgtgtttggttcttccctttcccaacttcaaatctttgttttatgtgcgcacgctttccgaactgttaaatggtgtgtccttttacaaatgaaaaattctatgtgtgaacctcaacataggaaaataataataataaaaagaatggttgattgattttgctttagctgttctatttgtcagagtaattatcgagttatgaaatgctatctccatccaaatcgcacccccattggttggcttattcttggaataagccaaacgacacatttacaaacaataagtaatttgtgaataaagcatttatatacgtgttcttagcgacctaaaagtaaatgctgaaaaataaacttcaataaaaaactctaaaactagcttcaaatttaaggttgaaaattcaaattttagctgataagcataagcataagagaaaagatgaagccgcatatggcgtatccaattaaactacaaaacatattgctaggtttaatgcaagtaggacatgatataaagtagaataactatatttacttttagtcactttattacggtggttcttgcaatcagtactcccgcattcaaattagtgtcaccgagcgctatttgtactttttaaaaaaccgctatttgtttttgggttaattggatccatgccattgcaactttgtgaaattaaaaaaaataccactactattcgtcatatcggctatatgccactagaaatttctaaaattgaaaccataccactcgcgtctcttttttcgtcttctctctcacaccgtctctgttcctgtcctcatcccctccctccttcctcatctccgttcccgacttcatcctcctctctgcgtgagcagtagaacttgatgagggagttggtgacgacggggtcccgctcccgcgtgcgccttccctttccctcttcgtcgctgacacggtctcctcctccccgccactacatatttctcttgccggcgaacttccaccgcacgcgcacaagcacaatcatcacagactccggcgatctccatggctccattcagtggggtgatgacgggtgcgcgagcgcgtcgtacttgaatgcctgcgcgtgggtgaggcacgcggcggcgaggcacgcgaagcctgcggacggggaagggggcggggaagacaacgacgcgagggcggcaaggaggagggagagggtggacggggtgggcggcgaggcctcacagatgcgggagtagagggcaagggtggcagccgcgggggcacagcggcaggccagcgcagcgtggagcgggcagccttgggagggcgccgacgagaaggcggcagctctgcggagaaggaggaaggtggggtccagagccaggggaggaggcagcagaggcggcgtgagagcgcgggcatggcaggagggcttgggagccgccgccgccgtcgctgtcctcgatcccctctatggccgttgcctccatcctcgacgcaatttggagctcgggagtcgccaccgccgccgctgtcctcgatcatcgacgggaggtctcgggagctgccgccgccgccgtcctcgatgccatccgcggtgggagtgctcgggagccgccgctgccaccgtcctcgatgccatccgcggtgggagtgctcgggagccgctgccgctgtcgtcaccgctgtcctctttgcaatcgcagggatggaggaaaagatggagaagaaagaggagggagatggaaacgattaaatagggaagaacgagacggcgtgggagaggagacaaaaaaaaaagggatgggactcaggaatggcatggtttcaattttagaaatttccagtgaacatgtagccgatatgacgaatagtagtgatatttttttaatttcgcaaagttgtagtgcattgatccaattaactctttgtttttagcatttgaccattcatacttaagagagaaaatgtgaaaccatatataaagttctctagattcataaaaaaaactaaatataatataggcacgacacacattcacataaaatctcatctataaactcaactttgttcgaggtaataaaaaagatagatttcatgtgaatagttatgtgttattgttcatcaaaaaattgtcatttttgttactaccaaataaaattgagtttgaacttgagatttggtgtggatatatttcatgtctacgtcaatctccaataattatttttctcagatttattaaacttttagccctggtttttaggggtttttttcttatttgatgattttcaatgaatatgtaccttgcttaaaatagtggcggctggtgtggcagcagtcatttggactatgtggaaagctagaaatgcagcatgtttcaatgataagaaaatttaagatgatctcgttgaactaattcatgaagtatgttattggatcgaatcttggtccattttgcagatacaggaggacgagcgaaagaagactacaactgagggtagtgctgctaaggagaatagccgctgagctatacaactctgtaaatggatggaagctgcaaacgttgaggctgaaatgaagaaagatcatgttttgtcgtgtttcgtcgtatatgtctgttgcaagtcctttggggattcaaatttgataatggaagtctattatctattttagtttagcatgcagttactgggtatgttgagttacagacttaagttcggcacctgaggttggcaactaatcactgttgcatggaaaacagagcggtccatcagtgcatgattagttaaatattagttttttttttaaagttgatcgatatgaattgtttaaacaacttttgtatagaaaaattttataaaaacgcactatttagcagttttaaaaggtgtgcgcgtgaaaaaaagagggaagtgagctgggaactttggctaccgaactcagccttacaggtcatataaactctgttaaaagactttgctatatgcgtttcgataaagaaatgggagacgaaccctctctttcttaaaaaaaggtaccctgcttaaaaacacattatatattattaattgtaaaatgcatgatgtaatgtatatgcacatgaaacccccattagtcgtttcatagtagttcaaacattacaataattattgatcaaaggctacattatttaagaacatatggagtaaccgcatataacaagagagaaacctgtttagtgcctttcaaacttccaactcttccatcacatcaaatatttggatatatgcataaagcattaaatatggacgataaaaaaaccaattgcacagtttacatgtaaattgtgaaacaaatcttttgaacctaattacaccatgatttgataatgtggtgctacaatagacacttgctaatgatggattaattatgtttaatggattcgttttgcaatttacaggtgaaaactgtaatttattttgttattagtctacgtttaatacttaaaatgtgtgtccgtatacgttaattttttttaccaaaacaactaaacacggtccttgtcgtgaaaaaattatatatttaaacatagcagtaataggtagatggaggcaaaccgaacatgtaaataagcatacatgtttatattatgttttgcaaaaagaaaaaaaaagaaatagacagagggagcatgctatgtcgatcataataagtatttatatataggatctgttcagattgtagccaaaacaaatattatcaaattttagcaatcgacaatttggcaatatcatcgttttggcatgatttcttatgtatttcctagagtttggtaaaaaactaaatgatgcatatatttgataacttttttaaaaaggtatggtttgaaataaaattaatctgaataacgccatactagttaatttgaatttgaaagctgagtggaggaatttgaatatttgatcggcgtgaaggtcgtctttccttcgcaattcacaaaatcggtccgggtcgaaccaatcaaccaaagcccagacagtacaccaaatccaaattggcggttggatcgagccagcgccgcggccacggcacttcagtgctccatttgccccaacctgacaaaaccaacccgacccgcaaaaatccctcgacacagcagcacacaagaaaagcctctttgctcgccggagagagatctcactcccgcggcggccatggcctccgggcaggactcgtccagcacgacgctgatggatctcatcacctcggatccgtctgccgtgccggccggcggggcgtcgtcgcaccagcagtcgtcgtcgtcggcggcggcggcggcggcgggtggcgccctggggaggcccgcgccggcgccggcggatcgcaagtcgaagagggggaccctgagccagatccagaacgagaccatctccgccgccaaggcgctcaacaaggccctcccgcagcgcaacaggaagaagaaggctagtctcccgttgccccaacccccggccgctgccatctccgcaccccgcttccagtctgactctgttgcctctctgctttctcgtgcagcccgtctcgtacgcgcagctggcgcggagcatccacgagctcgcggccacgtgcgaccaggttcgttctgctacttcggttggatcgaattgcgtggtttgagcttggatctgtaggctttagctgctcttgtacctccctttctgcagaaaagttctcagaggcagcttgtgaatagtgtattccccaagcttgcggtgtacaattctgtggatccttcggtggctccatctcttctcatggtaagtatgccgtcctctactgttttagctctttttatggcttcatctttcacgtagacagcgtaattacttggtaaaagcagtaactagggtaattctcagaaaattcgactatgttagcaccacaatgcattgtcactatggtttgagtctctgaggagatcaatgacaaccttttcatgtttaaaacagaggaaaaaaagtacgagtacttaaatatgtgttgcaacttggaactgaaactgcacacatcgcataattcactgttagattaacctaacgagatcttgtttacttcagttaacttttctcttaatcgaatctggttctgtatttacagcttcatcagcaatgcgaggatagaaatgttctgcgctatgtatactattatctggctcgcatattgtcagataatggtgcccaaggtttaagcgctgctggtggcatacctaccccaaattgggatgctcttgcagacattgatgctgttggtggagtgacacgagcagatgttgtaccaagaatagttgatcagctctcagctgaatcaaccagcgatgatgttgagtgtatgcttttatactgtgctctcaatatacgttgaagttgtattatgcaaaacttgtattccaaaccaacctcttgtcactgttttacattttttcctcattggtactgctccccttttgcactgatcacacctcatgattagttctaccatattctaagcatgctatctcattttggtgaaataagtattatgttattttcttctgttttgcatcttagtgagaattatatttctagtaaacatctaattctgcataaatgataccatatgaccaaataagaatgatcacaatattattatgcatggctgagctaaaacaagatgctctttaatttcttgaaccaagcatgcttaattcttattaagttgcattgggtggttcttcatagtgctaaactatggattctggtctttgaagttcatgctaggagacttgctgctctgaaggcccttacctcctcctccacaagcaattctgagatgttggaaaaactctacgaaattgtgtttggcattttggagaaggttgataattgatatgcttttcatattcagattagttcctcaaagttttattgccctaagttcctttttggtatcccttgtttttggctataaaattgacgcttttcttctgtccatgatgtattctgaatcctttcaggtggctgatactaaacagaaacgaaagaaaggtatatttactaagcaaggtggtgataaggaggtactaaacagaacgaaagtactatttattgtatatgcacttaacccttttcttagaggtttcttatctcataccttgctgataatgggagttaagaatacacttattggaacattgtagttaacctggtagttttttcttgactagataacaaagtaggtgacaccacttcctgtttattttgagctggacttaaaattcctcactagtatcagtacaagctgtctgatgatgcctttctaatttgcatttctttgcagtctattatacggagtaatttgcagtatgcttctctaagtgccctgagaaggcttccacttgatcctggtaatccggcatttctgcaccgagctgtccaagggtaagtgtgaccttttttcctctggaaacttaagtttaggtttattttccatgtctgtttagtttaccagttatctactacctccatttcatattatatgatgttttggatttgtcctaagtcaaatttcttagatttcgaccaactttatagaaaaaaaaatcaacatctggaacaccaaattagttcatcatatccaccattaaatatattttaaagtacatttgctttgtgttgaaaatgttgctatgtttttctatagacttggtcaaacttaaagaagtttgacttaaggcaaacccaaaacgacttataatgtggaacaggtcgaataggttattgcttcttttgaggataaatgggggcatgagtattgttttgtggtatcttttatttgattatacaataatagtttttcttattgggagcctagtctaaactaaaagattagatcattgtgatgacattgctaatagtacggcgaaggaggattcttcagggtgtgcttaatggagaatgaatattcgacatctgttggtttgttaatataacctatcttgagagatctagaaaggatgctattctcgtgtctaccttaaactgcaataccgcattagtgttttttagacggatataagattgtgagagccgatgctctctttaggccttaatatggatggatatccagtgttcaagcaggtaagtgtaaagacggagttatcaaatggtaaacttcatcgaaaagaatttctccctacaaagattacaaacaactccttaagctacatatttgtattgaagtcttctttaagcaaattgatcatttcattgtgttgtctgaacataattatcaaatggacacctaagtttttgtctatctatttttatgaccacttgattctgcttctgcaacaaaattacagaggggtatagcctaatcaaaaagtatcatcaaggaacctgctgttgcataattatcattttattctcatcagacctggtacaattgcagggttgaattttctgacccagttgcagtaagacatgcgttgtcaatagcctctgaaattgccgtgagagatccgtactctgtcgcaatggcactgggtcagtttactcactgattgttgttcatcttatttattgttcttgcaagcagacaaaacatgggccattaactcgtggtgtagaacatacttgatcttttatgtgcaaggaattgtatagaatttcgactataaattttttaaaaactgtcagctgtgatatatttagtcaatatgcagtaaatttggctcatgccatttcgtagattctcattctcatgtttgttttttgttttgcaggcaagaacgcacagcctggtggtaatgttttttcccctttcttctgtgtttcatttgaacttaacttgattatgcatctgatttgtgttttagagttctagttgaaccgaccgagtttgtagaattaggatttctaatgatatgggctgtattctgcgaagaatcacgtgttaaatcgcattcatatattgttgtttgatttatatttacttgttgatgcactggcatgaaatgtaaaatataagcaataatctggggaaaaggcagtacctttctgtcagttgctaatgtaatacgtgctcaatgacaacaagaaatgccgtacatgtattctttgatcaccatatttagttcaatggtatttgagacctgggtgacttaatagcgcaaccttttgtttattgagtattttagtgtatgatatatggattttgagaggcatgaatcaactaatggtacggtaattgcatataaatagcttcggacaccatctgattgttgtgactgatcttgctgttgattgttttgaattccacaaaaaaggaatttacctgcttgtatatctgattgcttacaaggtgtttcttttttctctttgagtttgttctactttgatgtactcatttcctattattacgctgtgtcaaatttaaccaggagctcttcaggatatccttcatttgcatgatgttcttgccagagtttaccttgcaaagctgtgccattcaatttctagggcacgtgtattggatggtgagtgtaatttgtttttgtgcctgtcttaaatcaagatgaacatgtcatgattccagagtgaatgcatttaatcgtggttctggtcaaatttgatttacgcagagagacctgacataaagtcccagtacagttctctcctttaccaacttcttctggacccaagtgacagggtctgttttgaggccatactctgtgtgttgggaaaagttgacaacacagaaaggtactgatgaggtttcaccaatttaaatttctatataactttgtttcttcacttcagttcgacttgtacgtctgtgtttttccatataaattactatatcttgcagcacggaggagagagctggtggatggattaggttaacaagagaaattcttaaattgcctgaggccccttctgtagcatcaaagggtattctgtcaaaatctgaaaaatcttctaaagcaaggcgtcctcagcccctcattaaacttgtaatgagaaggtttgtatcttcattcaaatgttcaaatagtcggtctctctattttgatttccctgtatgttttctcttgttcatggatacctattgttcatttttctcttctgtcagactggagagctcttttcgtagcttctctcgtcctgttcttcatgctgctgcaagagtagtccaggaaatggggaagagtagggccgctgcttattctttaggcgcttatgacgaggctgccaatcttcaatcttattctgataatgtcgagtctcttgattctgatcttaatgagaactcacaacctgaaggtaccatgatattattgtagttttaattattcaattataaatcagcgtgaatcatatgcagcgtaaattttaattttatttaaagtaatggaagatggttccttcaaagcattccttattgggttggctggaaaactaggaaattagcagcctatagatgtaaatacatctcttttagaattaggctggggaatgcatctttctaagcatgaaatttaatttgttgcttacatggttcactagcgtccccttcttttgttggaaatcacactatggggtcctatggtttagtaatattccactttctattaaaatcatgtaactgttcatgttgcagctactcgaaaggctaacccactatcaaatggacatggtggaatggacacaatagcaggcttattagcatcactgatggaagtagtgcggacaactgtagcatgcgagtgtgtatatgttcgagcaatggtcatcaaagctttgatatggatgcaaaatcctcatgagtcttttgaagaattaaaatctattattgcatgtgagctggctgatccggcctggccttcttctctcctgaatgatgtcctattaactctacatgctaggttcaaggtattgtttcaccccattttatgcgttactaccagctgtgtgcctcaaatataggacatatgagtttgaaagcagattgatcgtacaatagtgacttcaagtttccataggttttgatgatttaaaaacagcattttatgaaaaaaaatgaaggcattcttttcccttggacatttgattgtaattttaacaggctactttacttgcaactaattctgtttagactacctttggcattgttttgttctcccattgtttatgtggcccaagtttgttgtgcatacattttgtagctattaatttgattattaataatcttttatcatttgctaaatacatggtgatttattattcgtttgttcttacatgataggcaactcctgatatggccgtgactctgcttgagattgctagaatttttgctaccaaagttcctggcaagatcgatgctgatgtactacaactcctgtggaaggtatatgccttttatcatacattacgattaatgtcatattgaatcaccaaggtttacttcatgaaagagaccccaatttctgtggtcagtttgcaaagctgcaactacttctgtttggatgagacttttttttatacgataaaactatgacaataataacatttgttatctttctagacatgccttgttggagcaggaccagatggaaaacatacagctttggaagctgtgacaatagtccttgatctaccaccacctcagcctggttcaatgtctggatttgcatctgtcgatatggtatctgcctccgatccaaaatcagctatggcactgcaaagattagttcaagctgcggtaagaacaaattctccactaggttaattttttcattgagcatggaatcacactatgttgatgtcttggcccttcggtggatcaacaggtttggtttctaggtgaaaatgcaaattatgctgcttctgaatatgcctgggagtctgcaacacctcctggtactgcactaatgatgcttgatgctgataaaatggttgctgcagctagctctcgcaatcctacgcttgctagtgctttgacacgtctgcaaaggtgtgcattcagcggtagctgggaggtatgcccttctgaaaagctgatggtattgcatcatcttataacactggcatttttcttatctcattgtttacctccgtagatccgtattgctgctgtccaagccctaaccaccattgcaataaggtctggtgaaccttacagactgcagatatatgagtttcttcatgctttagctctagggggtgtacaatcaaacttttcagaattgcagctaagtaatggggaaaaccaaggtgctagtggtactggtcttggatcattgataagcccaatgctcaaggtcctggatgaaatgtatagagctcaagatgatctcgctaggtatgtcacccccaagattccattggactgttgtagatagtactgaactgactactttgtgtgatcatttgcagggatatccgtcagcatgataatagtaagcaagaatggaatgatgatgaacttaagaaactttatgagacccacgagaggcttcttgatttcgtctctttgttctgttttgttccaagggccaagtacttgcctttaggtcctaccaggtatgtgtcaatctttgggggttctaatctcctaaagcagtaaaactattcctggattcaaaaggttaccttattgctacaactgcttaaagttagacctataaaattcactactcaccacacgacgactattcctaggactattaacctattgcttcacagcccatgtcatctgctttcttgtcataccacgaagcattctatcacaaaaggaagagcataatatttagtaatttgataagttacttctagctgtttcttgatcccaaaagggcaattgggtgtaatgggtgtctgccttttgtcctattattctttcatacctcattttccgtgatgcggtattgtgtaactaccctatatttaatatcatgtaatgttgaatctaatctgcagtgcgaaactcattgacatctaccgcaaccggcataacattagtacttcttctggtctaagtgatcctgctgttgctactggcatatctgatctcatgtatgagcccaaagatgtgcccaaagaggccactcttatacagactggaattgaccctgatctggctatggcctgggcagcaggtttggaagatgatgtttgggaaaacaacgcaccagctgtggataaagtatggttttttactttgctttgctgttaattcatacgtttctgcttcctatcaattcatacacgtgcaagttccccttttcctgaattcgagaacaattctttgtatcgtttatgttctttcttcttggatcttatgcaggtaaaggatttccttgctggcgctggaactgatgctcctgatgtggatgatgaggaatacatgaattctaggccatcagtcggttatgatgatatgtgggccaagacaattcttgaaacatatgaagcagaggcaagtgctaaagcattatcgagctactccctcattcccactcactaaggcgcggttaaacttgacacagtcttcaaaattaatctttaactttaaatttctcatatattataatgtttgtagcaacaaaatcataatcatatgaaagaaaattgaaatgacattccaataatattattttcatcaaataaaatttaatttataataaactatttattggtcaaatatttagagagttgaatcttaaaatgcgtgcgcgccttagtgagtaggacggagggagtacctgatttcagatgttttgaattgatagaaagtatcaaaataattcaatttgtttttatatgttgcaggatgatgatggaagatcatctgggggatcctctcctgagtcaactggttctgtagaaacatccatatcgtcccattttagtggcatgaactatccgtcgttgttcagttcaaaaccatcaggatatggggcttcacaacaaacggtattcttttacttagtctttttagtgttaaagtgatctccattattgggtttcacacttaataactgttggaaaataacgtactgaaaacctatgaaatcaaatgtatgcatgctgagatgggcatatttaatttaattaaactttaaataagaaaacaaaagcttttacttattcaccatctggaaatcaagtcaccgaacagcaaacttagctattgatgtaggaacctcgctgctgcttcataacaatagatttccagatggcatcatttgcttaaagagcatcggtttgcgttttgtttcagatacgtgaagaaccaccatcatattcaacatcagttctacagaaacgtgagtcattcgaaaacccccttgctgggcgtggtggtcggagttttggatcccatgaggacgaagacaggagttcagggaaccctcaatctgggaaagcactgtatgacttcacagcaggtggcgatgatgaggtatggaggctgaaattgtcttggttggctataacgtaacatcctgagcttcaatgcttccttgatcagagcttgataggcattagctgttgtgaaacatagttatttcagtgaagcgaacctcgtgcttttcatttgttacaagaacttaatatcttaattaattgagatagctttttaaatttatgatttgataagcgagttctgtagtaaaagagaagaccaaatgaaagcacaagtaaattatttgaagtgattaagctggctcttatttcttgtcttggaatgcacacaaaagaaagtttatccatgtaaatttctttcagttgagtttaactgctggagaagatgtggaaatcgaatatgaggtcgatggttggtactatgtaagttctcttctcactttctagtttttcttgttctttagtcatgcgcaaaaacattttaatattggttattattgctgtatcttcaggtaaagaagaagagacccggaagggatggaaagacagcaggtctggtccctgttctgtatgtgaattcgtgatagctatgagtcctgtgacataatgctctcgaaagctgattcggagtaaacgggcatacatatggcgtctggggaggttccttctgtgatcttagtagtgcacataaccttttttgagctccctagcatttgacaggcacatgtccttgttggaggccaaattcaatcatcgtgatgtctgtaagacgcagcaattttcttgctggttgtgtttctttgctttatacacaccacgagtccattcaattcattgtttatgtgtagagatgtacacgtgcttcggggttttacctttcgtgtgctattctggcccgtctgttatgattgaaagacgcagtttactcctctagttctccatcagataggcattattttgtcaaattgttgctctattggaggctgtaaactgctgaaggctgtatcttgctccccaccattatttcggtcttgtttatggtgattcagtagaagtagtaggcctgttaatttgtgtaaattttgtcttgtgcggagtatacatacatgaacacatacgacaatggaatggtatgcgtcgataactttcttactctgaacacttaatgcagtatacgctatattctggctatttttatggttttcgattcctgtatgaattgattgttgtgaaattcctggatcacagtttcaaaatgagggctaacatcccgtaattttgttttatagtacttgactacttgtacagttgtactaaagtcggtactcggtagcaacacaaacaatgcatcgatactccctatgtctcgtaatataggattttgctccttccaattatcccacaatataaaagattttggtgtaatacttgtcacatcaatcaactcaaattcaaatttctatctattttaaccttcaactatccactcatccataaacaagggaaagtgatttcatccctcgaggggatatcctctcgtttcgtgcatatcacctaaatagctataaaaaatataaaaaaattggcaatatagattaatatgaaatatatcactccacaaacattgcaagtttaaattgaacttctacaagttacaacaaaaataacaaatatagttgcgaatgtgcgataactattctcagcttaatttgttatttttattgcaacttgtagaagttgaatttggtctttcatatttgtggactggtatatttcatattaatctatgttgttgttgacgtaaaacacgaggcctgggagatctgcttaactccagtgcaggtccaaagctcgccttcgggtgtgttagcgtgccagttgatttgattctacaatcaacaagaaatagaaacaaagagatcgcggttaaatctataaatgatagctgatcggctaagtgccgatgacatatcatttatctttgagccgatgtcatatgtaaatcgatcggcgactataaatagataataaagaactaaacctactcgatcggctgtagatattaccaatatatagttcttatatcgatatatatttaaatcaagtgattgagatagatcggtcgccatgccaagacagtataaatcacttggatcaaactatatattaataacaggactatatatgtttatagcatagccgatcatataaatttagcatgtatcggttaatactccgatactactctatatcaggatattaaaacaagtataatatatcaaacaaaagcttgatatacttaaatgcaataagatcttgacataaagggcggatttaacatgtcactgaagcatatagagcgaatatggttaaatcagataagatcggctgaaactccgatactaccctaatcggcaaccagaaggcgggctagagattgatattctaagcacgacttaatagatcaaactcaactgatgcagcattaagtatgaaaagaagaacaatatctagacaatcaagccgctggaagtttcatagagtggtagatatcttatataatctaaatcaacatcaaaatctaacctaatcggctgcgctctactaacagatgttagccgattgtaggttagatagcgatattgcaagagattatgtacgatatatgataactcgatgaattacgtaaacaatattagagtatcataaagatggaagcactaatcccgagaatacaagccgtcataacaagttttacctcttgttgaagatcaaaaccgatgcagctcaacccgaaagtaagaactcgtcgaaataaaactaaagcaaaaaggtggcgatgcgccgaaattgtattgaacgtgtgtgtgttttttattacatagggctcggggtctatttatacccgagaattataagatatgtccataccggacacgactattatctctaacaaactctaagataccataagtctttgcggcagacttttgccctaaacatatctctaaggaaattacataaaacatcctaattaatagatataattaccttttcaggactctatccacgtgcggcaatcatcttgaagcatatcaactcaaacccaatgttggatacgagtcatattgccggaatcggctgtatcacctaacccagtctgattcagatttagccgattctagtcgtagccgatctggactccagccgattcttactctgttcccgcaacaacccttatctttggttccgcttcgatcccatgttcacccccgatgctgatattaccaaatttggtcgttaacagttgtcaatgtcttttaaaaaattttaataaacaacgagaagaagtcccctcgagaaataaaagtttacgtcccacaaacaaatcttatttaataagggcattctattcttgcttaatcttattcaaaagagaataatccttgggagtacggagtactgcactgctcctaccttctgcaaatccaatcaatcgcgggttaatatcccagcacaggtcctcgtggacatcgtcgtgttgtcgggcgcgtgttcttgtgagccagcaatctccttcgatctgcgcgccatcctccccgatcgtgacctgcgccatcctccccgattgagactcgcgccagcagaattaacaatcaaggattgccttttcttccacagaaaaaaatcgccttctcgcgggtgggtggcagggtgggtatacgtacacgtctccgaagccgcaaccaaaaccaggcaaccagcacgcgatggggaggggcgagcaggaggcggcggcgagccatgggttcggtagcatggaggagttctgggggttctacctgacccagcactccaagcccggcacccggcggtggcacttcctcggcacgctcgccgcgctcgcctgcgcgctcctcgcggccgtctccggccgcgccgcgccactcctcgccgcgcccgtcctgggttacggtatggcgtggtacagccacttcttcgtggagggcaaccggccagccacgttcggccaccccgtctggtctttcctctgcgacctccgcatgttcgccctcatcctcaccggccgcatcgacgccgagctcgctcgcctccgcctccagccgcctcacgacgccgcggctgcctctgcacaccgggactgatccgccgaagtgctcgcgatagcaacatctggaagtgttgatgtgtactccaccctgtaatttgctaatccaatttggtactttttttttgttgcttttatcattttcctcgccgatctgttttggttgcggggaaagggtttggataagcagtgtatccaaaattagtgtggctaggcagtggctgcttaacaaaataatgaccagctactagaccataacataataatgctgtttttatttcctgtaatacttgctgcccccaaacacaaatctgtgatcgaagcacaagttcttgggagtacaacacggttaacaccacaagaaactccttgcagaacagtaaagatgcatgtgtcctatgtgaataaccaagtgtggcttctttatatgctggtggaatgcatacatctggctgtacgtgtagtcatgtagagcgcgcgttgctcagctgtcacttctgttgggcttgtctgacgccggatacacctgaaaccaacaactggttgcttgcttactgatgcttcttgaacagaatttcaaccaaactctgttgataattgctgaagaacaggcatgtatacagcattggacaacttaaacaagtacagttaccgtgtcagctgatgggatccactcgtttgtagcaggatttcccttgcaggaggcatggcgctccgatgcatctgggtcatcagacagatgaaacgaggcgtccgccgagggcttgtccatcttgatgaaccctgttccagtctgcaggatattgacagtgcacacacaaattaagatcataagtgcactgtgatcagttcgaattaatggatggaagcatgagggaactaggcagcgacgttacgtaccgtgtggtgctgcttgccgacgcagccgagatccttgtagtactccgtctccacgaactcatcccctgccttgccaccctcgcacaccaatttctgcagcagcaaaccaccacgtaataacaccgtaagatcaactctaagctttcgtgggacacatatatgaaagtgcagttgagagttgggactgggagacctcggtgtgggcttcgagctgctggaacctgtcgagctcggggtgggagtcgtcggggacgagcgcgtcggtgtagacggcggagggctcgctgcgggagggcttggagtggcgcttgggcgccgcctcgtcgtagtactcccgcacctcggcctccatcgccgcctccccctccggggacaggtgcgcgtcgctcctggccggcctcgacatttcttccgatctttcgcgcgaagcgcgctgtgccttcgttagctagcgctcgtgtaagcttcaagcagtccaaggacgacgaggggactgtggtgcgggtgctcgggctatattggcgtgatggctgcgtggtccgcgccgcgggtggatatggacgagatatttttgtgacttctgaggataaatatctgcagggaggtgtagaggttggtgggtgggtcgattggcttagcgagaggtggacgtgcgcgtgagatgccaggaggacggaatttgaccgcgcgcgcggtgcatctcgcggcggcgcgcgtactcgggtgttcgtttgcaggcccggaacgtcgcgtatgcggccgaaggcccaacaacaaagtccccgttgataactgggcccccgtccgtttcctctcctcggccgcatatctgcacaagacggcaaacaccgcccactcttgcagaattcttcctctccgcttctctgctcatctgctggtggtggctgcagattgcgctccgatggcgcaagcggtgcggccgtgcaatggtcggcgcgtcggtcgctcgcctttctctactcgatggtatggcttatcctagttcgcgcgcatggctttgattttgtgctggatgttgcagccacccttctcgcgcggctccgtgacggcgaggcgaggttcgagctcctcgaggactccgcggccgcggccgcggcctcgcccgctcctgctccagtttggcccggcctcagctgcttttctagggttgctacctccctgtacgtacggctggtttccctttctcctcctctgctgatctttgtgtcgcggtagggttgtgtgtgattcgtccgggggattgcaggaggggcgggtggtcgggggcgctgaacaaggtggagcactacggggtccagagggtcacgggtgatggccggtgcatgtttcgggcgttggtacgtcttgtcctgttcaattgcgcattgggaatttctctggattctcaaggaaaccctggtgtgtctcctcgtaggtgaaaggaatggcaaagaacaaggggattccattgacctcaagggaggaggtacaagatgcaggtaacctgcaattatgctttgttcatggataaatattcacagttgtttgagacagcctgtgcagctgagctatctctagagctttgaatttacatttacgaaagtaactgcaatagctctgaggaaagtatatttaggctgtgttcgtttgtgtgagatagggtgagaaaacaccttgttttccgcgcgcacgcttcccaaactactaaatgatgcgttttttgcaaaaattttctataggaaagttgctttaaaaaatcatattaatccatttttgaaatttaaaatagtttatactcaattaatcatgcgctaatggctcatctcgttttgcgtatcttcccaatcttctcaatcccctatctctcaaactcacccttagatgctaccgtaatcttttgatacataaatcattttttaaaattttattttgttcagcgcactcctacaacttaaataatgcttattcagaaaacagaacatccactacaaaaaggagggaaaacttgtcaacacaaggcatataaagagagagctcctattattcttgtgagattcgagtagcccacttgtccatcaattgcataaattagactgcattgcagttcttatctttggcttcaaaacaactttgttaaagcatgcattaatttaggatttccatattgttcgttccatggcagaagttttaacttctgaccgtaacttatgtaggaaattaacctagctactgtttgaaacatcaagttagttaggcataatttgctgccaccactgttcagacatttcttgttggcacctcaagaggtcattgttttggtcgaagaatgtctagaacagaattcttgcatttaagaatgcatgtttcctaccagtttcgtctcagtaaaactgtcattgctgaaactgtctcagtaaaatgttccctaccagtttccatgttcccttaccagtaataccacccccctatgtgccactttcgcatatgtgacttgtgacgtgacaaaaagataaatctggagtggcaaaaaattaaatgttccgttatccagggggcatttaaattttttccactctgcaccaaacgagtttaatccctctcacaacatcccctcttacaaagtggcaaattcccagtatatcctctctacccagcagccttgtcaagtatgacttttcatgagcaacttcactctccaaataaacttatgacactacccatctttcacctaatgagctgaagattttgcgcacagatttccattgaagttcgaagtttgaagatgatatattattttaatatacttttgtgttgatatcctttttcaatttcctagatgatttacggatggcagtaaaagaagttatctgcgatgatgagactgaacgacaaaaatatgaagaggcagttatagcaattactgtggatgaatcattgaggcggttagattcttatgtcctcaattcatttttatggcatgacctgtgataaagaggctgactatcctggttttgcagctactgccatagaataaggcgatctgatttctggggtggagagtcagaactcttggtatagttttcataattctaaagttagcatgcactattaatataaacagcaaccatacatcatttagacatatagaacacctgtttctagtatatgtatcatactctaaaaaaagtatgtgcaccatgtttatgcatcgctccttaagtgtgccaaaaaatataatattgtttgatcgtttcgctctgaagattctaccaaaagtaggtttacctgtttctagggatgaaactggttcggatagtttccgtccatccgaaccatttttcggattcggatagtttcggtcggaattattcagaaattttcggattcggaaacgaattcggatattttttctcggaaacgaaaacgaatacagtaagggtactatccgtcggaatcggaaaacgctcggaaactatccggatttttttttcggatatccgcagacattgagcaaattttagaaaaaacacgtatatatttataactttttcatacggaatcagatgaagacaaactttatatcaacattgtagagctcgatgagatctacaactttattattgactattttattatttgaggtcatttaaaggtctaaatattcattataatataccatattaatttttacaaaatctcggatctacaattcaaacgacatctgatggagatgtgttccatatcaaaattgtagagctcaacggatctaccactttgtagtttataacatttgtatttgaaagcatttaaagtataatacaaacattacaagtttcgaagatgtgaagtaaaataaataacatctccaatttatacactggtaagtaagttatacatctagtaaaaggtcttgggaatagaaaatgataatcatatttgcatatggatctcttaaaggaacagccatgaaaatcgattttcacatacagttgtgggaccgtatacaaaattgatgatataaatgttggagatgttgaactaaaataataagcgatatctcttcctttatcaagaacctcaatttgaggggttttttatataccggtaaatatttgctaccgtattcgttccgtctcgtattcgctccgtatctgtattcgataatatccgatttcatttccgtatccgagtttttgattccgattccgaaaaaaaaatatgaaaacgaatatgataaagctagtttccgtccgtttccgatccgttttcatccctacctgtttcatagtagagtgtaagggcatctcttgctttgtatcagtacatatggtcgtttcatacaaatctattctacatctgacatattgatgtttcaggttttgtctaaattgtgtcggcagccaatcattatttatattccagagcgtgaggtaagcctctatatacatggataacacatatacatgaatgtgtgacccaaaaatgtaaacatgttgtgaattgtgccttaaagaagagagtatttctaattaaatctatctctagatggttgcaaaataaatgttgttttggacattaatatgagaccataaccagcatttcaaagagacagttggcatatcgttgaaggcaaaatgggtgtcaaaccatgaattcgtactgtttctaatagactttattgcaagagaaaaaatagacaccagatattggtagaccaattaattttaggaccttccgtcaccatgcaaattagatctgggaatgttaaagtaccgagaagacagctagaataggcaatgtgccaaggtttacttgtgcttcatgatgaatggttgagagtgagatgatctgctaaagtgattccaaacatctggatttcattctatatttctgttatcttgttgtaatgctctgaatcctaagaggttcagaatttagatattttttaggttcagaggaaaaaaaattacagaacataggaatgcatttgcaactgatggatggaacttaatgaaaatatagtgaacgtctgaatgcttctctttgcatttttcttgcttataactgacccatcctccagtttggagttgctagttggatgtactcattgcactattgtctgtttccttgcaaacaatcttatgttgcttttctttcatagctagcctttacaatcccccatttcagctgctcgacttacatctttcctgtttgtgtaacagtaccatgggcgtggaaatggttttattcctatagcagagtatggactggaattctccaaggactcaaaacagtggaagaaaaaggtgccagtaagactgttatacagtgggaggaatcattatgatttgctagtataacatggttgcaccgaacgttatcagtaccctgaaggtctgaactatttatgacaactgattttgattccatcattccattgttattctttgatcccacgtagttttttgcttgcgtctctgcagacagcttcgatgctactccatccattccaaattgatctaatatagttttttttgaagttattcttaaatgatctacatatttgtgttcatttattgagtattcgttatttgtacattggagtaaatggacattgatgcatgcatctatgcacacaagtatttataacccacatgcaatatcttgatttgctattggctaagaaatattagggatggtgtatacatcgagtttgttgctagagtaaatatagtatgagagagttattagcttttcttggtcttggtgtacctataaaatatgtagatcaatttggaatggagggagtatatagctaactgttctacctaggaaaaccacatatatatagtagaaaactgaaaactaccgttggatcaaaaaataaatgtctgagatttgtccacgtcattatgagtaaatctgcaagtaaaatttttactcgcgatgacttggacaaatctaatatgtctattttttaccaatggtactacatatgtggtttccaccgtatattttcccgttctaccgtatgaaatccattggttccatcttatctgaaaaacttccatgactaaaatgacactaaacctaataatgtcgcatgagctaattacttcctctgtctaagaatataatagcaacctagcaaataattagacacaacctagtacaattaatctggaccggagagggttagtacattattctcctaagttactatatatattttaagacaaaggagtaggttgttatattttaggacggataaagcaggacaccaggtgataggctagtgaggtcatttggcatctaggctaaggttgttccccatcctagtgatgccattcggcatttaggctaatgctgttcgcagttcgcctgtgattcggttggcgtcacgccgtcaagctgttgaccgtatttccggttggtgccgggcatcgtaataatggcgtgttcgtcggactcggtggttgccaggggcaaagacgatgagaggacatgcttcaaatcctattcttgtgtcgttgcaagcctggttgaccggaatcatgttcttgttggatgagctgtgcgatgcatctactcctatatcttgccatatgttttgttgaacagcaacagcgaatgttttttcccctttgaagcttggttcgtttaatcctaagagaaaaggattgagagaaaataatttcacactacaatacatatgaaataaattatttccaaatccccttcaattctcttgaggaagggattaattgaacaaggcttgaatggggtaattcttttgttgaatcctacattcctattatatctattattctctttgctaaagtattggggaaaaaggttacatttttaaattggttgcaacatattaaaaaaaacgtcacgctatgcttgccaagttatgatccagtggacgaatggtgatgcccaccagcagatcgtacgttcctgacccaaatcacgcttaaaagcaagagttgctaaaacgagccgtaggtgtaacacaggtgtcattggagtaaatgatgcattgataccttgtccgtttgctaagctaagctagagctggccacaggccactgccgtgccaatgctactcgcctgctgtgatgggcccacaattcagcgtctcaccatcgacgtagaggaccgaactcggcggtgcacgtatcaatacaagaaatcgtcctttctctctgcaatgttttttttttcgataaaatggagagagagtacccttccatcctataaaataccgacataatatttggatacacatctatctagatttattatactagaatgcatcacatctagttgatttattgtttatgagacggaaggaaaactacggtgtactgcaatgcgctatgcagggcataatgtgctgctctaattccaagcaacaaatgccaatggaggagaaggtacaaggggatagtccgacgaggcagccggagaaggctggccgacgtcgtgggccgcaccactacgcgatgaaagtatctgtcatcacgccatcatccactgagagcctggcacgcgggccccatgccccgtcccccacccccc

SEQ ID NO: 9041 - DNA, 1804 bp, Oryza sativa
tttcctgctgttatgaaatgattgtaaacatattatcacatgtgtacttttatagtgattttgaatgattgtagcttcccccctccacataacataggcatgcagcagtccgatatttgtaagaaacatgggaaatatttttcagctaagactctcagtggtatgtgttgcagcatttagatcttgaacctgtgcgcactgaaaggccaggagagttgatagcatattacaagatagccagtaggtggtcctccttgattgatgtatgctgattgaagatagtgatgataccactgatccttgtcctgataactttcttatttcagaacattacaaatgggccttggatgagctattcatcaaacacaactttgcgcgagtaataattctggaaggtgttacaccttggatgctcttataactattttgttctttgatctgtcttctttccatcccatttatggttaataatttgctaatagatgatatggagatcgcccctgatttttttgactacttcgaggctgcagctaaattacttgataacgataagtatgttgtatattatatattaattatagttggaaagccaaggatttcatctgcaatgtatctaattgctttgctgctattcctgtcactgtggtattgaaggacaatcatggccgtttcttcctggaatgacaatggacaaaagcaatttgtttacgacccaagttagtactctgatagacctgtataaaagttctgttctgcattaatagggaaagctactcattttcctacataaacattttgcagaagctctttaccggtcggatttctttcctggacttggatggatgttaacaaagcctacatggattgagctgtcacctaagtggcccaaagcatatctttactgttgcctactaatttttatattagcatatacaatattttccatctaccatatatttcttccttaacaagactttacttattgggatgactgggtgaggctaaaagaggtacacagagaccggcaatttattcgcccggaagtctgcagaacatacaattttggcgaacatgtatgttggctacttcatcaatgcaaaaattaccacatttctgcacactagtagccactggatagtaatttagtctttgagccagtaagtatggatgacttgaatttacactaatagattttcatacctccttttcaggggtcaagcatggggcaattcttcagacagtacttggaaccaatcaagctaaatgatgcccatgtatgcaaaccttccatcaccttttgttttgcttaactgttgcaaattctttagtgcagagatttaccattttacctcttccttctttgtggctatagatcaagtggaattctgaggacctgagctacctcaaggaggtaagaatttgtttggactttgaaacagtagtttgcagcaaatgcctaatatttatgttggcaacaccaggacaagttcctgatccaatttgggaaagacgtcgctagtgccacccctctccatggatctgatgccgcgttgaaagcccacaatatggatgcggatgtaaggatccagtataacgatcaggaagactttgagcggatagctcgtcaatttggaatatttgaagaatggaaggtttacttctttgaccccatttttattcataaataatgctcttgtcaaagtaggtcaagtgacaattttgtgtctgatgttttcagtggtgattgttaggtctagtagaaaatgtttcagtttgcagttttgatctagatagacatcagccc

SEQ ID NO: 9042 - DNA, 1962 bp, Oryza sativa
ttggtctggagagaggatttagaaccgcattgagcgactttgtactgatgcagctgcagttagcatctgttttctttacattctctctcgggaccaaaactcactactatggaacaacgctgctccatggaggagccgagtatagagctactgggcgtggatttgtggtgttccatgccaaatttgcggagaactatcgactatactcacgcagccattttgtcaagggtattgagttgctgattttgctaattgtgtatgaaatctttgggcaatcatatcgaggagctatcgcgtacatcttcattacattttcgatgtggtttatggttgtaacctggctctttgcaccattcctatttaatccttctgggttcgagtggcagaagattgtggatgattggactgattggaataagtggatcagcaaccgtggtggtattggtgtaccaccggagaaaagttgggagtcatggtgggagaaagagcaggagcctataaaatattctgggaagcgtggaattgttctcgaaatagtgcttgcattgcgcttctttatctaccaatatggtcttgtttatcacttgaacataaccaaacacacaaagagtgtcctggtaatttgctatcttcatttaatatttcttggtgttttcctggtctatgcttattagcacaagctattgaaccaacttttgaatgttatttaatggtctttccaggtctattgcctgtcatgggttgtcatctttgtaattctgcttgtgatgaaggtaatccctagcattcatattttttcttcagtgtttcatcgcggtgctcatgagcaacattgtggttagaacacagggggtacccttttttctgtatgacaattataattttagctgcacagagtatggtagttttcttgctatattcctatggcagtaaatgctagagatatgcctttgcaatacctgaggaccattgcggtcaagttgctttgctgatgataccagttgttagaaacctgttgtgttgtgcacacagactgaaccttggtttactcatgtttgcagaccgtgtcagttgggaggcggaaattcagcgcggacttccaacttgtgttccggttgattaaggggttgatatttataacatttatctccatcattataatcttgatagcaatccctcatatgacagtccaggacatctttgtttgcattcttgccttcatgccaactggctggggtctgctgttggtaagtggatatcaattgtttttggcctgtaagcggctggtttggcttgcttgagctgatgatggttgttgggttcaggttgcgcaagctatcaagccagtaattgtgcgcatcgggttgtggggatcgatcaaggcgcttgcgaggggatatgagatcatcatggggctcctgctcttcaccccgatcgcgttcctcgcttggttcccgtttgtatccgagttccagaccagaatgctcttcaaccaggccttcagcagaggtctgcagatctcgcgaatccttggcggccacaagaaagaccgagctacacggaacaaggagtagtagcctgtctgccattcactggacatgtattctgttgtgtcttcttccctcctgttgctgctgtaatttgttactcctattctactactccacttatcttgattgagagacccaaaaaaaaagaaaaagaaagaaagcgtgcattttggtagttgctaatcgccgcgctgctgaggccgcttattgtgcggcccagggagcgatgtgttgtagaatagtacagtagaatgtgtaaagttgctgtttggtagtgatgtgatgtgtgtgtatgaaaacaaacttgggaagagaaatgcaattgtaagacaaaataccttgcctgatgtgatgaatgtttttttttttgacatgtgtgatgaatgttttaattcttcttcttcttgagatg

SEQ ID NO: 9043 - DNA, 2415 bp, Oryza sativa
accaaactgctgccgtcctgtttgaggtcctcaaagccgtcaatgtctcccagaaaattgaagttgatcaagcggtaatcttcttaactataacttgattatgcatttcttcattttcttcttctactaacttgtaataaataacctctcttgcagattttggagacacacaaccaagtcgaggaaaagaaaaaactttatctcccttacaacatcctcccgcttgaccctgacagcgctaatcaggctatcatgcgatatcctgaggttcccattcttctcaaaccctacctatcttaatcttacgtatcttttccaactcattctgcattttttattctcctcattttacagattcaagctgcttttcacgctcttcgtaatacaagaggactaccgtggcccaaggatcatgaaaaaaagcctgatgctgatcttcttggttggcttcaggcgatgtttggatttcaggtaatcacaccgccctcaggctcacccactaacttaaccattattttccttctcttcacctatctgtcacttatttgcaattcaactatcactctgcagaaagataacgtgtccaaccaaagggaacacctcatactcttacttgccaacgtccatataaggcagattcccaagcccgaccaacaacccaaggtctcactcttactcaacgtccatatcggtgcttgtgtcattctggtggtgcttgtgtcattctggtgtttactcttttctttttcctcacattttcagttggatgaccgagcactggacacagtcatgaagaagctatttaagaactacaagagatggtgcaagtaccttggccgcaaaagcagcttatggtacgatatttaatctaaaaatacgaatatgcacaaggtctctcaagcttgcttgatgtatcactatcagatggtcatttcctttccaggttgccaactattcaacaagaagtgcagcagcgtaagctcctctatatgggtctttatcttctcatctggggtgaggcggctaacctgagatttatgccggaatgtctatgctacatctatcatcacgtatggctgatcccttccatttttccccttaaaattagtatatggtttttaccaagctagtaggcctggatcttaaagttgcgcaagcttcttacctgaatacccaatgatggtctggtcacaataaaattgacttatcggacctttttctttgtacaaagctatttccaatttgccatatttggtttctatctacaaagtagttagctggatcttaatggagtccaggctccaatgctgatgatgttcctggccataataacattgacttacctgacaatatatgagagttgcacacagctattgccatacacaaagaatcacattctgctcacgttgataatatgaggaagcatatcttggatggaattcatctttccccatcatgtcaattatgatgggatatttctgtatttgtaactcttgtgatgagattattttggtgagtgctgactgtgtaatattgttttctcatagatggcttttgaactatacggtatgttggctggaaatgtgagtccaacgacaggtgaaaatgttaaaccggcttacggtggtgatgaagaagcctttttgaagaaagttgtgactccaatatacaaagtcatcgagaaggtaccccccacccccccaaaaaaagtatatctctgtttccagctccatcaacttatacactcaagccttttacataggaagctgaaaggagtgaaagtagtgaaaggagcgaaaggagcaagacaacaaaatctaagcactcacattggagaaattatgatgatctaaatgagtacttttggtaagcactagcctaatttattctgagctacttttatgagttttagtttgttgtttcaaatttatgagctacttttctaaggaaacctgtgtgattatttctgcatttattctcaggtcaagagattgtttcagattaggatggcctatgagagctgatgcagatttttttaagaccccagattatgcttatcatgatgaagtgagcggagtaagtcccttatgatacatacctacctatattactttcatgaagaaccttcagcttagtaatacttctgttagtattccattcatgaatcacataggtggtaaaacaggtctatattattttttataacaaaccaaaacaattttgtagtatacgtcttcatagggtattcttggcactgattttttttaaaaaacttgtggtccaggagaacagaagagttggtagtggccagtggatgggaaaagtaaattttgttgagataaggtcattttggcacatcttccgcagctttgacaggatgtggagcttcttaattttatctttacaggttaattg

SEQ ID NO: 9044 - DNA, 5207 bp, Oryza sativa
ccccaaatttagtggtcatcttcttcttcttccgccctctcaccttttcaatccaatctaacaaccaacgaaacgaaggagtctttctctagctctagggttagggtttgcggtcggaacggaagttagtcgaatcggcgcaaatcgatccgatccgatccgccgtcgattcgaccactccgccctccttccttccttccgacgcagacgcaatccataatactactactctagatcggatcccctcctctccctccctccctccctgcatacgaacaacaagagactactccattactatattagattgattgattaggggaggggattgctgattaatttcatctctctaaccctagcagcagatccctctctcccctagcaactagcaagcagagagaagcagccgcctccatggatcctaatcagatgatgggccgaagcttccccatgtgggccgccgccgacgacccttccgcccagccaccgccgttcctccctccgcccaaccgcggctggaagcgtaagaaccctagcaccgccgccggtggctaccagccccccgccctcggcgacctccaggtgcagaaccgcgccaaggctcgccgctggttcaagaaccaaagcggaggcggaggcggaggcggtgggccccgcaagcacttcttcccccggcccaaggccgccgccccacgcaacaccacctccttcatcatccgtgccaagcgcgccggtggcatcgcctccctcgtctccccctcccctgttacccccgccgttctccccaccccacgcctctccccctcccgcgagggcctctccgacatggctcaggcgcagtggggcgtcgatggctatggctccatgaagggcctcatccgcctccgcacctcccctcaccccgccaacccctccgatgacgacgatgatgccaactccagcggcagtgacgtcgaggagcatgtcgaggtggagcgccgcctcgaccacgatctcagcaggtttgagatggtctaccctgccaggggtgacggtgtcttcttcgaggaggaggatgactatgagtatgaccaggaagcccatgtggctcgcctcgaggaggagaacctcaccttgaaggagaggctctttttgatggagcaggagcttggcgacatgaggcgccgcctggaggcactcgagtcgcgttttgcagggactgatggtatgcctattgagaattcagatgcagttgcagttgaccatgacaaggagatggctcatcccatacttgttcagagggatgatcttaggactgagattgctgctgatgcagcagggtcagacaaggctagtgcacaagacaatgcagaggaggttgctgatgcagcagtgtcagagaagatcgtgcaagacaatgcagatgttgtagttgcagggtcagagaggactggcgaagagatcggggttgatgcttcggagatggattgatgggagatggacactggaatgcaatagcggttatcagtactgtacatacataattgtcgatgacagattgaggccgcgtgatgtggacttgttttgggaggcttacaattgtatgttgtcgcataacaagtggatcatcgtatttacaatgtaatatgtttctaccattctgtgctatctttggtgtttctttgcgtatttgttatgatgataccacacagcacaacttgtagtagttcttaccttctgctgctgctgctgaaagaggtagaagcgactagatgaatttgttactacatcaactattaatgtcattataatggtatcagatggtgtcatgaacctgttacttaattatagatagcactcatgaagctattccttatttgcagatagcatagcactctcatcctggtcacttgtagttatggattctggtcggggttaaactatcttttttgtcaatgggggtggtcagttatgcttgttgggatgatggtttttttgatggtatcatgtgagcactcagcactgtatctgtatgttgttttgtcgtggtgaaattgttgttagtatgttgctgctggctccatggatagagagatcattatgtattaatccaatttattggtatttggctgtgtgctttcttctttgggctcagtggatcggtaaaatggcatttggctgtgtgctttcttcagtcggtaaagcgaaaactagtcgtaaggacatttcaggcgggagggagggaccatccgatccgattcgaaactgaactgacagacagtcccctccattagatggagggagaatattgttgggcctttgggcttcgtgtgacaggcccattagattagacctagatctgtctcgtgacgagggagaagactagaggagggaggaagatggcgatggatgagccgcccaagggttggaatcccaactatggcgtcgtcggcagcggcgaccggcgactggccttctcccgccagctctcctcctccatgcctcgcctcgcccgctccgactcttccatctccatgccccccccgtccctcgcccccaccggagccatcaccttccgctggctcgccacccgccccatgcgccgcctcgccctcctcatcgctctcaacgtcgcctactccgccaccgagctcgccatcggcctcctcactgcccgcgtaggtcggtaatactaatactactgctactgctactgctactcattactcatctcaatcacactcttctccattcgtttcaggcctagtctccgatgctttccatctcacctttggttgtggaatcctcactttctccttgtttgccatggctgccttcagaaccaaacctgatcacctctacacctacgggtgcctccctccctcaatttactcctcttttctttaatcttccactcccactgattcattgctgcctttatcaagctataaaggattggaggtccttgctgcctttacaaatgccgtaagcttttcaacatgtcattgccatgcccatccttatacatttctctaggactaaatagaagttaatggtgttttcccccatgcatataaacgggggcatagaaatcggaattttaatatgcggcatatctctcccattacactacctatgtaaaagaccccccaatcgtaccaaatatacaatttgtcatagcttgataaatgtttggaaccctcaagcaccagatgaatgcctatttgacattcaaataactcgtgtaaagtttctaattagaaaaattgagtccccaatatacgttataaggtccttggtcacctggtaatgaatgtcagtatatgcctattccccaagtgacttgttgacattgctgtccagtatggacatcttgaaaaacgccaatccattgggagagaaagcaaaaagaataatggccagaaagtattggccatctctatcactataataaaaaaacattatattctttctagaatgatgcatttaacataattaattactaatattttctggggaacacacaaattaaactgaagagcaataatcatatagcaccaaacctgtcagatcagttgtatataatctataccacaagatttcaacattatcttgctagtgacatttttaattttgatgctaaatctacacaaataaacataataaattgactttaaggaaaccaacctacaataaagctgacccatagaagccacacaaatgctatgtaaaaagagattctgaatatttcttgtatttttttctctcaagatagtgctctatacctgcgctaaaaggttttttcctttctgaacatttatgaacatttatagtttcagcaacatcgtcttggataggaaaatgtcttgcacgtgtatatacagggcttcataattcaggataaaaagagcgtgggatgtaaatatttgagaatagattctcactatttatcatgggttatattttaattcagatggcagagttctcagctgctaacatgagcaacattattattccctcacaataatatatatctccagaagcttctaaaacttgggaaagatatattggtttgcataaatgaccaatgagaaatgaaaatgctttgcagagctcctgccaagaaaaaaaattgtgccatcagcaaattaagaaacaagagctttatttgatgaaaagcaaatacatccagcgccaatagtccatcaaaggcaaaatctgtagcaccatttactaatgctgaaaattttacatctacacaaattgtggttccatgttatttccaatattcagatggtgcttaaacatatatgcgtattgagctgcagttagcaacaaaattgaaaattaatgcagtagttatgggtaaggtaattgacatggaggattatatgacactccaaggaaaattgacaaagtatgttgtaggaagaagttttgtacaatgagcagattgcgtatctcaggaagcttggtaatcagcacaattcaagggagctcaatggtgtacctgacctgaaaactcaatcatgcgtcaaattggtaggaaaacaatgtaggtccaatctgaataaaacttacaatataaattgatccatttatgtacatctatgtactttcaaagggcaagtcacaaaggcaacacgatacatccaaaaccctattacagcctacataacatttcagcaacagacatgtaatcacaacatttaatgggctggaaaaaaatgctaatgaccttgaagcaaagagcaacatggaattgaatctcagcacatctccttttataaaatataagtaaaatgaagcaccacagattcaaagagaagctcactccacctatagacaaagagagagagagaggacatgatctttgtacatccaagccagagagatatattcatgtatggattaatggacattgctgctgattttaattatacatgcggtaagtttgtagctatatataagttcacaatgtgtacacaaactcaggaagacaatgtgctaggcatattatctttccaaggatcaaaacaaattcgatagagaacatcagtattgatagaccacacaactgagctctgtatatcagataccttcagatgcttgttggctgcttgaatgccaatttacagaatatgcaagcataaaaaaatcagaacagattgttccccatgcaaactaagaaaatacataagccggaaagaagcagtttgacatttaat

SEQ ID NO: 9045 - DNA, 14650 bp, Oryza sativa
gggctcgatgtaaattacaatttataaagaaagaagtatgtgaaatgaagccgatttaaaagtgtggataccatgtacaatcaaagatacacacctgggcagaaacagctaaagcatctgcaagcaaagataccgcaagccatacttgtaagcatatctgatgagctgccatagctgttgggccttgtcgagcagccattgatgtccctatggtcatcgttaataaaatcgagagggttcttcctaacagcatgccacctaagcatttcaaaaacagatgatggaattatagatggtggtaagtgcaataaaaggaaaaacaagataagaagtatgaaattataacatggaggttctcaggatgcatatcatagacatgcattatctttccaataatatgacagcaaatatttgcaaatcctagaattgagcacattttactacatataaatggtaccacgaaacaatatggagaatagaagttccctgaacagcccattcattagtggacagaatgggcatggcccatgaatgaaagctctatcaatgacaagctgatcaacatatctgtaaaatatactagcagtaaccgtacctacaccatctactctacgatagtctttcctttttcttgcatataaagttatttcaaaaaccaaactttacaattaacttgttatcgataaaggtatcattgttaaatgcatagtggatccagaattggaaattttgacaaattaacccaaagaactcaaagccccctgggagagaaaatctgaacttcagttaaccgcacattgtagaatgaacaaaatgaacagacactgagatcaatgaaagtgtaagaactctgatttagcatgcacaacaattgaatataatgagagagggggagatagaagaacgaaaaagacaccagattttagatatccgctaaactctaactggtccagccttggaggaagtagaacagctcttttacttagagactggagaagcaaaattgtaataatgtacctatgtcatggacggaataaagttagaactccacttgtaagttgtaactagcaaaaatgcttgatatgtaacatatgaataaataaactgcataaacatcagatgatgtgctaacagccacaaactgttatggcaagaccagaatcacatatggtaatttaaatgtgtgtgctgaattgctgataaatgaaaaacaaaaggaaagctaaagtttattttctgctgcatttcattattttagaaacatgtctataagtaaaaacagttggtatttggaaccaaactgagttatttgctgctatattcatataaaatattccctttttttacctttgttgttttacttggattccatggggctaggtatcaatatagaacttactgtgatgcaactgtagaaattgcagctccagttatgccaagccgaaagacgtaaataagtaaaggaagaagcactacagctgaaagatttcccaaacctacatgttttaaaagaacatggtacagacatcatatagtgtaatatgagagatatttgatatcagagaagagtctggaatcaaatgaaactggacgtaaagtatgccctttattgtggaaaatggaaaaaaaagatattggaaacattattgtgattccacaaaatatttgctaggactgctaaaaggaatataactaatgcaaaccaatgtaatcatgtggttgatgaagagtagttcttggaagttacctataaaaaatacaggagtcttagtatccttgaatccacgaaatattccctgaactgctaacataatcacatttgcaggtgctcccaaagctctcaatgaaaggaaaagttttgcaggtttatgcattggtgaggcctgcaaaagcactaagttgagatatcctgacaattccaacaattgaaaactaattgttgaatcaaattagtgacccattgtccaaaagtgcacataaaaacgacagtattccctacaaaacaaagatcgcagacaagaataggcatcgtaatccaaaacatacaggtgacacgcccattagtttaagaaacaatcctgatcctaggaacaatgccaatgcttcaattgtaccgattccagcagctaagaccaatgcagaagatacagatgacagctccaatttgcctgcaacataaccacaagtcaggttttattgcttgaatgttgaagcaagtgcacaaaaaaaatttataaatatgtgagaaatggaatatttatttaatatatgctgctgctacctgaacttgaatgcttgctagcattcttggaaatgtcttctgccacaaatgaggttgcaatgctcaacagtggaatgttgaaaatcttagacacgatattaaaaaccgacacaccaataccagctgatgctagctccagagccccttcagaatatatgaaaaagaaggatgaatggcaaaagaagggacagcttgctttcatgcagtaaggatggctataattcagcactcccaagagctactttatgaagggcaagcgccataatacctagaacatcatttttggtgctgtttgaattagttacataatataaaagaaacaaacagcatgaattatagagtattagtgtagacaatgatggtgcaggtatctacctatttgccgattgataaaccattaagaaaagaacacttaaaaatataggatatagcaggtccagtaggtacctacctaatctaccaatatatgcagtctccatcaattgcgccaatggatcaatagcttggccaagaactgctggtagagctagaagaattagctcatttctgacacccccgggacgcaagtcactggttgtttattcgttggatggttatgaaagggtaaaatatgtcatgcacctccgaaatgtaaagattatagtaaatgtagacagcaaatgcaaagggcgcaagcatgtgggtaggcaagtaaataaaagtaggaaactggaaattacatgggaggctccgttggcgttgcattagcaaaagagatggcgccatcatcttcagcaacagcatggggagcattggtggcaagaggggtgatgtgtcgccggtttatgagcaactttggcaggtttgatggggaggagactctggttggtctgctacccaacagggctgaggaggaggaggaagagataggccttggacagcgcgcagggcgtgccgcgtgatggtggtgcatcatcactgccttcatctcgatctcgaaatctggatggaggaatcaattaaattgaagggggaggcagagcaagaagagagatggagctggaccagccggcaggagaggacagcaagttgcggtgccggtggacgttggtagtgggaggatcagactcgaggggagaaaggagaaatcagaaatggatgaggcagcgcatagagccgggagggaccaacaaaaggcaagcctttttttttaattgggttaattgttgtcaacttggcattggcatatgtactgtatgtctgcatctgtatggtggtgcttcatgtggcggtgcaggaggtgcagcatggcgtacacctccgctcgccgtgggtgcgctccgtcccaccatacgaaccgctcgcttccgccggcgtgctgcaccacgctgtggccgctctccaccttcactcccttctccctcatcgcccaccgcatccctgccgcccaccccttgcctaaacccatacccatggacatgagataccccgccgacttgcccggctccagctccagcacgcgggccgccgcgcttcgccccacctcgccgccgccgccatccccgcgcctcctgcacgcgctaagcagcgcgctccacgccgccgggctgccaccgccactgctcctcctcacaatctccgccgcgccgtccaggtcccccgcgcgcgccagcatgtccaccacgcacgacacgtgctccacccgaggctgcagcgactgccgcgccatgctttccaagcacccaatcccctcctcaaccagccctccatgagcgcatgcccacagagcggccagcatcgtgacgccgtttggcctcacctcatcaccttccgcttccatcctgtgcaggagcgcaagggcgtcccgtgcgcgcccgttcatccccagcgccccgatcatggagttccaggtgagcacgtccttgacgggcatcgtgtcgaacaccctcgccgacgcgcccagctcgccgcacttcccgtacatgtggaccagcgcgttgcccactgccagctcaaaccccaatccgctcctgacggccacgccgtgggcgcgtctcgacgcccacatctccgcgcagctgccgcaggcctccacaaggctcagcaccgtgatcgagttggggcgctccccagtcaccagcatcgccacgaagcatgccatcgcggcgtgtggccgggcgttgtgagcgcaggcggcgatgactgtgctccaggttatcacgttcctctcgcgcatcccttggaagagcctcagcacgtcctccacgaggccgcacttgccgtaggcatccagcaacgcgttcagcagagccatcgacaagagccgcctcctgatggccgcgccatggaccgacctggctgcctgaccccctagcctcttcttcttgcacagctgcagcagcaccgcaagcgtcgtctcgtcgcccaccaccccaatctgcaaggccagcagatggagcgcctcggggtagctgccagcgtgcacgaggcctgagagcatggtgttccaggacaccacgttcttgacggcgataaggtcgaacaccttcctcgcggaccgcagatcgagacatttggcgtacatgtcaacgagcgagttgtccacgaagagatccccttgcaagccccggcgcgtggcgacggcatgcacggaggctccggccctgacatcctccagcatggcgcacgcgcgcagaaccacgacggccacgacaccgtccggctgcagcgcgccgtcagcgagcatctccctgaagaggcgtagggcttgatcggcgtagccggatcccaggcaggccccgatcatggaggtccaggacgcaacgtctcggtcgggcatttcgccgaacagaatcgcggcggaggcgaaatcccccaaagtggcgtagagggagagcagggagttggcgacaggcgtgtgaatggaggcgggcgtcttgagaagataggcgtggatcatgtggaggaagtggtcggaataggaggaggaggcgcggaggagggagaggagggaagcgatgttggggtggaaggcagcgtgggcgtggcgcatggcgaagcggaagaggcggaaggtggtggaggaggaggaggaggcagggaggtggttgaggagggtattgtaggttagagaatccctgggcgtggagcggcagcgcaggtggtggagcgcgagatcgaggcgcgaggagcggaggtagtagcagaggagggagttggaggcggcggcggagagaggccgcttggcgacgtcggcgtggagctgtgaggccagagcgcgagcccagcctgatgatggctgctgcctggacaggagccccaacaacgccgggaggagcgccgccggcttgccgcccgcgtaccgccggaccgcctcctccaccaccacgcccgccgtcgccatatttttcgtttccactcctcttcttacttgttacactacatgggcagcatatcttggtaccaaatacaacttaaattaaattaattttgatccctgtcaaatttattcgattggagcattggagggagtactaaaaagcaatgtataatagtttgttaacattggagggagttctaaattgaaaattaatgtttttgtttttgtacctaaaaatgtgtacaagcgagttgttaaaggttaatatatatacatgaagagcaactaagaaaatgatgaaaatcaatcagtgaaatcacccatggccttccaaattaagggggaacataacatgggaatccaaccaagagagagagagagagagagagctaggcaactagtagctagaatgagcagatggaggaattaaggttgggagttgggaggaggcgtggtggtggtggctctttgcttgtcttcccatggctgggactgggaggcgacgtggtcgagggctcgggtgacgtctgtcatggaggggcggaggttggggttgtcgcggaggcagagcgaggcgacgacggcgagctggtagaaggcgcggcgggggtagcggccctgcaacgccgggtcggccagggcgaagcacctcttgcggtcgccggcgaggtaggggcgcgcccagtcccggaggaggaggaagcgctggtggtcctccgactccgagtcggaggaggcggcgtcgaaggccctgcgtccagtgatgagctcgaggagcacgacgccgaagctgtagacgtcggacttgacgttgagcttgccgctcatggcgtagtcgggcgcgcagtagccgtaggtgcccatgacgcgcgtggacacgtgggtgtcgtcgccgacggggcccagcttggcgaggccaaagtccgacagcctggggttgaggtcgtcgtcgagcaggatgttggacgccttgaggtcgcggtagatcaccggcggcgtcaccacctcgtgcaggtagcgaagccccctggccgcgccgaccgcgatcctgacgcgcgccgcccaccccagcgccagcgggggctcctgcggcctcctgccgaagaggtgcgcgtcgaggctgccgcgtggcaggaactcgtagacgaggaggcgctcgccggcgtcggcgcagtagccgacgagggagacgaggttggggtggtgcagcatcatgagcatcatgcattccaccaggaactcgcgggttccctgcgcgccaccgtggcagagctgcttcacggccacgagcccttggccgccttcctcgagacgccccctgtacaccctgccgaacccgccctcgccgacaacgttggactcgtggaacccgtccgtggccgccgacagctgcgccagcgtgaacttcttcgcaccgcccgcccccgccgacgccgcctgcgcggcctggctgcacgggctgccgccgtcattgctgccatgccagcaccgcaggctggggttccacgagaagcagctcatcccttccttcattcatctatcctatccattcatgtcatcaacacaaaagctttcatcctcgactcgacaaaaccaaaaatttggaggacacacgaggctcttcttaattaagcaaccagacagcttaatcgatcgatcgatgcttaaactacatctatatttagatacagcccaggacgcgcaattcatccaggacagagcacagggcattcttctgagtgttgttagctggcatatgtacatatatagatacataaatttcacaagaacattattatgtgttcacggcagaatagatcagattatttttgtaagctatatatcagtataacaataacaaacttttggaacagagttataaagtggaggcgagcttcatcccctgcttcaccaaaaagaacatctgtcgcaaactcacaaggaaacacagtgatcatggggaaactgttttaatccctcgaggagatattccctcgttctttgtatgtcacttaaatggttataaaaaaatttaaaaaaaatgggaaggtgtattaacatgtgatataacactccataaacatacaggttcaaattcaacttctacatctcgtaacgaaaaaaacaaattgaataacagctagttaacgtatattcagagttaaatttatttttttcgttgcgagatgtagaagttgaatttttacttgcatgttttgtggagtgatatatcacatattaatacattttcttaattttttttcaaattttttataaccatttgagtgacatgcaaacaacgagaggatatcccctcgagagggatcaaaatcctcttccgtgatcatgccattgccatacaaaatgcatccaacaaggcgcaactgctgttacaagcgcaggcatcttataatacaccacttcttttaaaaaatgtaattcggtttcttataaagtcaccacaccaacggtttgtggcagggtagcaacacgatgcatacttattaaacacacacaaacctaaaggcgagggatatagtttaagggcagtccaaaccctccacctaatatggtgtctatagcgttaactacattgtcatgtaggacttttaacttatgtggcactatattaattaagagagagagagtgaagagtggaagaaactgggtctcatgcaagacacagcttcaacacgagaacctatgcactagacactatcaagttttgcattgggagagaataatgtcttcataataggcgaagaataaatatgattggcagagaagagagatgatgtatttattaatggcccactctaagaaatcatgggttgtggggtgtagtttctattgtgatgtcttattgacatggcactatagacattacttatagacattatgggttgggactgccctaagcatgcaaagtgaaagctaaactggaacacagctgctcaaggccagggcaaagtagatgcctggatcaaatagttcattgcctggctcgtgaatcgtgattttgtcctgctggcctcctctggggttgatgggaacagctccatgtaccttgtcccaatggtcatcttgtccttgcatatggctgtcttcgcaacccctgttgttgagaactccatagagggccttcccatctagacggtacgcggtgtgcacattttcctccgtcaactcatactctacaaagaacttgatgatgtcttcagcggtagtaaagtagggcaggccacggagcttgagcacatcaggtggtgttcttttctcttgaagatgaagattaagttttttacgtaaaacgaggtggtattaacgtatgattgattgagttttaattattataaacttgaaaaatagattaatataatattttagagcaactttcatatagaaagttttcgcacgaaacacaccgtttagcagtttgaaaagcctaccacaaaaatcttaatcttcatccgacttttgttggagaaaagaatgggacctcaatatattccatgttgctcgtcttcagctggtttcttgggccgtggaggaggtggggagtgacgatactttgagtcgaaaaagccgtcttggttcacctcagcagctattgagctgtaatactcttgcttcttgcatctaaacacctcaacatacctcctgcccatgttctaccggttgcggtgcagtgcaaactctccttgcatggctgatgggaagacgacaaaagcctcgtcggtgaagcagccattcttgtgaaccaagaggcagtccactatgtccagcccaacaaagaacttgcaaatgtcaagatcgccgcagtcaaaggggagccctagtagacggacccctgaaaagttctggatggcactattagctcctgcactaggtaagttggcctggtagggctagtagaaggcattggtgccatcagcagcactgttgcccatggctccaaaaatagagaggggttggttccatcatcctggccctctttgatacatccaagggactgcctgcggtcactgcgaagtatggattggattccatcattcgtagcctctttgatccctcctacccatccaaacccccctccccccctcccatcattgcccatcattgcccttcagataatccagagtcccaaaaagagaaaagaaaaaaaaagagaggagaagatccccccatctctcaatccccatttcatataaaataacccaaacataaagaaaaccgcgcagataagaaataccagtaatctaaacaggacttaaggctaaaaaaggtgaatggagtcgaaatgcgaacgcattagtggtcataaacaaaaactaattaaatgttgacagcttatgaaatgctcaaactactagataacacatatcattagaaaataatcttacaaaccacattggtgcagttatcaatttggatgtaagtcagctattactgcctctgatttatttattttttgggggaggggtttggttttgtagggagggggggacgtacatgtatcctaaatactaggcatatgatatcatatcatatcatattatgatagcaaagcaaagtgacctacttttagatggggactaagaaattgtccctaaaagaatcgagaaattgatgagatcgcataagcaagcaagtaagcgtggattcgtagtattgtagaaaaaaaaagaaagcaatggatgaatcggcgggatggaattgcagggataagagagaaggaagaggaggaggaggtgaccgtacatggcgaagcccgctggaggagggggtggggtggcggttcacgatagggaggggaggaaaccctagagcgagagggagtcgtcaagtcgccgcctctgcgattgtgttgcaatgcgcctcgcatcgcccaagtagtcgtctctaaattctaaatacaacctatacgctatatgcataggacgaggaggaagagctcatgaccgaactgcatttcttgttgctgggtctggattaggcctattacttctattttatttttttctctagaccaaaataaccctgcctaattctctcctttctcccacgcccaaatcgcgcacttcccctgttgaggagggaggcgacgtcgcccgtctctccgcgtcggctccggcgccgacccactcccctcctccgccgccatccatctattcgcgccgcaccgcccgctcaactcttccttcgcgcaggcggcggcggtggcgcaggcggcgtcttcctccacctgatccacctccacttcctccggaccgcacaagaataagaagaagaagaagtgcaggtacggtgcaggtgcagatccaattgcgagctcacctgctctgccctgcccactaccaagtagtagcctcctcctcctcccctttctccccaacatcccatcccaaatcaaaggctactagactagtgttgggggagatccaagagatggcgcggagcccctgcgacctccgcatcctcctcgtcgccgccgctgcagccttcatctacatccaagtatgcctatgcctatcacaatctgattcttcttcttcaacttcagatcaggatcccccctctcctaaccaccactctactactctctcactacacataatggcttctttctccttgtttcaggtccgccttttttctactcagtcccactacgccgaccgcctcgcacaagcagtcagtctctctacccccccccatctcaatatactccctccgtttcaaaatgtctgacaccgttgactttttagtatgtgtttgaccattcgtcttattcaaaaaatttgagtaattatttattcttttcatatcatttgattcattgttaaatatactttcatgtacacttatagttttacatatttcacatttttttaataagacgaacggtcaaacatgtgctaaaaagtcaactgtgtcaaacattttgaaacggagggagtatatatttttggtctgctcaaactcactaattgcaatttaggaaaaatccgaaaaccaatgcaccagtcaactccgctccttgatcgatcaagtcagctctcagcaggagaagattgtcgcgttggaaggtaccacacatttatcacactaatttaagccttgcctctactattcgcgacctataaatgttgtgtctctcatgttttggtaacaacagagatgaagatacgccaagacgaagaacgtgtacacctcaagattttaatccaagatctcgaaagtatgaaaatgacctttcttatctttcacctatggatttcagccacaactgttcctgctaccaagtgtttgctacgttacttgatttttctcgcgcctcctaatgtttccattaaaacctaaccttgtgatactcatactggagcctcatgcacatcgacctccatgtgacatgcatggttgacaacacaacaacatatgacccgatgtttcttcttgaaattcacatgttttttttcctataaccaatagaactgaaaattagtatgtcttctggaaatatttttacaactacttattttttttaaaaaaaaatggaactacgaaaatgatgtcaatccatcagttagtcagttgtttagttaaacaatcattcataaatgcccaaaatataatagtggaacatcaggaccgtacatatcattctagttgtcatcttcacgttgaatacaaaataatagtttcataatcctcccatctaccccaaatatagaggttatgtttctcattaccatttgacatgtcactggcgtgtggctctgggtcccacatgccattctcatatgtggtagtgcctttcagtttacacccattcgcaacgtgctgaactaattttctcaaacataaagatgacccatcgtatgatctcaatcctcccagctgccatctacatatttaacccgtcattgtgattttactttaccacatgctactttttgtttctaactatttcttcaacatttcttttggatgcagaaaggagcgtgcagaccttagtaaacaacaatgtggtttgtacagtgctaatattgctagcattcctctgctatatttgactaatatgatctgtttctataagcaggctcctgttgctgctgttgttgtaatggcttgcaatcgaccagactatttgcaaaggacagttgaatctatcctgaagtatgctttgtgccttcattcctttattttcagaatccagattttttttggtctgttattgttttttctaactcctaagttggtgccaaaacccactcagtcgatatcacctgtgaaagttatgcatggaatcatgctgcattgtaattgccacgctgctcatggtgcatgaatgcataatgtctttttctcagaaattgtccatgcgatgtcacaaggaaaattacacattttacttcctaatccatatatgaatcccattgtgagctccatgtagcttaagttcgtataatacccttctgacctaatgattcttaataatttttccaggtatcagacatcagtggcttcaaagtttccactatttatatctcaggtactggtcttagcaatttcagttcttgctctcagtctctctaagtttgtggatttttttccattgctcattgtaattgcaggatggaataaatggagaagtgaagaaaaaagctttgagttataatgaaataacatatatgcaggtgtggaactctttcttcctctacacttatttgcctaaaaataagaagaaatatacttctgtaatattgcaagcatagctggagtattgtctgaggaccttttccaagtaactacataagatgatatgttgcaaaagaggggttaaaaagaaaggaagaaactgtagcctgccaagaggttttaagtggacctagattgaggttgcccttgaactttaagatccatgagtcatatcagggaaactctaggtccaatggatataaactgagcagtgagaagcaaggccataatcataccccaaacttgtggatgtattgtttgaaagggaagcttgatgccactgtactgtagtgagtagtgaccctatgctgttctggaatggggcagtggaattggtccaatatgaaatagtatggcaaaggtaataaaatccatatatagagaatcaacgggaagggatggcagctcactgaggtgactgctcagttgacagtactgaacttgtatttagttgacaaattatcattacaatttagtttagataaaataacgggtatgctagctcctgaaaaaccaaatggccatatgtagagtaacaaccatgtcatggagtggaagtggtaggataatcatcagtgtatgctgtcataaagtgccagagtgcagattgaagtctagcaatgaagtgttattgcaaaaaagagaaaatcttgttctctgccttcagcgctaatagagaatgaaaccacgaatacaatatttcctgctgttatgaaatgattgtaaacatattatcacatgtgtacttttatagtgattttgaatgattgtagcttcccccctccacataacataggcatgcagcagtccgatatttgtaagaaacatgggaaatatttttcagctaagactctcagtggtatgtgttgcagcatttagatcttgaacctgtgcgcactgaaaggccaggagagttgatagcatattacaagatagccagtaggtggtcctccttgattgatgtatgctgattgaagatagtgatgataccactgatccttgtcctgataactttcttatttcagaacattacaaatgggccttggatgagctattcatcaaacacaactttgcgcgagtaataattctggaaggtgttacaccttggatgctcttataactattttgttctttgatctgtcttctttccatcccatttatggttaataatttgctaatagatgatatggagatcgcccctgatttttttgactacttcgaggctgcagctaaattacttgataacgataagt

SEQ ID NO: 9046 - DNA, 80688 bp, Oryza sativa
  unsure (1)..(80688): unsure at all n locations
ttggtgggcgtctacgtcttcaccgaccggcaccgcatccgccgctgactggtgtcaccgcctgcacggctggcctgttataacgccaactgatgctatcttcttcacggctggctacatcgctgtcactactaataggcatcagtatcttcaacacaagctgcctacgtttgccatggctgccgactggtttcttcacttccatggctacatgattctaccagtgttgattagccttatcttcttcaccgccggtcatctcgtctgctgttgactagtgccctcgcctctacgtctggtttatacagctaccactactgatggacatcatcgttttctgccgccgactcgtgttatgccgccgtcgactggtgcttttatcttcacaactgcgcgtcttcactaccagtttgcttctgttgccgccgactcgtgttcacttcatcacggcgatgcaactttgtcatcatggtagagcgacttcatatttattatcttcggcaccggcaaactctattgctgctacttcgcaagttttgctacttcaccaaccacgacgtctttgtgaacctcaacatctcggcatgcaatgtcgtgttattttactacaacaagtggctctccaacattcatgatttctacttggacatcttcaacacatatcttcaatcaagcaatgactattcgacgacaagaagctacagttctcgactctatgttcagttgtttcccaactaaccaaagagtcgggggctacacaaatacaagactcttaaaattcgacaagctgaagcaatcaattaatcagccaacgagtcaattccaggagtcattatcttcgtctttgctttagagcagagttatcaaccaatcacctcagtttcgacaagatggacaacatcatctactttcctccaagtgaagcatctgcaacagctataacaccaatttgatggattattgtcactgacatcatcaccagcacctctgcttcatcggccctgacatcaactctgttgctaatggatgactatgtcttcgccgacttattatttcactttcacggttgctattgactggatcaccgacattgttatcttcatcaacatcctgtcaagcctcttcaacatagcccactctactgctattgatgggcaacttcgtcattatatttgatcatctatgattgctgcttatcatcattactgtcggttgcgtttgtcgtcgccgactattttctttatcttcatgattggtggatttcgtcatcacctttgatgcgtgtctacatcttcaccgtcggcttgcttttgtcaccaccgaccggtatcctcgccttcatggatggcttattatgtcgccactaatgggcatcttcatcttcttcaccagctgcatcgtctgtcaccgactgattatttcactgccatggctacacaactttattgctgggcgccttcatattcattgctggctgacctgactgttgccaactggtttcttcgcctccacggctatgcaactttatcacttttgattggaatcactatcttcactactaccaatatttttgccacctctggtgggcaatattatctctatgttggtcgtcttgtctctatgccaactgcgtcagctaccatcaatggacaattgtgactacgacagaaggacaagctatatgctcaggggcttactagttcaaacacaagtattatatcttcaatttggacttgctccggatacatgcaacatgaattcatgatcatgggtctattttatatgctcaaagactggactatttattattccccgtaagggttatcaactgaatacttgcgccagtcgggattcaattgttacatccattttggagtatcccataagggataatcactcagatcagaagctattcatatgagttacgcttggtctatattacccggaagatttattactcgggagcatgttatatgcgtcatcctttaaagggtgtcgaaggcatattttttggcctaggcctaatatgtctgcagcccatattttcaggtgtggcctgtcacgttcttttagggacttaggcactttttgcttaggccaaagtgcgcgtgatcaagtgccaataccttaaaatccttttataccgcagttactcaactttttaggagttggtacaatgcatcttaaaaggtgtcaaacagtaaagctttatatagctgtcccgctgacttttttatataagtcaaggtgctgtttgggtttttaagcaattgattggatacaatatcattgctttttgccacgtaagtgtgtatttttattgaccaatattatggcttaggctgattatatattatggtcattttccaggcggttggtaaatcctttatgagtttatttactcggattttacaccacatatgccatatatttccgggtgtggtgaaaccatgtgtcttttagggacttaagcacatctgttaaagcagtgtgcgcatggcgtatgcccaatactttggaaatttctttattcacagcattcaagcttctttatagttgttttgctatgtgaactttcaaaaatgttatcaactttaggttgtacgcattatattttgccaagcagtcggtatatcacttggatcatattattcggggattcacaccgcatatgctatatgttgatgtcaagtcacttggttgattacaattatcaaaaccactcggttggttagattatttattccttgactatatgtttggttggttcaattaaccacatagttgggggctacacctattaggtgcatctattcgatgcacctgactttatttttcagccctccacagtcttcaaatttggtaaaagtacccgggagaccatggcgaagatgattgaagcactcggctttggagtaatctagttcgagagaagattatattttcgactgtgaaggtctcaggggctactgtggagattatgggtaccccatacccacacggcatggttatccgactagttataggggataacttatatatatgaaatatgtaacagatcatgacttgggtattacgtttccctgtatattatggaacggcctaaagtcctggtttgataagattgtaaagtagatttaggaaaccgataccgtattggttaaggtttctatcttgtaaccctgcccccaacctatataaggagggcagggagcccctctaggggcatgagacaacctgatcgttagatcaatacacactcggcggattcaaatccccaaacaggagtagggtattacctctcatcgagagggcctgaacctgtctaaatcctttgtctctgcatccatccacttttaggtctcgtgcgctacccccttttattattgccgaattcatgtttcgacaaagataacatcatcgaagggggcgatcacaatcgtcccctctacattgaaggaaacattggttctgctcatcttcgacggattctcattgacccaggatctgctgtgaacattctacccgttcgaagtctaactcgagcaggtttcacaacaaaagacttggagccaacagacgtggtgatctgtggctttgacaaccagggcaagccaacattaggtgccattactatcaagatccaaatgtctacattcagcttcaaggtgcggttctttgttattgaagccaacacatcatactctgctctcttgggacgaccgtggattcacaagtaccgtgtcgtgccgtctactctccatcaatgcctaaaattccttgacggcaatggagtgcaacagtgcatcattggcaacttctcaccatacactattcaagaatcataccatgccgacgccaagtattacttccctgttgaagaaaacaagcaacaacttgggcgaacagcaccggcagccgacatcattattgaacccggcaccgagacaacccctaaggtgagacgcctcattatgccatgctccccaatcattagcgaatcttcatcaaggaatcgcaagaatagtaggcggggaaattcttcttcagcaaccaacctcagcaccaagcttccatttcccgctgaaaccagcacgtctgccccatctactacaccaatattgctcaaagcaagacgctctacctcaacaccgatcaccttgggggcaacctctcgaggaagcaagaaaccgcccaaaagcaacagcgatgtgccaactaccatcaccttacaggcaagacggagtccaagcaaggaagccgcgcttgcacaacaaggagtggtcaagaagagagttgcagagatagagaaggtaaaagcgggtgctcagtgcatgcagcccccagccctctacactttagtttctaccccgttagaggtatgggcaattccagatccatcttcttctacatcccggaccattctctacaaggtcccacaggtacaagagtgtgattctataatcgaattccctaagccttattctgatacagaagaagcgtgcacgaccatgaaggctgagcctagaatggctcgcctattggagaaggcgggcatcaacctacagcgaaacaacaggttgccaccacctccagcagtatgtgaggactggtgggcacaagcggaagagtttatcaagaggagatgtaaagaacaaccaaagtacggtctcggctatatcaacgtagatgaacccgatgatgaagatgaagtatttgaagacgatatatttcattgttgcaccataagtaccactacaataggtgatgctttactccaacaacacccctttgaggttgcagctgttggggtagaagaggagctcgatgttgcaggggctcttaaacaacttgatgacggtggccaaccaaccattgacgagttggtggagatgaatttaggaactaaggatgatccatgccctattttcgttagtggcatgctgacgaaagaagagcgagaagactatcgaagcttcttgatggaattccgagattgcttcgcttggacatacaaggagatgccaggacttgaccctcgtgtcgccacccataagctggcgattgatccccaatttcggccagtgaagcaaccaccaaggcgcttaaggccagagttccaagaccaagtcatcgccaaagtcgatcgactcatcaacgtgggttttatcaaggagatacaatatcctcggtggttagccaacatcgtccctgtggaaaagaagaatggacaagttcgagtctgcgtagactttcgcgacttgaatcgtgcttgtcctaaagacgactttcccctaccaatcacggagatggtggtctattcaacaacgggttatggcgcactgtccttcatggacggctcatcaggttataaccagatcaagatggatccccttgatgccttcgacacggcgtttagaacccctaaagggaacttctactacactgtcatgccgttcgggttgaagaacgccggtgccacataccagcgtgccatgcagttcgtcctcgacgatttaatccatcattcagtggaatgttatgtcgatgacatggtagtcaagactaaagatcgcgaacatcatcaaaaagaccttcgcattgtctttgagcgactacgtcgacaccaacttaagatgaaccctctcaagtgcgcctttgccgtccaatccggtgtcttcctcggcttcgtcgtccgtcatcgagggatcgagatcgagccaaagaagatcaaggtgatacttaacatgccgccccctcgagaactcaaggatctgaggaaactacaagggaagctggcgtacatccgacgcttcatttccaacctctcgggccggatccaacccttctcaaagctcatgcagaagggcacaccctttgtgtgggatgaagaatgccaaaatggcttcgataatatcaagaggtacttgcttaatcctccagtactggcaactcctgttaaagggagcccccttattctctacattgcaacgcagcctgcctcgataggcgctctcctcgctcaacataatgatgaaggaaaggaggtggcttgctactatttaagtcgcaccatggtcggtgctgaacaaaactactccccaattgagaagttatgtttagccctcatatttgcattgaagaaactaaggcactacatgttggcgcaccagatccagctcattgcaagggcggactctataaggtatgtgctaagtcagcctgtgctcactgggcgactaggtaaattggccctgctcatgatggaatatgatatcacttttgtgccgcagaaagcaattaagggccaagccttggcagaatttcttgctgcacatccagtgccagatgactccccactcatcaccaatctaccggatgaagagattttcaccgcagagcttcaggaacagtgggagctttacttcgacggagcctcacgtaaggacgtcaaccccgacggcacccctcgacggagagctggggcgggattggtgttcaaaactccacaaagaggtgtgatctaccactcgttctctcttctcaaggaggagtgttctaacaacgaggcggaataggaggctctcatctttggtcttctcttggcgctctctatggaggtacgtttcttaagagcccatggggattctcagctcattattagacaaatcaacaatatttatgaggttcgtaaaccagaactggtgccatattacacagtggcccggaggcttatggacaagtttgaacacatcgaggtcatccatgtgccacgaagcaaaaatgcgccagctgacgctctggcaaaactggctgcagcgttggtctttcaaggagacaatcctgcgcaagttgttgttgaagaaaggtggctccttccagctgtcctagagctcatccccgaagaagttaacatcatcacgactaattctgctaaagaggaagactggcgtcaacccttcctcgattacttcaagcacggctctctacctgaagatcctgtcgagagacgccaactacagcgacgacttccctcatacatctacaaggccggtgtcctctacaagcggtcttacgggcaagaggtcttacttcggtgcgttgatcggagtgaagccaatcaagttctccaagaagtccaccatggagtatgcggtgggcatcaaagcagaccaaaaatgtaccatagcatccgactggcagggtactattggccaggcattatggcggattgcctgaagacagctaaaacctgtcatggctgccagatccatgacaatttcaagcaccaaccgccggctccgcttcacccgacggtcccttcttggccgttcgatgcctggggaatcgacgtcatcggcctcatcgatccaccttctccaagggggcatcgcttcatcctcgctgcaatagactacttctccaagtgggcggaagctgtgccactgcgtgaagtgaagagcagtgacgtcatcaacttcctcgaacgacacatcatctaccgcttcggggtaccacatcgcattacctccgacaacgccaaatcctttaagtcccagaagatctataggttcatggagaaatacaagatcaaatggaactactccaccggttattaccctcaagcaaatgggatggccgaagccttcaacaagaccctcggcaagatcttaaagaagacggtagacaagcatcgaagggattggcatgatcgtctttatgaagcactatgggcgtactgagtcacagttcgtaccccgacacaagccaccccatactctctcgtctatgggagtgaagctgtgttgccattggagattcagctaccatctctacgagtagcaatccacgatgaacttactaaagacgaacatattcgcctccgatttcaggagcttgatgccgtggaggaagagcgcctaggcgcccttcaaaatttggagttgtatcgccaaaacatggtgagagcctatgataagctcgtcaagcaacgagtcttcaggaagggcgagctcgtactcgttctgcgacgtcccatcgtcgttacacacaagacgaagggaaagttcgagccaaaatgggaggggccatatgtcatcgagcaagcatatgacggaggtgcttaccagctgattgatcatcaaggatcacgaccaatgccgccaatcaacgggaggttcttaaaaaaatattttgtataaaaccctgcgcctcttgttttcttgttttctttaaaaaaacactgtgagcttgccaacgtgcattggccattgcattgtctggtgctccacgttttgttttacaaaatggatgccacatcccacaaaaaaaatcaaaatggctttccacatatcacactgagctggtagaagaagacaaggcaaccttagaacacctctacaggattcaatggatgaccatgacagactgtgcttacaactaaacatccttcacgccaacacacaagtactacgggtgcatatttccgaggaatagcaaaaagacttgattgggttacttcctagtagcaaggtccccacgccttcgtgtccttcggtgtgcttcaaacctatggagataccaagccccagggaagactataggagaagagtaagaaagggctacctacctcaacacaagttgtggttcagtgtgcagccacttgccatccctgtgaggcatgtcaacaagggactttacaaaagaaatgggcctgcaaggattacatagcccacaaaggggaatggttgtcctccaagttctaaggatgccaagatcccagatcaatctcaacaaagtcgtgatgatctcaactcaagaaaacaatccaatatcaatctcaatgaagtcgtggtgtcatgaagccgcgaagcaaaaaaaaaagaagaaacaaaaagatccaagcaatcagtgatctccactgcattctgtcagaagtaggaggatagccattcaccatcctcggcaaaaggaaaaggccactctcacagccgttcccctataaccctatcttaattcagccatacctaattctctcggttcgatgaagcacaataccgggggcatgggactcgtggtggaacctagtgaactgaaaggctagagcatggattttcgctgccttctgaaagtatcaccatgtatgctactcctatacacaagcacactaggaagttaggttgacagggagcaatcgtcatggtcgttcggcgattcccgcgacacgttcttcggcaatcttatctgacgctaccacatagccagtgttcagtgggaaagccaacattttaaaagaaaaatcaacaaaatcattttcttgctaggtttctttctatcaactcacctggtttgctcgactctagcaaccatactctagttttttttctcttttcctctctctttttcctttttgtgatgcagggttttcgcttcacgtcatttggaggcaacataacactctgaagtcgccatcgggctatacatctttcaacctgacaggtcggcatcacaacagtcaagtggtcgcgtccggattgataagatgtttctttcttgggagcggggcggcgcaccaacgcggtcagcgccaagccgtgaaacccttcatgctgatgaggcaggcaccgtgatatatcaacggtctcaatcggtctgataaaatgtcttcaattgtggcatgggtctttttcgctgcgagtaggagacgatttcaagttattttgttggctggcacctatacttggtcccgacaaaattcctttaattattatttgaaggcatgaatcttcgcctcgagacctcaggaggacagcttatacctgaagtcatttttattcttcacctattctcaaagcgctagactttctgaatggtgctactaccccacatgggttgatctattatatgaagcaacttgtacagaaggcaaaccaggaattgatggaagagatcatgcatgcagctgcgtgagtacagaatttgtgcatgacactgtagcatggtgatgatgtgtcgtcctctgattgctcggccacattgccacaagatgggtttgttaaaaaggaattaacttaacaatgcaaactgctggctggccttggctcaatatgttgccgccgtgataatcaacagaagttcatatgtattcatgcacttataaattacagccatatattcccatatatcagctctcgggtcccggcaggatcttcggcgggttctatatgcgacggtggccacatgcacgcagtgccgagtattcggatacagaagggatgatacatattagcaagttgaaaaaaaaatgaagaggacaaaacacaagcactccatatatatcgatgaagacaatatgacagactcaaataataaaacaagtactcctaattaatgggtgcatgataatgccccaactttattcaaagattaaaaactagctagctgatcatctaaattaagagcgcttctaatgtgctttacatgactcgaaaaaaaaatcctaattaaggtaaaccaaggagaagcatatggaggctattctaattcttcgacgtactaccccgaggcgccgattctctacgatatgatagaatggcggccacctctggcggcacggccactgcaaggcgtttcctctcttcagcaagatgccccaaatagaccttcgcctcgtcacgacgctttatcagctgcgtgacgccatcgatggtactatcataaacttgcaggttcttggcggctgcctcctctgattccaaacactggtgctccttctccctcgcatctttggctttcagctcgtgttcctccgcctctttcttccaggtagcccctgcttgcttggacttctgaagatccgcggccacgtcttcacagccactcttgaggaggtcaaggtctggtagcacgtctgaacacgcactctcaagctttgctaaggaagagcgcgcctcgccttcatgagcagctaaagttctcccttcaaaggttaccgggagctctcccttaagacgttgcacaagtgcccccaagtaagacatcaacttctccaagtctgcggggcgtccaagctcgtaactattttcccatgcagcggtggcagcaccaatgtactctatggtgccctccttgttcaggggtttctccatcaaacaatcttggatgctaaatagatcctcctccaccatgtgggcgttgcgacgttcagtaagcgtggactttggaagctccagcgtcggcaattcgtcagtcgccgaactcacagagttaagttggagatagcgaccgcacgtcccgaactcagcaaggtaacgggacgtcttctccatcaactcgttcatctggcaagctgtgtcggatggattgcctgaagtttctacaatgggtatagtacacttttctcagaaaaagcaaagaaagaagaaaatacatcaaaagaaagcaaaggagaatatgacctctattaggagtctaatcatccttaccttcctgatgcttttgagtcgagggtcccggagctgaagcggcatcagccgccggcatcaccggagaagagcggacaggagcattagcagccggcacaactgaaggtacatcgtcaataggtaccggagcaacatcggaagaggcagtagctttaagtccacccaaagcagttgcatgctctatcgtatcctgagttgcaagtatattctaagagacaggttatcaaaccactatgacatagaattttaagagaaaaaaaaagaattggggaaacacggataccttgccagtgccatcagaagaagaagaagaggaggaggaggagtcgctcaactggacagcatcaagctccgtgtcgggaaccacagagcggcggcggcggcggcgatcatcgcttgaagactccgtggatgacaccctctcataaactacggggttttttcctcgcttctcacgcatggtgcggtctagctcggggtgtggagaatcttcaatacgcagaccctttttagaagatttcggcaatggaagtctgtcaggacgagcagttctctccttcttatgacgccagtcacgcaggaatttgattgactcgccgtggcatttgtatcctcctcgatcatctctacggaccgggatcttcgcgatatgctgggaagggtcgtcacccttggtctccatctattgcttgccgccggatcctcccgggagcttatcttcgacagtgtgtctatctcctgccgagcgcctgtcccatgttactcgcctgtcccccgttctctgcccgtctcgcgggacacgctctccgccgccccggtcgctggcgccacgctcgcctgcacccctggatgctccgtcttccctggccatctcaagatggttgcctaataaaaaagtacaggatgatcaagaagcgtcctaattccagcggctaaagaatcgacaatggatatatacctgtgatggagttaaacacctgaggcgccatattgcataatcgatgcacaggcatgaccagcaatatataggcttcatccaaattactcgtaactgccaaggatttggagtcctggccgatgacggtctagctttgtttttctttcgccgcacggccggagataagcttcagcatgggagtcctttcgtcgcatgactaaactctaccggacatgtattgcatgagccaacacgacaccaagttaatttcgctcgctccacgatcaaaatttacttggtggggggcatctgtttgatggtattttggcgattatatgtgtacacaagacttactcatgatggacaaagcaaacaagcagtttgtaagttggctagcttatcatttctatgcaatgctcggccatgtatatacacgcaaatacatgcatgcacaggcagctgggaatatatatacttggattagtatatgtgcatgtataattaaccaataactagccgtgtgaagattggctagtgaggcaatcacgtgcatgcatgcatgtactatagtagacggtcgtatgtgtgtgcatgcctgggtgattaagcaacctatgcatatccaagtgattaatcatgggctcggcccatggccgaagacggtagctgcctacgcaccaagatttcagaagttaatatgcggaagagataaaaccagatgaattaagagataaccaacaaaccaattgattttatctctataacaaacttgatctagttagttacttcgcgcgagcgctggcgaggcgcttatcaccggactgtggcccagcagcagagaaacaaagcgaattacaaatcagatatttgacgccaggagaagctaagagataaaatcaaagaaggatatgaacaaataacaaactgatcgatcaagccttatctgcaacgaacttgacgcggaggaaacggcgcgcgaacgcggcgagcaccgaccccagacccctatataaggcgtcgacccctcggcagccaggggcattggcgaactcatccacacattcattcaccaacgcatctagcatccacaagccacccatcatcaacgcatctacccatccagcatcaacacatccatccatcaactctcatcggcgatctatccatcaactctcatcggtgatccatccatcgacgacacgcaccggcggcggcgagcgacttcggccggagtcccggtgtccggtaggagagggcgcgcgcggtgatccgatcatcagcaagcgcaggagaggagcttgatggctagtccaggtaaaagctagcaagattgtttcgttttctttcatctacaacacgcacacatccatgcatagggatccatctgcacgtatcgtcgtcgctggggaagttgcggtggccgattcatctacgcgtcacagaagcctcatcgatgccggtgtctgttcaagctgacgcagtgctacttgtccctggactcgacgctgctaattcaagccgctggtgatgcatctacccgaagctgcgacctcgtcgagataccagacattcttgatttgcaagcttcaccgcactggagcgggctaaccatggaggaggtcgtcgggaagccgccctgccggagcgcgccgaggatcgccggagctgccgccgactgccaagacttctatcagttctcatgccggaggtcaagcatcacgcatggcgtcaaaaccagcggatgatgatggaggcaagtatggctgcagtacagaggaaggacgacgggaggacggcgagccagtgctgttggatggcaacaagctaggtaatgcatgttgattaagttaattattgtggcaacgtggccaaccaatcggaggacgacatgtcatcgctgctacagtgccatgcacaaaccaatgcgtgggctgaagaagtcctgttggtttttcttatttgtcccaaatgagatgccgagctttgattaaatccggccgccgtctacatcaaccatcttcaataattcctccctgattcttctctaatctaatctcgacgcaacagctgtgacgtcaagtcgttcaagctacgcaactccatgcatgtcttcaccaacaatctacatcgacacgttgttcaagaccgacgaggctagacaacggagggtgggcaaccaacaccggcgcacggaccgacgaggccatggatcgctgccggcgctcacacacacacacacacatctacatcatcatcacaaccatgcatggagaacgcgaagcgaacacgacgagatgaccacaagcagcttaatcggaggttctcttgcaggcctagacctatggaggtaattaactgggagcttctcgaggccccaggaaccaggagaccacatcgcacaagtcagatctgtccaatgacatattatggagcgcgcatacatatatattacattgggaatttgtatttatgatcttttaagattaataaagagcatgttccctatgttttgtttacattgtgtatttaggtacactggcacgcccgcacatatatgtatctctaaacaaatgagatctcagatgttattttccaccctaaacagttatatcctaacttagagacggatgatatggaatgaattagaggtagcagtcacctctattataaacttgctcttaggtttgtctcgtttgcctaaaatgatttgacactagcaaattgaatagggttgtgctgaaaaaagaacaattgcacatcttaccctattttgaaggcgaactatcaatgtggtcatatttttttaacaactttacttgtttgatcctacttttcaaaaccaaagatatggtatgaccctattctgttaagaccatataacggtgctaactgaagcccaaaataccacttctgtccttgctcatttgaccatattttcccaaagcttttaattagtttgactagttttgtatggtggaaaattaagaaagatttttttataaattgtgcacttagtgtaggggtttacatatatgtgacaaatttgacttagatttgctagatacttcgttggaggcatcatcgtcaatttgtgtcaagcaatagctaagaagcaatccacattggccatcctccccaccccaggatctgaacctgggtcgttgttggcggttgacctcacctctaaaccctatcccacccctgtcgatcgtctccaccgtcggtgaacccctaggccaccaccattagggctcgatgctcttcctgttgcctagcacctctctgcacagattggtaggccgtcctcgcctactatcccaaccttctctgtgctcgcatttgtggatcttcatcaggccacccaccgctggcgctgtcctccacgcccctaggtctccaccgctcaaggacgtcacatgggacctcaccgatgctagcaccgttgggacatctccgtctacgtctccacccgattggctgctagacttcctccccgcgcactgccagggggcactacggctcatcttcgccacaactccgcttccttccgtgccggcgtgcagctcggcccccttcctcgccagcttgctcctcctagatccccgtcgcccgcgctgcacaacacccactatactaccaccagtcggccttgccactcaccgtttttctccaccagccctcatcgtcggccatcatctactggcggctccctctgctcgggagatgtccctctccttgcacctccgctggtggggacatttaactccatgccacttttaagacgtggcaattaattatttgccactcgttgtctgtctatgacatgtgggccctcatgtgtctatgacatgtgggtccagtggcaaataatttaacaccactcgtaagagtggacctaagctaatcgccacaactcggctccaccggccttacaaagcacccacctctttgccaccggccctgtcaccctcagggtttacattaccgtcggtaaccgcgcggggtacggtaatagaaaaaccacggtaacctccttaaattcaaataaatttaaaaagtaatttgaatttttgataaattttgtccggttaccgcgcggtaaccttgcccccagcggtttgggaaaccctggtcgccctactcggggcgcctctccgtgtcgcataggaaccgaacctcaccccgataatcaccatcgttgtctctcatccttctatgttcatgccgcaccgcctgtgctcctctcctctctctggtttagaccagttgagacagggatagggatagatttttgaggttgggttctattcccttcccgcatttcggtctttcttactccctccgtaccaaaatacctatcattttaagtttttgttgtagcgtttgaccattcatcttatttaaaagattatgaaattattatttatttttatttgtgatttgctttattatcaaaagtaagtatgacttaccattttttatatttacactgtttttttaaataagacgagcgatcaaacgatgtaagcaaaatgtcaaaacaacatctaatttgaaatggatgtagtatattctaattgcatctttttaaatttgttgctaacgtcgtggtcagaataaagtcaaataatagctttgatttttaaaaggagagtcaatcaaacaaagttaatagaacaaggtcattaaaataggatcataggcacatttgtcccttagaaaaaagtaaaggcatagtagccagtaatgcgcgttgggcccctagcctagactagtctccatgaatgcggtgccggtgtttttatttttcacgtttggacggcatttgactctagtgtctgccacctacttactccgtttttagaaactaatttagagtattaaatataactacttataaaactaattatataagtgaaagctaatttgtgagacaaattttttaaacctaattaatccataattagagaatgtttacggtagcatcacataggctaatcatgaattaattagtctcaatagattcgtctcgcgaattagtctaagattatggatgtgttttattaatagtctacatttaatatttataattagtgttgtctagatttattgtactataatatatcacatctagttggtttttatgggaagaagggagtacggtacacgcaagcaatgacacaaacacccctgtcctgtctcaggctctccctcgctcctcttgggctcaaacaagaagtggagcagcagagacaagaggactgattgatgaggccgcaaagcctggctgcctgcctgcttctttcccccactccattaatccaccaccattaatatttcttgcgctagctgcttgcgatctgcgagcactcgcactcgcagctgctgcaacaaaagaagaagacggggagggagggaggatgcgggagatctggagcagcttcggcctctggatgctgctgctgatgctggaagctgtttcccctgcaaagatccacggtcggtaaccaaagcttccatgcattctcctccgagtactcttcgatctactactcctatatcaagtagtactagtagtagtagtatgcagtagtggagtagtatgtgatgactaagtgaacgacgacgacattcagggaaccccgcgaacgacctggtggcgctggtgaacgccaaccggacggcgaccaagctgcctcatctgcgcaccagcgctggccttggctgcatggcgctgcagtacatctccgactgcattggcattggcattgggtgcgccggtgacaacacggtggcgtgccagccccccgaggcccacatcaccgaggtgtacgccgccaactgcggcgtcgagctccccacggtggacgtcatcacgggccgcctcctcggctgccaccgccagcgctccgacgcggaggccgcgctggaggccgtgctctccggctccggcaacagcaccgccgctagagcggtcatccgcggcaaggagcacacccaggtgggcgccgggttcgaccgcgcgcaccgccgcgggcccttcttctggtgcctcctcttcagcagcggcagcgccaactccaccttcctgctcgaggccgccggcaagggcgtccaccagtctcacggctgcttcagcgtccctgacaacactagtctctctctctcctgcagcagcgccgccgccgctgctgtgcctttgctcttcttcatcctcctcctcctcccagtactacaagtttattattagtacttaccggtgtatctcagtgcctgccggtctcgttcctttttctgattccgattaagatacatattttattttgatttgtgttagcatttttttaattattaaatgtatgcttagtaagaaaatggtttttttctaaaatatcaaataaacctattttctaattaaataaatcgaatcctgaggggtttgtcaaaaaaaaaccgattctagcaaaaaaaacgagaaactccatccaatcgtttgtgggccatactaatgaatacggagggtagtagcagtggatatagagggcaacgacctcccccgtttacacgcccaaaccttatctcttcccaagcaggggcgggcccagctataattcaagggtattcagatgtataccctaaaccctatacccaagatttttagacaaaaaataggtatatatactctatagttcatatatgtattcaaaaagttaaagaaaaagacttaaactactcatttgggcctcgttttgccatttctttctctattgggtctaaattttccaccttcctccccctttcactcggcccgtagtctacttgggccgcaactaagaccatttcgaagccaaactcacctgccaggcagctaacccaaaatccccaattcccaaattccctaacctaaccctagctttgcaaggagacgggcggcggggggcgctgcgtgcggcgtgcggtgcggcggcgggcgcggtgtacggcggcggcgagccggcgaccgcggggcagccagccaggcaggggcggctgccggctggacgcactggcgcagcatctcctagggtggcggcggagcgggcgcacggccgtggaggcgtcgacgcaggaagaggaccactcggcttggcgccagggcgcggggcagcggctgactcgtgaggcagcggcgcggcgcggcctgcggcgacagcggcattgcggcgcgacgcgcggcctgctgcgacagcggcagtgcggccatggacgacaagctctacccgcctcgaggcccagcgcgaagaaatcaagtcccgagccccgaggtaacgaccgcaccccccggcgatccttcctcctggtttggtttaatccctagctcctgtctcatgtgaatcccctcggtacttaggttttgcatcaagatttcagtttcgcatgattttctatgtttagcatccatgtgttcctgatcctgatgttggatgaactagtaatgggctaacaacctttttttaattgagattactagcgacttagcaaacatatttctgtgcatcatatatgctaatttgtgctttgtatcataatgtatgaacttgagaagcaagatagggcaacaatagttgaatgattgtttagttacattcattgaaagagaatttttcttgcaaattaaagacaaggacatcatcacttatttccaaaatatcaaacaacgaaaagttgatctccaaactgtaagatttcttcccaatttatcattttctaccctttatgtatttcatatgttggcactttgatatgtttactaattagtattctatatgttaaacaatttcaaatgatgatcaattctatcaatgtgtgaatttatgctcaattttatgctatatacgctatatattatataattattagtttgtgatactatacaagccaattagccaattattaggtttttaggtctatgaacaaattttttttacccctttctatttcgaatacacaagtttaaaatcctgggcccgccactgttcccaagcctctcgcatctctctctcgttctctcgcggcggcgtccagatgtggaacctcgccgatcctcctgccccttccacccctctccccctccctcctgcagtcctgctccacccctcactctcctctagccgtgattttctgcgtccgatgcggcggctgggatgtggcggctgaggcaaaggtttgcggggaagcaggtccattgaagccgacggtggcgtcggatggatgcagcggcagcgaagacagtggcatgctgttttcatggagaaggtggaggtgactgctggatgcggtgccgttggggatctgatgcagatttccttttttttctctattcttggttcttctatgttcttggtacttgctagttcatacaggtgaattaaaatcatttatttttttccctgattggagggatgctatcttttctctgacaaatgtaaaaattagttctttcatctgaattgagagcaattcttttttttttcagattgctgagatgtctcttctttcggcagtgcaaatattcgatttattttgccttttttttctgtcatagatgtctcctgtatgtgttttttcatattgctgagatgttcttctttcggcagtgcaaaaattcaatttattttgccccttttttctgtcatagatgtttcctgtacgtgctgtactagtagtattaattaatggatatagatagcggcagtgttgaccttaatgagggtactttggtattttcactttcgtcctacctcgggaatccaggaatcgatattttccgggacggagggagtacgtaatagacttttcactttacatgttcgtacttaatttctatcttcattccatctcaaaacagaccttcgtcagagagattattacccatcttatttatactaccatcttattaaggaatccatttatattaccatcttatttaaatgtagtagaaatattttgaaagtagtataaatatgaagaggtatagttgtaaaagaaatatgaatataaatgggtaaaattgtaatgtaacctagtacagttaaggtaaagtagtagaaatatgaaggggtataattgtaaaagaaatatgaatacggatgggtaaaattgtaacctagcactcaaacaacattcttgtaaaccaatcatcattggaggggccaccaccgccagcggcgacggcttccttttcctccgcaattccatttatttcttcatgaaatatatctgcacaactgccgctttcacgagaattcatttaaataatacattcagatcgacttgaaaggagagctgatagcatctgattagtctattataccatgaatcaaaatttttctactgtattaaccagaaaccatgcaactataaaatcatgaatcattactactcaacacattgtgcagtagaagtaggcgttaagaagccgaaagaagatcggcgacgtagtgcacgtctatgttgaggaagcattgatcgcagcagtccaaccttctccgtctcgtgtgtttgccttgccgtgctctcacgtcgatcagcaccgcaaaccagcggcgtctctaccgatatctacacgtctaaaggcggaatgccacgcgcggatgtgctagcgcccgcgtgtggctagggtttggctcgggagaggacggctagagtttcttgtgggacaccagtcacatcacctcaagaatatataagtaactgggcctggagacacataagaatcatactcggatccctatccgaattaagtacatattggatcttcatccaattctcttatttcggcctattgagtgtgtgactccgtaggttcatgtacactctgctacaacatggaaactccttttcagtccacgtgtcaacagcggctcctagcagaacatacataaagatcatatcgattgaacctttatatacacttgtatgaaccccttcgcctcacgatatcgattaagctcaaggttaaatatgtaccatcctttaatagctcaatcattcattcgatcttttgatagattatttaacatgtaattgactactcaatcactttggcatggctatgtacttctataatctataacattgaggggcccagagatatctctccataggaggggcacatccatcttgattattctatcccactacatgtttcatagcatacccgaagactacttttataactactaaatcacggagtagcgtttggcagtcctaagtaagctactacatatattgggaatcataataatctcaggtctaaggatttacactaacactaaataagatcactgatggcacgtcatatatagcctctcatgttagatctatccaacaacatgttttccaacatgtgtccacattattaatttggtgcctccataccatgattcataagacatgatcattcaatacatgtgttgatcattaaaccatatttgttccacatatgatatttgattaaggattctttagaaatagcaacatacaacataaaaaggtcacatgaataaatcacatattcattaaccaataatgagttatctatttcaaagttataaatatagtatgtgatgcaatcatctctataattaattgtaaggcatatcagcaacaataacaagatcaacggatgcctatatataccgatcgtttgatgtagccagtccagatgccgtgtgtgatcatgccaaggtcaactgcttttgcgcttttaacttcagtactgttctggatttcgatattacggtcttgtttagatataaagtttggatccaaacttcagttcttttccattatatcaatatgtcatatacacacaacttttcagtcacattatctttaatttcaatcaaaatctaaactttatccaaactttacgcttaactaaacacaacttacatatggccatgcaactcactgtgaaaaacaaagagggagacataatggcgatgccaaaatgatcctcccatcgaggacacggcaccaagcattgcaagaccgctagggaaagagatggagaacgatcggagagtagaatataaggttatgataaaattaatcactgatttaataaaatgctgatacgtcatatcgattcttactggtagcttattttaatcaacctagcaagctggagtggtagtagtatattgcaaacaaaccgacctttcccgtgcaagccagaagcccagaaacagggaaggtaaattccctttctcatccgcataactagcagaagcacaacactagcagatatagatagattgattatagatagaacaaaagaaaccaaatgcgtctggactctggagtctggacgaccttagagaccaacaccacaaaggcaggaggactatattatatcttctgccggtggcatctagcgtaattatacaaacaagcgacgattgaagccagaggctacaaatgaagggatacatcgatctgcactgcactgtctaccatttaattacaagatggcacatcctttctgcgcctttttcttcttcttcttttgctttggaggctggagaaccaccttaatcgcagcatcgaaaactgccttgatgttctgcagttgcaaaggcaaagcagcagcaatcagtaaccatgccaccgcaatggagctcaacgcaacaagtccattttactcccttcaactatatcaccggatcagcattgattcaaaaatcaccggatcagcaatcaaacccctcaactatatttgggctcactattttttgtttctctttataaaagttgtatgttaagtttgtgggatgataaatcgtattacaccatatgtctcaacctttttatatatttaaaagatcactgtttgcacaagttgcaagcacctaacactgattaaacatggagatttaaaaccgcatgtcaattgtcatgaaaaaactgtaaacacaggtcctgttgccgtatgtggagaataaaaaagtgaaatggtattagggagtagagtcccttttactagtttaaggggtgaaccataaaaacctaggccctttggcaaaataatttgagggagtaaaatgaaccctttttcaaaaaagaagaataaaatgtagtacttgctgtgtttttgaactgcattcaatgtatgccgctgcaccaatgagtttcctcagctcttcgccctacattgattagcaaaataattttaatgacttgtgtaacaatgctgggaagcaacaaaaatacaagcaaactaagctttgaatacctgagcagtggaaataggtacagcaccagggtgatctacgaaaaattgcttatcatcccgcagatctattaacagtaacttaatggttaagcaccgccggattacatcaagtacgcaagtgattaataaaagcacaatgaacagaaaagcaaaagaatattgcatttacatgctgaggctaggacatgtttctgaaaactatattgtgtatgattgtatcaggagcaaagtacaacttgcaccaccaaagctgctacatcgaacctgatttctaactccagtaatccaacttaagaacataatctaacaagagcccattttggtcagtgaggactaagtctctaaccacctaacttgcctctaaggccagtaagttgacaaggctgttagctgtacaggctttatctatttataacttgctgttagctgtacaggctttatctatttataacttgctccgctggagcagaaattcaatggtgaacatccattttgagcctttcaaatgttcgctagatgccattttaactgagcatgcagtatgaaaccgtgaataaatagcctacagaggatgtgttcccaggggacaatcctaaaagcccacctgccttgtgagatcaacagaatggaattctcatggtattcaatcatgcagtgtaaggtattggatcgggtcatatgtgcctttttattagcaacttagcatgaaaactagaaatgcagatttatcaacatttagcatttgctgaaggaacaagacaaaatatatttcagaggaattttcttttcttgatcataaatcaataagtgatatgtacaggaccaactggagtataggtcacaggcttaactttggagactagtaaagacccatttgcagggcaggatcgtcaaggtctcaatgaaatacaaacaaaaccattgcatgctcatttgtctctcaaactagctatgatactcaactgtcatagcatgtgaaatgttgctgaggtaatggttaacaatcaagcaaaaaaagaaagcattaatttcaaacattcttagataatggaaatgatttacatctccagctttctaccataagacagccataagtttgttcaaaacaggaaaatgagccataaggtgatgggacaaacccaggcccgtcaacgagggcgtgccaacggagcgtcagcgcagggccccacaaaaatttggggcccccaaatcagagagaccagtacaaccagccagccttagcatatacaactgatgtcatgtgtgtgttcatgtgcatgcatgcgaaccagcttctgaatccttgatcaatggttacgatgcccagagcagctggccgactacctcgtctatcatattagagtttctaatactgaattgttgatactcaattgttgaattgcatgcatgtaatgatcaattgaatatttcagtactcttcttttcaaatcaaattaccatgaatataattacgaatttaaattaaggaccgaatcaaaagtaaatttaggatctcaaattatatttcgctccggggcccccaattcctggagacggccctggacaaacccttaactctcctttattattgactagcattaaaccacatagattttttatccagcaattctaatggaactatgccacccatagtggaataagagactcttagctaccgattccccacaaaatctaaatttgaaaaaaaaaaacattcagcgttagtctaaggatgtcacccaccaaaaaacaaacattcttgatataatgcatgtcctgcaatcctgagggacaccaggtcaccaagcatctacaaatgtcccctgatagcatataacacttcatgtgttacaggtaacatgtttcaaggtataatgccatatattcagtcaaaacactgctgggcagcaatcatgctatcgtcgaattcaaatatcttgtcttccatgaaaccatgttcacatagatttccacatgcaaatattttacatttaaatatgattttcagatatcataagcatatggctttgctgtgaataacagtaaaattgaatttacatatacaaacatgctttcatagagtgttcacagcacacaagcactcaaatgatgagacaatttataggaagacagcaatcaccactcagttaagtgcaacgccaagctgctggtaagtgggagtgaaaatataatagcttaattctacagatatgtgatgctttgcacaaatgctatgcaacaagagttggaagggcataccaagctttgttccaacgagaattattggcacaccaggagcataatgccttaattcaggtatccactgacaacagaaatatatatgtgtcagtgcaagataacaggttgactaagctaaggtacttcatggagagagagcaaagaaagtgggcggcaagattttattgcctttttagaaacattctcatagcttgctttgctgatcagagaaaaggccagcaggaaaacatcagcgccacgatagctcaacgggcgtagcctattgtagtcctcttgtcctgttaaatttgtcaaatttttatttattttgatgaccgtgaaaggtggatgtatataaggaggtttacgcatgcatccattaaaaggaggggaaagtagaacctgctgtatcccacaaccccaagttcacagtgctcccatcgaccacaacatttgcactgaagttatcaaaaacagttggaacatagtcctgtaacatagagatgaagaaatgtcccattaaacatacagtctgccaattaaaaatgcaaagatgcaatacattagatttattttttcgcacaaaacgaaaaggggtagctgagttactgacggtgattgacagaggtcacggttagaatgatacagagctaaaacaaattcaccaacaaagagaaacgtctagaggtcaatggtggcgattagctacggaatgatggagccacggttagtaatagcagacaaaaagtcagacataccgcaacatatatttatgagtttattatttactcctgatagtaatacaacaaaatctggaggtgaagctaaagagtgtatatttagatctgtataaggagtgaatgttggcagctgagaaatcggcaatactatcctaattcctatacctggagaagaaggcacctggatcccgcagagagaaggacgcgtatagaagaataacgttatcataatcatcagtccccaaattttagcaagcaaaaagggaaggaaagctgatctatgtcttctctacacccagtccccagtccccagtcccaagacaagaaaaagaatgtttaccatggagtcgatcagatgcatactcgggcgggcaggaaggatcgagaagaagaaggggggaaagaacggattgcctaccgtggggaaggtgttggaggtgtaggagatgagcatgcaggtcttgcccacggcgccgtcccccacggtgacgcacttgatgaaccgagacgcgctcatctctactctcactcagcacagccagcgcatccggtaccctagatcccgccctcttcttcctcctcagtcctcactccaacgccacggacctcacctcagctgctgcttgctggtgggggtaggaactaggaaggcgaaccagaaccagaagcagaagcagaagcaaaagccgacagacactgagttgcactcaggtccaacaaaaactccactattacattaccttcctttcatccctactagtactagtagaataagataaaacattttgcagagaagcccctattcgatgaacatggtgtgatggcgatcataataacaacaattttcgaccctatttttttattattacatttatactatacgagcctagagaagtaagaatgattgagggattattatttcttcaaaaacatatttttttaataatatatttcattcctaagaaactataaccaattattacagaggtcgtacgatgaatggatatgaattacaaaatcacgggttgattaaaacataagaaagctatttaaaataccaccttaaagattgaggtttttcatctatggttgatgagaatctacataatcattgtttcttcaaaatgacatacattttgtatgattttttttattaggggttacaatctattaacatatcaaaataataaaaaaagagtctccatgttcgctctcacggcctaaaaattctcatattaataaaaaaaataaaaaacgagtccatatagaaatacaatttaaatagctaaaattagaaattaaaaaaatattggaagaagagtccataaaggaatacgatttagacttaattgaaatttaaaatttaaaaaataaaagtatagtcaaagtccatatagaaatacattttagaaataaataaaattaaaaattaaggaatatgggaagaagagtctagagtccatataggaatacaatttagagataattaaaattcataaagtttagagttcataaaggaatttaaaagaattgaaagttggaattaaaaataagaaaaaagtaaaagtagagtttacagtccatgtagaaatacactttagaaagagtttagaaataactgaaatttggaatttaaaaataagaaatattagaagaagagtttagagaccatataggaatacaatttataaataactaaaatttaaaatttaaaataaggcatattgaaacaatattatagagtttatatagaaatataatttacaaataacaaaaatttgaaactaaaaaaatattcaaataggagtaaataatggaacttcgaattaaaaaataaagaatattggaagaggaattcatagtccatatagaaatacaattcaaaataactaaaattcagaattaaaaaaataattgataactatcacgtgtatacaatacaatataaaaattatatattggttagtttgttctacttagtacataatttcaaattatgttgccattctaataataatatatgaaaatatatatgttatttatgtgagaaaatataacagtgctagccgagcaatctgtgcgggccaccatgctagttcagaacaaaatgactatactaacattgttttccaaaaaaacaacatcttgataatcaataggtgatcattatgtcgatcgatgagcatatatctgttaacgtcaaaattggtaaaatccaaagttatcattcgcctagaggaagtatcggcttcatatacctaaaatgggtcgatggatattatcagcctccaatagttggattttttatggattcagttaaggaaattaattaattaaaagaaggttatccagaagaggccgagtttaaggaggatgcggtatgttaatttatctattaattgagcatagtcagttagttttctttttatttcgaggaaagtgtgtttagtatcttttctttatctttaagaaatattgcgtcatgtcaaattaggactcttatcggcctatgggtataactatgtacaccctggatccctgtaatctatctccacaaatattctcagtgcatagctgccctcttttgcaaggttattatcaccaacagaacttggcacctgacgcggggctacatcggcttcgatctctggcgaagaggtaaaccctaagtttcattagccctggtcttgtcttagtcgatatatctctacaatcacaatatgattttaaatagatttgttatatctatcacattagatagattcatcgacttattgagtattaaattatcatgtacaatctcgtgctgcatcggttagttctaacctactagattggtaccgataatctaaatcttgttaagcaaataggtgcatgctaatgtttcatcagaggtttagtcgatcttatctgatgtattaaatttctctttgatggtttttctatcttagttaaatttaatgcatgacaaatttgatcggtatcatctcggcttgtttaaatctattaggcaattatcaatcttatgctgcatcggttaggctcgacctatgaggttgttgttgtaagttatatttatttaagtcagtaggcatcaatcattgtttcatcggggtttcagccgatgagttatttggacattgtttaagtgttctatcggcttatagagattatatacaagttggttttagctgattgcaacaaaagtttcattgattacttaatcatttggatttaatgacatcgggttttcagccgatatatactttaaccatcggattagtatttattcaatcatactattattggtccattggtttttattgaattatattgttgtattattataagttcactgcttgtccaattatctttgtatcatttattcaagtatcagaatctatatcggacatatagctgattgttcaaaactctatcgatatcggctattaccgctacatcggcttattggccaatcgactctttgatcatcgatttatctattttatcatttgcagaatcaaactggctagcacgctcgcatctcatcaataatttaggacctgcactaaaactaagcagatctacatacattaatgttttcagcatcaacaatatcatcggcagtaactaatgtcgaatgaaagcggaagatgacatagaagagtaacttagctataaacagtcatccacccagatttgacataaaacccagtaaaccaatctgataaaaacgcagccaccaagagtatcgcaccaacataaaacctccgatgccattactattccgcccatctgaaactaagttttcaccaggaggatctatcagcatcacctccaagaaggcgtgtggtgcccacggacatcaccgatgtcgatgctcatagcaacgacgacttcagttgcagatttacggtgatttgtgctcgacctcctcctaggctttgagtgacagcagcgacggtgacgggaggtggcttgcaacgggaaggaaggtggcgagttgcgcgcgccggcggcaccttggcccaccatcttcaccagttcgatcggagaggtttacagcagcaatggggtagggcgaatgtgctgattcgaagctcccgtagcccgatggcaactacttgagcaacggtgttgagagcacgccccctagctaggatcgccagaagctggatccggccataaccaggtcgtcgaaaaatacagatagctaagctaattgctatgataagatctttagataggttaccgaacaatatacaaattaatcttgatgcacgcatgtatatatatattgctgttggacacttggtttaattttgaggagcattatattgctggttatagatgctatatatcgtccttgcttagcaatatatcgtgagtaataattgagatgggaaactattaactagtgtttgttggattggttctcgatcgatctgcagagaagcggaggtctattttgatcgatccgagactgagactctgccatgggccatggatattggaaaattaaaattagtaacaaattaaaagatgctatagccattcgacgttatattgttgttgtacataagttgagttgagttgaggccatacatgcagtgcagggatggtgtggtggataagataagatagtgtgatcgatatgatgctagtggaaatagctagctagttgacgcgcctgcagttggctcggacctcgccggcgacgttgttgagggagctcatccgtagcatggagtcgacgaagtcacggaagaaggcgggctgcgacgcggcgtagagcgtgacctgggcgcgcgtcttggggtgggtgagcagcgcctcgtcggaggagagaaggccacggccggagagcagcatccgatagtagaagttgtcgaaggcggaggaggtggggtcgagggaggagccggcagacctggcggtgttgttgggtgggcaggagcggcggagggtggcggcgaaggaggggtgaagcgcggggtcgacgccctgcggctggatgcggttctggaaggaggagcagtgtgcgaagccaagcgtgtgaccccccgacagcaccaccaggtccttggtcgacatcccgcgcccgtggaacgcctgcttcagctggtcgaagctcgccgtcggccccggtagcgccgtcgtcgtctcgctcgccagcgacacgcgcccgtcacgacgacccaccggcacttgccaagaaggaccaccggactgcatgcagtacgtacgtacgtttagtactccatctcatctagctatatattgatatactcctgtatttactacttaatttgattgagggccggccggattaccatggcgactgcgtccctggcggccagcgcgaggatgtcagcgcaggagacgacgccggggcagagggcttcgacggcggccttggcgttgtcgatgacgtagaaggcgtgcagcgacgcgttgggtgggccgtccttctccgccgacatgttccccgacgagtccaaaagcacggaaccgtcgcacccctgcagctagctagcagcttccttcattgatgttaatatatatatattcgaattcgatagagtagctagctagttaccctgacgaagcagtcgtggaaatgcaggcggagcaggccggccggcaccgtgcggtctttggccatggcctgcttcaccgccgccgccaccgccgcctccgccttggggcagctcttggcgtagtagtccaggctcagcgcctcgccgccacccaccagcatcgtcatagtcatcaccacaacgattagcagctgtaccagatccagatgggactgggacgacgccattgctgatgccattgcctgctgctgctctgcatcgatcgatccgtcttagagctaccgtgctgctaattaagctatgtatgtatgtatacctcgttcgtacccactctgctttggctttggagctagctagattattagacaagaataatactatatggtactggaaataataattattaattgtacgtatgtagtatgtatagcaccagcagcatgcggctggtagtggcgatcgagaagagagagctggataatactacattcattcatgactaattctcactgcattgcatgcgctttacaatacagacagagacagacggacggacagacggacagatcatctatctctatacttactcttggcctggcatgctcgcactgcagaatgctcctggcgtagtactactagcttagctgtgttgcattggaaagtgtttgcgatgcacagaaagaaatggagaaattactacccccaccccactcgatattggatccactagagctagaaagaagaaagaaagatgccatacgcacgcatgcatacaaacgcatcgcatgcagccaaggcacgtgccctctgtctctgcgtgctgcacatgctggcatgcactttgctactcctcactctcactcatgggctcatggcagtggcaggcaagcagcatgcagttggtactggaccagtgcaaccatttccaataggattatcatacattaccaaccggctggccatgcatccttgtccaccgtgacccttttttgtgtttcatttgtccatcaattaattcaaacacagcggccgtgcaaatgcaatgcctctctatctgttcgttatatcctagtacattactgtacaatttgttcggtcaaatctacgtcattaaacacatctgtctagatatctgaggcaaccgattccacttgtaccttcgttgctactcgtatctctcttcattcttactctgctagctagctagaaccaattaagcccggattaaccatccattaattctacaggcagcccacctcaaattggcttcgattgaagtcatttctatcaagtgtggctcggcccaattgtccttcatacttgccaagcttagcccactgcgcctttgttacccatccgccgagccaccttataccgaatcaggggtaatttcttattcgacccttttctaaattctatcttaaaattgacgtacactaatttttaaaactcatcaacatacaaatactcccccgtctcatcaacatacaaatgtgtcacatcatcacccattagcaattactcccccgtctcaaaatataacaactttagccctcaagatttgtcccaaaatataacttctctatcaacattctcttcccaaccaatcacaactctctaccatttactttttctacctacctccactactcaacaaatcacaacactgcatcattcacttctacctagtagtactttcttaataaccgtgtccacctctaaaaatatttatattatgggacagatgtagtattatttagaatattttaaatcacatgcaagtgtatcacatcatcacttactagaaattattatctagaatattttaaatatcatgcaaacaaaacataccatttatatttttattgtatttttagaactcaatatgcaaacaaatatcaaatcattatctccacatcattttcacattatttaaatatatacatctaccatttctataatatatacttcatctgtcccaaaatataaactttttgctctcaggatttgtcctaaaatataacaacttctccatcaacattctcttctcaaccaatcacaaccctccaccatttacttttcccacctacctccactacttatccaatcacaacccttcaccatttatttttatctactttcttaataatcacgtccaactctaaaacttcttatattctagaacggagggagtaacatgaattaattcatcacatattccgtagcaaagcgtgtggtatcaactagttttagctaccaatctaaccttactattttgagtttgcttaagactgaccatattccataaaggcaagataacatcgttaactaaaggtaaattgccatttttgctcttagtcatatcaccctgttatatgaaagatttgtttatttggaaacttttgacatatttataacaaatttggcataactttgaaagacttaagacaagtttggcatatttagcttcatttttgtcaaatttgacttcaattgatgcttgcctggccaagccagcaggggttttgcttgtttggtttgccatttccgcccgacaggaaaaggtgttgttgggtttcagattattattgctcacaagtgttaattggcaagcttatacggttgtgctgttgagggctatgtcagggttatgaataccacatacctaatagtagtcgactacatctcggcagggcccaccacataccatgtcctatacgaaaacaacctgcggatatggagagagttccggataaagaaagacaaccagagttctacatggaaacgaccaggactactcggattgtatccatattggtttccctagttctacttggacaaggggacacctataggtataaatacaagaccccctaaaaagagaggggagacaagacaatcgacagacgatcaacacgatcgagacccaccacaatcaacaaccaacacaatacacgagacaacatacaagccaacgtatgccaagacacgccgccggatatcaacttcagggataggcatggctattcccctacggtgtctccggataccgtcaggagagacgaaagcgcttgtggagattatggttaccccatatctacatggcggttatattccagctggatatacggtaccaaatatagatagaatatctttatgaggactcgggttaggttctaaacttgtatgtcaagaaaatacccgggatcctagtcggttacgattgtattttatctgtaattccatattccgttaggatatggattgtactttgtattacggatcccttcccctatataaggagggtccgtgtacctcttggggcacgatttcttttctcccaatcatacaatcaataacacactcggcggaatcatccccggacaggagtagggtattacttcttgaataagaaggcctgaacctgtataaaattccttgtctccaaacccatccacttttctagcttgatagccaccccttttattattgccgaaatcttgtttcgacagttagcgcgccaggtaggggcagcgtcaagttctcgccgactaagtgcgatgggtttcgtttctggcatcgacgacttcgccttccctcccgggcaggcgttcaggttcggcagcctcaacttcatcaccaacgacttcggcaagatctctctccttgactcggattcaaaccagttggggagagaccaggtccccatgcgagagagctcattaggcaacaagacgtcgacgggacagcggtctttcgcacctcccagcagaacgcggttgcagcaatcactctcctcgacaccctcctcaaggaagacgcactcaaccaagccgatcatgttgtcaacatcttgaaccagacgaagaccatgatcgctgccttggttccagccaactccgcaagcacccgcaccccgactggtagccgagtccctcacttccgatcccatgatcatcattagtcaagcctcagaatcaccggtacaggatctactcgcaggagcaggggtcacgacgaacgacctgttcactcgcctcccgaacgtcacagggagcgccgagctgaacggcctcgctctccacctcgccagcgtcccgttgaccttcgcgacacgatcaaccagcaccgtgcagcacgaggtcaccgccattcaccaaatcgctacgacgacgacgtggatggagtagctgccttcactagtgacctgcgtcgagtggattggccagccggctttaagccgactagaatcgagaagtatgacggcaccactaatccagagtcttggctcaccgtctacggactcgcaatccgcgcagcaggaggagacagcaaggccatggcaaactatctacatgtggccctagcggactccgcccgatcctggctccacggactaccccgtggcacgatcggatcatgagcggaacttcgtgatcacttcatcgccaacttccagggcacctttgaacgccccggcacacagtttgacctctacaacgtcgttcagaagtctggagaatcccttcgagattacatccgacgcttctccgaacaacgcaacaaaatctccgacatcaccgacgacgtcatcatcgccgccttcactaaaggcattcgccacgaggatctagtcggcaagttcggacgtaaacctcccaggacggttaagcagatgttcgaaaaagccaacgagtatgccaaagccgaagatgttatcaccgcgtccaaacagtcgggcaccacttggaagccaaagaaggacacgccgaccgcaggggggagtggaagtaacaaccacaaggatcgcaagcgtaagcccgaagaacttgtggcgaccacctctccatcttcccgacaacatccccgcgtcaacaccttcgacaagataatgaactcccaatgtccgcatcatcccaactccaaccacgtggccaaagattgcttcatctacaaacagttcgcagagcaatacgttaaaaacgcacggaaacctgcagacggagatcagggcacatcaaagaagaaagatgatgaaaacgatgccccgactgattttcaagatcatcgcaaagaacttaaccacatcttcggcggacccctggcttatgagtctaagagaaaacagaagctaacagaacgggagatcaatgcggtccagcctaacatgccccaatatcttcggtggtcagagacagcaattaagttcgaccgctcggatcatcccgaccgagtggtccacccggggcggtaccccctggtactagacccagtggttcgcaatgtcaagctccgacggactctcatcgatggtggcagcgctctcaacatcctttttgctaagaccctggacgatatgcagattcctcgcacggaattaaagccgagtaatacacccttccatggtgttattccaggattgtcagctacaccactcggccagatcactcttcgagttaccttcggcactcgggagaattttcgcacagaaaatgtttgtttcgaagtcgctgatttcgagacagcatatcatgctatactcggacgaccggctctagccaagttcatggccgtcccgcactacacctacatgatgatgaagatgcctggtcctcgagggatcatatcactacggagcgacatcaagcaagccgtcacatgtgacaaagaaagttgcgagatggctcaaacccacgagaccactctcgcccacgaagagatccgactggctgcgaccacggcaagcgagggagaagtgcctgcaaccaagctgacaaagaccgaagaaagtgatgccaagacgaaaaagattcccttagatccctccgatcctgacaagactactgtaataggcgctgagttagattgtaaataggaaagcgcgctcatcacctttcttcagaataataaagatatttttgcgtggaaaccatccgatatgcctggtatccccagagaggtgattgagcactctttacatgttaaggaagacgccaaacccatcaagcaacgactccgccgttttgcacaggacatgaaggatgcaattaaggaggaattaaccaagctattagcagcaggcttcattaaggaagtccttcatcccgactggctggctaacccagtcctggttcggaaaaagacggggcaatggcgcatgtgtgtcgattatacggacctcaacaaatcttgtcccaaagacccttttgggttacctcgtattgaccaggtggttgattcaacggccggctgcgagttactcagcttcttggactgttactcgggatatcattagatccgactaaaagaatccgactgcttgaagacctcatttattacgccctttggggcctactactacatcaccatgccctttggattgaagaacgcaggagcaacctatcaacgcataattcaaaggtgtttttcaactcagatcggtcgcaatgtcgaagcatatgtggatgatgtagtcgtcaagaccaagcagaaggatgacctgattgcggatttggaagaaaattttgcaagcattcgagctttcaagatgaaactaaacccggaaaagtgcatcttcggagtaccgtcagggaagttgcttggatttatcgtatctcagagaggcatacaggccaacccggagaaaatcaacgccatcctcaacatgaaaccgccaaactcccaaaaagacgtccaaaagctgactggttgcatggcggcgctcagccggttcgtctcacgactcggcgagcgggggatgcccttcttcaagctgctaaagaaaactgacaatttccagtggggatccgaagcacaaaaagccttcgaagacttcaagaaatctctcaccactccaccagttttggcctcgccacatccacaagagccgctactgttgtatgtgtcggcgacctcccaagttgtgagtacggtcctggttgtcgagcgtgaagaggaaggccatattcaaaaagtccaacgaccaatttattttgtcagcgaggttttagccgactccaagacaaggtatcctcaggttcaaaagttattatatggtgtcttaattaccgtcaggaaattatctcactattttcaaagtcacccggtcacggtagtcacatcgtttccactcggggatatacttcacaatcgcgaagcaaatggacggattgcgaagtgggccttagaattgatgtctttggacatatctttcaaaccacgaacttcgatcaagtcacaagctttagctgatttccttgctgagtggaccgagtgccaagaagacatgccagaggaaaagatggaatattggaccatgcattttgatgggtcgaagaggcttacaggcactagagctggggtcgtcttaatttccccgactggagaaagattgagctacgtattgtggatacatttttctgcgtcccataacgtggcggaatacgaggcgctactccatggattaaggattgcaatttctttaggcattcgccgattaatcgtccgtggagactcccagttggttgttaatcaagtcatgaaagagtgatcatgtctagatgataatatgaccgcttaccgacaagaggtacgcaagctggaagataaattcgatggactcgagctcacccatgtccttcgacataacaatgaggcagccgacagactggccaattttggttcaaaacgggaagcagccccttctgatgtgttcgttgagcatctttatgaaccaaccgtgcccataaaagaagcaattgaagccatggatactcaaggcgtaagcgtgattgaagccgactggagaaaacctctcataaaatttttaaccaaacaagaactccctcaagacaaaaatgaagccgagcggatttccagacgcagcagactttacattattcatgaagctgaactgtacaagaaaagtccatcaggaatactgcagcgctgcgtatctttggaggaagggagacaattgttgaaggatatacattctggtatttgtggtaatcatgctgctgcacggaccattgtcggcaaagcttaccggcaaggttttttctggcctacagctgtgtccgatgcggacaagattgtgcggacatgcgaaggttgtcaattttttgccagacaaactcatttgccagcccaagagttgcaaaccatcccgttgtcctggccgttcgcggtctgggggcttgacatggtcggcccgtttaaaagggcagttggcggttacacgcatctctttgtggctatcgacaaattctccaaatggattgaggctaaaccggtcatcacgatcacagcagataaagctagagattttttcatcaatattgtgcatcggtttggggtacctaatcggatcatcactgataatggcactcaattcactggcggagcatttaaagacttttgtgaatacttcggcatcaaaatttgttatgcctccgtggcacaacccatgagtaacgaacaagttgagcgcgctaacggcatgatactgcaagggatcaaagcacgagtttttgaccgactacgtccctatgctggcaagtgggtagatcagctgccgtccgtactttggtctttacgcactactcctagtcgggctaccggccagtcgccgttctttttggtttatggtgcagaagcaatgttgctaagtgaagtggaatttgaatcactacgatttcggaacttcaacgaggagagccatgaagagggccgagtagacgacatcaaccgactagaagaagcccgagaagcagctttaattcaatcgactcgatatttgcaagggttgcgtcgttatcataattgaaatgttcgatcacgagcctttttagtcggtgacctggttctgaggaaaattcaaacaacacaggatcggcataaattatctcccttatgggaaggaccgttcataattgctgaagtcactcggccgggttcttatcgactcaagcgcgaagatggtactatcatcaacaattcttggaatattgaacaccttcgtcgattttacgcttaggcatttcgtttgtatctttcctctttgactgctaacttcaagtttttcctcgaagttttcagtcagggggctactataataataatggagtgtgatttttatcaattcaatttacttacttgatgtatcattgccctgtttgatttcttggcttagttaatgaggactgaaagttttttaacaacttttgcaggtttaggctcaacaaggtttgacaaaaacttttaagaaatcaggagctaagttaagatatcaagcacagcataaattcatcagtattgtacaaattgtgcctccatcatcattaatcatcaaaattatcggtacattaatcagtattagtcttttcatcatcagaattatcaggaccagtcggtcgaagatcagtgtcctgaaatctctcaactacatcagcagcaattttgtcagccgctttctgcgcatcactgatgaggtcaagagcagcttcttcgctcgtcccgtccgcaaagccatcaatggcatcaacgtcaactctcggataaagggatttggtcatcgccaacgccatacttgctcccatacttccagcttctttgatgttcttgaaatatgtatccgaagcaactctcagcttgtcgaaaatttcaaaagcatcaagtgcactcgggccgttgttattgaagaacatcgcttgaacaattggggcagcagcgttagcaacctcatcccgggctccttcaagttttttgatcttgccaactaggacatcaaattgagcttgagatttgatcttgcggtttgcatcaacagattcacattaataagtcagcatatggaggataatggctttttgaggtattgattgttgataccttcaacttcctttaaagccaggtctctctgtcttgccagctctgccttgtcattttccagagtttggatctgcttctctagttgagatatcttggcagcttgcactacattaacttcggttaatcaggataacagagataacagcacaaatcagttgggcagagtttgcgcaaaccttttgatgagccacttagttcaaaattggattcctagagctcagcaattcgattcctcatatcatgctcattttttctggcaagctcttttgtctcgtgcagcagactcctggtggcttcgagggtcccgagatgagggactagcctctctaaggttgccgttttagcttcgttcctaagatgaatcctctgcaagacagtttaattagcgcctagattaaatggcaaacgagatggttgagatcaggcgccaaagagcttacatttacaatgcgggtggcttggctgagtgcctttttcagcaagcatacctcctcgtcctctttttgcttatttattacgattccttgaggctgcatgttgtcatcccaccacttgaccagaatcggagggcgtgaatcctcagctgcttgtatgcggggaatttcttcttcgtcactgatcattggccctaatgtatccactgacagaggttagacgattgatcagagttatttgggtcgacatagtctcaaacaaagtgttttacctgtaatgatttctggacgaggatgagtggactcggatgcttttaaaggagatctagatctccggtcattgctggcgtcttgtccgtgagggttgtctgcttgggtttcgacttctggaatctcttcgtttacccctgcatccgactggtttccagtcgggggctcctggccagcaccgacttcagcttcggccggctggttcccagtcgggggctcgttgctgggttctacattgtcggttgctggctgattgtcactcggatgatccttagcagttggtccggtttctttggaagaacttgtgtccatgttagtcgggtcagagtctttcccagacgggtctatatcagatggtttcctgcaaatttgattatcagcattattgccgcaatgggtgtgcatcaatacaagagggatcgttatatgagttgcacctggaagacttcctgatctttggcgcggagcgactggatgttttcttccttggagtagtctgttttggtagtttcttggtcgtctctcggtcttcaggcctcctggtggcatcatctgctttgtcgtcgcttataaccagtttcctctttcgagaatctgactggccgattggatcaaaagcacttggttgagtttcagaccgaattcttggtcctccgctcccttgcgtagtttggtggcggggagatcggcgttgagcgattgggggatccgacttcatcaaagcaaattcctaggtgtaatatcctccattgttaactgattcaacaagaaaacaaaagcatacttttgaggaagattgagatgtttgagtgcataccggtggaggagggttgaatgcattgaatggcacaacgggcagcagatgtgaatagctgacaacaatagcgtttgagaagatcttgtacattctttctttcatgaccttaaagtcaagagaatctggatcttcccgatttggatcatgcttgccatcaaactcaaaagctgtgcgggatctctctttgattggagctagtcgacttttgatgaagtcccgagtgatctgttctccttgcaagccttggtccttcagttttagcatgcgttccatcaattccactgcctgagcagcttcatctcccataggcaatgagttccatgtgtcctggtaaactagaggaagacagcagtactcggggagtgcaggctcaggattctgaacatagaaccagtttgcatgccagcctttgtttgaggtcttgaagggcatggagaagtatttttggctcagtgttcccctgagctggaaaccagcacacccaactacgcatggtttgctcttatttggctggggcttgaggaaaaagatgcggcggaacaaggtgaaatgaggcctaatgcccaaaaaagcttcgcaggcgtggataaaattggcaatatgcactatggagtttgggttcaagtgatgcaagctaatcccgtagaagttcagaatcccccggaagaatctagaggttggaagagaaaatccgccatagaagaaatgagcaaataccacgatttcatgtgtgtcgggggtcgggaatgcttcgccgaacgccgggcgccacccgataatctccttcgctggaagaacgccgtgcgccaccatctccttcaggttatcttctgtcacatcggagggcgcccactaactctcgaagctttctctttcttccgccatgaatgtgaactggatggtttaatttggtccgagatatggctggagaggaatggggaatcggagcggtggacacggggagaaatttcgtgaagtttttgaggatggtttggagcagattgatgaaccctagcttcgtcggcatggttctatactgtagcacggagtgtggaatggcgagagtctcggcggggaagacgaagcgacgtttggacttcggtatttttagggtatcgggagtactaatgggcctaggcctgtacagtacttcagcccaattatgttttcagcgtggcccgttgtgatccctagggacttaggcgctttttgctttggcaatatgtgctcacaatgacacggcccgatgctgttaaaatcctttttaacacgattcaataattctttggaattattatgatgcacatgaaaaggtgcccgacagaaaggtgttataccatttttgtaagcttttttaggctacaagagctgttgggttaatttgagatgactggtttattagtagtcattctcctagcatgttatatgcttattttgattatggtaagggttatagcctaggctaataaacttcttaattaccatgatctttatcatatttgggggatcattttaagagtttcttactcggattcctaccaaatatatctatttttggaccttttgagtgtttatcactcggcccttcttgtatttttttgtccttggtatattcaagttgagaggcagtcggctgggtatcttactaagtaccatgcgtgctccgctataaaaccactcggttcttgactatatgtttagtttttcaactaatcacatagtcgggggctacacctaattaggtgcatctactcgatgcaccatgttttattttcgcccttcacagtcttttagcactcggcaagccggagcaagttgaattgaagcactcggattatttgtttcgagcagactattttggtcaactgcgaaggtcacgggggctactgtggagattatggttaccccatatctacatggcggttatattccagctggatatatggtaccaaatatagatagaatatctttatgaggactcgggttagattctaaacttgtatgttaagaaaatacccgggatcctagtcggttacgattgtattttatctgtaattccatattccgttaggatatggattgtactttgtattacggatcccttcccctatataaggagggtccgtgtgcctcttggggcacgatttcttttctcccaatcatacaatcaataacacactcggcggaatcatccccggacaggagtagggtattacttcttgaataagaaggcctgaacttgtataaaattccttgtctccaaacccatccactttcctagcttgatagccacccccttttattattgccgaaatcttgtttcgacagtgctatctctgatctcgccggacacggattcgaggaggaaggctaccatgttgtcaactacgagtcagacctttagactgtcatgtcgataacagttagataggctaccccacatattgtactggtgtgattatggtgaataaaaagaacctccggctccggccaataggatatagggttattacctaacaactcaggggcccaaacctgtataaaaatccctgtctccgtttcttttacctcagtctcgcgtatatcctagcactgacgatcctcatactatgcaaataccagaattacgacatcaaacgtcgacagtggcgcgccaggtaggggactttggtgcttcagggtttcgacgagatgggtttaagagatggattctccaataacaagctactcgacgacttcggctgtggagatctaacccgaccggaacatgtcttccgacgagatcggaaccatcatcgtcatcgacaacttggtctatcgagatcacccaagcctcaagatacgcggcgtaccaaaagatgtcagatcatatgatgtcgaaggagtacgcaataaggtaattggtagattggtttttcaaattgatctactaatttcgtagatatatccggcatatatctacaaaggtacgcaatattttatatacaatttatcgtacctattcagatctatacagtattgtcaggtctatactttattatgtttacctagaggatgtttcttatacaatatctatcgcgcgagtgtttccgacgttaaccaactacggtctaacgctgggggctcgctctgtttttcttctgtataaatcatgcttgtttacggtttatataatacctgatatttacatctactcgttatatcctgataatactagaagatccatgcagttttttgagtacatactcgatattatctgctatatattttgtcttctagaaaatattttttaggaacaattgagcacacgagtaggttgtcgtcgagtacactccattatcgagaacattctcgacaaatgcggagttatcgcacacaacctgccaacgaagaccgacgacctatctcatagcaccagccatggctggactactcgagaaaaggttgttaacggacaattcctcgcgaacgccgtcggcttgatcacccgacatgattgcgaacggacatccggatatgctacaagttgggtgtgtgattcatgctggccacatgatgtgcacatgtaacaaaccaactttagcgcccctataggtgattaagagactcctactcctagttctcgaaccagtaaaacgtagtgatctctcttgcctcacttcaagtggtcgagttacgactactacctggttctcgaccagcggtgtagcgtttctcccactactcccactttaagtcgtcgagttacgactactgcctggtcctccaccagcgatgtagcgtttctcccactactctcactttaagtggtcgagttacgactactgcctagtcctcgaccagcgatgtagcgtttctcccactactctcactttaagtggtcgagttatgactactgcctggtcctcgaccagcgatgtagcgtttctcccactactcccactttaagtggtcgagttacgactactgcctagtcctcgaccagcgatgtagcgtttctcccactacttccactttaagtagttgagttacgactactgcctagtcctcgaccagcgatgcagcgtttctcccactttttccacttctagtggtcgagttacgactactacctggttctccaccagcggtgtagcaactctcctactacctctatttcaacaaagttgacagcaggtacacagtatcgccaagtgttttacctagagatcccttaccacgacgacacctagcgttgaaacctatcttactgtccctttacgccgtcttgacaaggcctccgaggaacctaagggaacttcggctggggacgcccagagccgataaggctttgtcggatcctgtagagacaaaagaccatgtaagatcttgtcgtataagagttctcgccgtgcgtattaaccaagccatgtaatcggaaattgacttttccaacttcacggctgggggctaggatcagtgcttgttcaaccaaggcaggtcaagggtccaagagccttctcctccgagaacgattctctgatgacaaggctgggggctagggagagtgtatgactctacaaactgactgatcgaagtcggtaagagagaagacgctcgtacacaaaacattggttggtaaatttaattcattttcaattttccatacatattataacatgtcatcctttgagcgttcgctcgggggctatttctatttgatattcttttctgagtattgatttcaggaaaattctattcgacattatggaagactccatgtctctatggttctataccaagatcgactaaggcgagtacgacaaatgttgacaaggctccgtcgcagactctacgccttctcgatcgttcgagaacggttgctggatctcgacaaggaatacggaatgaagagatggtgtacctgccgagataaaatttcttgacttcaattcaaattctcgattacagcaagacggaagacttagtcgtacgctatgtacttccttggttgacatcggatattgactcagacaaaccctttaggtgcccgcacgaggctgacaaaggaagtctaaacgttatctctgaactcaccgagaacggtcacatgagctcgataacagttactccagggtctgcggttgagaatataaatacgttcatttgcattgaagtcgggggctactgtcagggttatggataccacatacctaatagtagtcgactacatctcggcaggacccaccacataccatgtcctatacagaaacaacctacggatatggagggagttccggataaagaaagacaaccagagttctacatggaaacgaccaggactactcggattgtatccatattggtttccctagttctacttggacaaggggacacctataggtataaatacaagaccccctaggaggagaggggagacaagacaatcgacagacgatcgacacgatcaacacggtcgacacgatcaacatgatcgagacccaccacaatcaacaaccaacacaatacacgagacaacatacaagccaacatacgccaagacacgccgccggatatcgacttcagggataggcatggctattcccctacggtgtctccggataccgtcaggagagacgaaagcgctatctctgatctcgccagacacgtattcgaggaggaaggctaccttgttgtcaactacaagtcagaccgtcagaccaccatgtcgacaacagttagataggctaccccacatattgtactggtgtgattatggtgaataaaaagcaactccggctctggccaacaggatgtagggttattacctgacaactcaggggcctgaacctgtataaaaatccctgtctccgtctcttttacctcagtctcgcgtatatcctagcaccgatgatccccataccatgcaaataccagaattgcgacatcaaacgtcgacagactagctagatgttaattggagagacaaatctcagcaaggcaacgtacccaaaatccatcttccgggtttctatatacaaattcccaaatggtatgaaagaaggggaaaaaaggaaaagataatggtatgaaagaaattcccaaatgtccaagcatgcccaaactaaatattagataatttcttccagccatatacagcagtactccaatcaacgattatttctccaagtgaccggctcctgtaaccaccagaagcctgacacacaccatgactggagatggcgcgcaagatgaacaaatggcgatactgctgatcaagacggcgccatggaacctgctgatagccaagatggtgcagtgatcaaggaagcacgtgcacgcgacaagaagaagcgcggcgataggaagaaactagagaagaagaaatggatggactacaacacaagggaggcatcaagacagcgtctcaaccaatagaccgacgtgggctacgagatatggttccaaatccccgagtccacgggccggcctgaatgggccaagtgactaggccttaagcatgccagacacgcgcgcgagagagaggatgcgtccgtagtacaaggataaaaccgtaaaaggttaaaaaggatagaacacagactagaattacgcggaggcattggtggcagtggctcgatcctattggatcgagagaaagttgtatgcatattcatctactcttccagttaattgagcgagtcccaagagatttctaacaatctagaatcagagctcgtcagtgtggaaacactcttggctcggttgtaaaattcatgatcaaggattggagatatgctctttcgagtatattccgcgaaaaggcaaattgccttgatctagttgactgagtccggaatgagggattcaggccttgattcgtcatctgcatctcacaaggaagcgatgatgacgcaggatttgagtctggatagcaagttcgatctgctcctgaaaacaactggggagaatgagaagaaaagggtggaggcagaggagagatcttgagcccacttcctggatatcaagagggtggaagagaagtctcaagttgacttccatgaactcaagaaggcggtcaaagtgaggcttcctcaagtggagaagtaggtgggaagttatgtgttggggggctttgagtaccaaggtcgaacacctagagggcaacatgctttgttaggatcagggagacaaggcgtctgccatggcagtcatgaagaaggagtacgacatggattcagcgttcttatagcccacacctctgatccatggtacgtgcaatctaagtcttaactccttgttccttttggcgtagattttagcagatcgtcaatcaagagtatctggaataccaattgggttggccggaagtgtccctcttatgacatgttcacagttcaacggtgacaacctgtagataggggtggacagaataagaccgagaccgagaaagtcggttagtagttcggtcttagctattgaaagaccgaaatttattcgggcaattcagtcattagcctcggttgaccgaagctcaataggccaagtaaaccaaaccctagaggcactcagccacagaggaaccgcactctccctgtctcccacaggccacaacgccgcgtcgccgcctcgcccatccatcgcgctcgagctcacgcagcgtggacccgcggtcacgtcgcctccgcctccatcacaccggcgctgcctccaccctccacctccatcgcgccgctgcgccacctccgccctccagccagcctgcctccacctcgccgccgcctccaacgacatcgagcccacctccgccttgatgccgccatcgcaccaccttcatctccagccagcgcgcctccgcctcggcgcctccatcccgccggccgcctccgtctccatatggcaggtctcggtgtcagcaggaatagggacaacaggagatggcaggattgcatctggtggagatcgacgggatccaatcatgaagcttgatttgccttttcattttttttctctctgaatctttttaatttgctagtcgcgtgtgcaaattctgagatgcttcatctatctattgatctattgagttgcttttttatttgtcgaccaaatatttgatgtttgttttttgtgattttttttgttttgaccacagatcatacatataatcaataaataacatcaacactttatatcaatatatactagcatatatctattagtccacatggccggcaggggtgaatccaaaggtgggtaccggaagggggtcaagccctccttccccgttggatccccatgcaggaggggagaggaagacaagtagggggttagctagaggagcaagaagaaaatgagctccctcaaagtaatcttggatcctttcctgatgaaaagaatacaatattaccattcatccactaatcatcaccttagacatgcaaaattatattgattagttttacttaggtctacatatatagtgaacggggacgaaggatcacttgtgtcccaccagacctgagatggggacttgttctgttgttcccccatttgatttttcatgaagaatcaacttaaccatccctatacgaatggaaaattttcccttgcgaaaacgtggaatagggctccattgacatctctatctttgctagtgaggcccaagtgcacatcaaaagaaggcactagttttttgacatgaatagcaagggtgcgtttggaagttaggttcacatcttctactctctctcgtttttccgcgcatctgtttttaaactgttaaacggtgtatttgttaaaaatatatatatatgaaagttgttgtaaaaataatatcaatctatttttcaaggattttgtaagttaatattcaattaatcatgtactattgagccaccccgttttccgtgtgtataaaggagagcttcccaacccctcctcgcaatacacaccctaagtgaagatttggggtcgtaaggtgagttttgatttggcatattagcaacacgtaaaacaatacaagctattagcgtagattaatcgagcatacaattttttgttaaaaattgtaccatttagaaagcgtgcagccccatcgtttggtatattagagaaaaaaaagcgaaacgctatatttacaaatgaaaaataattcgtgaataaaacttttatatacgtattcttaactatctaaaaggaaagggtgaaaaataaactacgatgaaaaaaccctaaaatcagctttaaatttaatgttaaaaatttaaattttaactgataagaataagtataaataaaaagacgagcagatgctggtgttaacgaaaacgtagcgttattgtttgcttactcttaattttaaaataaataaatctagtatataatataaatatgtacgaagatatttgtttgttttaagagcaagttggcttatagtttatattagagttaacatgtacagtaaatgagctataaggttatctccttttttctcctcctctctctatctctcacatatgcattttatgtatttatcttaaagtatgtgaatagctagctcttgtataagagccaacaaccctctcagttttttaaattctttttcctccacgtaaatttatagttgacttatagcctattattatacttggtgaggaagcctccgaatcgataaggcaggtaagtactgctccagtacgtaaagtccaccttattattggcaccatcgtcatccatccagcaagccaaccggaataactactactgctgctgctgttgcgttggagtaccaaaggaggaggaggaggaggaggaggaggaataatcttagagtctactagactcacacactagctttagcttagctaaaagaagaaaaagaaaagagaggcacaataataggttaggcatggcggagcagctgggcggcgtgggcagcccgcagctaagcctgagcagctgcagctccttcctttccatctccagcgccggtaccagcgccgccgatggtgctccccatctatccctcggcgtgggcggcgccgaggagctggatctgctgctgcaggtgggcataggcggtggcggtggcggcggcggcgacgaggaagaggaggagcgcaagaccatccggatgatgaagaacagggagtcggcgctgcgctccagggcaaggaagagggtaagaacctctaatccatttcctcatactatctagtatagtactagctactctattaattaatctctcggatggatagatggagtagtatttggttccacactagtactagttagctaattgcatgagcttaattatgtgcgcggatggatgtataggcgtatgtgcaggagctggagaaggaagttcgccggctggtgaatgagaatctcaagctcaagaggcactgcaaacaagttaacttcgtattcccttccctaatacttttattactaataagtcgattcatcactctacatttccaatccatcttttatgtatatatatgtatgtgcatagaatcctttgattttactacaggtatattgtaataataatgcactatatcctatgcagcttaagacggagatggctgctctgatccagcagcctaccaacaagcagagttcccaccgaagaagctcatccacttgatcagaacgcagcagcttaagcctttaattaattaagcataggcaaggtagcgggcagccattggattggggaccattatttaattgggttggctgtccagctccagcaagagtctctagcaagtaacaacaactcactctgatccgccggcttggctttccatgcattccggtagtacgtaagtactctattttgttactgtgtcgatcatccgctacacatggatgcatacatgcatgcttaattgtttgtgtcaccggctaacttttgcatacccttgtttgcttgcttgctgcaagacccaaattaatataaattgtatgagactcggattagctgctatcaattgctccatccgttccataaaaaaacgaatctataaccgaatgtggcatattctagtactatgaatctgaacatatgtatgttcagattcgtagtattagaatatatcacatccggtactaggttgactttttatgggatgtaatgagtatagtttcatgcacgcctgcacttgtgtgttgcctataaattcagttttgcatgcacttcaccaatgaattactgatcactttcttgggtacgcggtgatcatgtgtttggccatccatccaacgcatgccttgccttcgtgttcgtgcatatcccttctttctatgaagtagttaagaatagatcgtaagtgtttttttcataaaaaataaattatctgcgcatcatcgtcggtttcattgatctcaactcttacgtacaatgaatatagataggagtctgtctagattcgtcattcattatacatacgtttgttttttttttggacgttttgggacgggagaagtacggtggagaaagggtgtagcaacatgttgctcaataacggtgcgctgcttctgggaggaagattatatatgatgtcatgtggagaagaacagttttgctatacatatatatatgacgggtgtggctacatgcccctgccccttatacgcacggatctctcccttcctcctcccctctttctctttctgctatagtataccataaaaattttaaaaaagttgagaaaaatttatgcatagaaatactatatataaagaatatttgaattcaaattcaaatttaaatcagatatataaacttttaacttatatgtgtaaatttgaggtgtacaaactttaggtgtataaattacctaaattttgggtttctaaactttatatgtgtaaatttgaggtgtacaaactttaggtgtataaatttattaaaataggaaaataatatggtgatgaaaaaggaaaccacgtggcgagagggggacagcgccgtctttccgatatactccctctgttttttaatagatgacgccgttgacttttttctcacatgtttgaccattcgtcttatcaaaaaattttatgcaaatgtataagatataaatcacacttaaagtactatgagtgataaaacaactcataacaaaataaattgtaattacgtaaattttttgaataagacgaatggttaaacatgtgagaaaaagttaacggcgttatttattaaaaaacggaggtagtatggtgccacatttttctttaatcgttttttagatggtgatttaacaggctgatttgcgattagtttgccatgcttttcggattgggaggtttgcggtcagaataatccgtgcagtttgattctccgcgtgctatcttttttgtgtctttgcttaaaaaatgtgattttcttgaccatatgagaaaactacaatgtaggatttgagatttatattagtataatttaaaattattactgcaaatataacaaacttgtagttaagattatggaattcacagtataaatacacgttgaaaattttaaccgtcttttatgaagctgtgagattatgccatcgttaaaagtgcgctttgataaaacaccatcttataaatgggattcactaaaatgcaattctcaaacagtgttatgtactaaaataccatatgcctcttgcatggacgaaaatgtgcctacctttacttctctctcacctctggtgtgacaaggaaacaatggtggtggcgaggcacgctggtgagaagatagcagcctcttccagctcatatgctaggggcttcctatctcgcgagctcgtgccgggaggcaagtcgtgcgcaggggctccccccacccttatctgtctccacccctctattttctctctcatttatatcttttcctcggcccctcgatggcagtttgtggatggagtggtgacgataccaacggccaagttccttgcatcgggcgaacccctcctcctccctctagcaaacccttatttcttactccgttagggacaacacaagagtggagcgggctacgatgctatcaagacctaccaacaacgccccttcagcgagtccccttcctcctcccttcggccaggttagctctttcttcagtctccaccaccctaccccactgtcccgctgcccccggcctcgccggcgccaaaaggagtcaacagaccagggcgaccgtacctggccggcctcctccccctccccttcacctcgctttgcctccgccaccatgatcagcccactgcccgctactgaccttgcggctccgtggcgccgccgccgcctcatcgcccacccttgttcgccacccaccgccggtccgccgtctcccaagccatccctctagacccgatcccccacttctccctccccaataccaccctctcctttaccccacctcaccctaaccctaacccccctcacgcatggcttgttgtgacacggtcggaaaacgggtgccacttcctcgctcgcccgtgtgtgcgaattaggattcttgcctatgctgtcagcctcttttagctagctcacgcgccatctaaccttctcgagcaacaaagaccaatatgtgggccctacccttgcatgggactcgcatgtcatgatcaaatcaaatggggatccaccatgacacgccgcagatcagggttaaaatttagatatccgtagacgaaaaataatcgtcccattcttttcatgggacttgtatgtcaggaccaagtctgatggggatccaccatatatagcatgccaggttgatgcagggggcggatcagggtcggtttgaatcagcgatggcatccaagataagtttagccgtttagggacgctaaagatatactactatttcgtgagttgggagacatggataacacagactgcccacgtactttattaaaaaaaacattccaacctcaaaatcgagtctgtttatttcgatcggtacatatactcactcatctatccccacacatggggtcatggcgtatatgcgtgacacgggtgcatatgatttttaccctaaaaccaactgaatttcccatggcaattagatgcagatcatcgatcgatcgatcggtgcaatgtcaacccggccccgttctagctaggtcgatccagtccaaccagctagccattgcgtgccacacgtactcctcttaattaatttgttctatgcatggcgccatggatgatgttgtcgtcggagatgaagtagtatatagctagggtgggtggctatgatgatcggacgacgagggtgtggtggtgatgtgaatgttgggattccacctcctcatcctgcgatgcacatgcgcgctgtgctgctgaagcaccagcacggagccgcaggccgtgaagtcgtcggaggccagcacctccccgacggggcccagctccggacactcgtcctccagtagccctcccatgccgctcgtcatggccgccgccgccgagccgccgccgcccttccccaccacgaacagcgagtacgtccccaccatggcgctcaacgaattcaccatctccgcgccgttgctcacgtacctctccgtgtactccacctgtcccgccaacaccagcctcgcgtacacgtccgccatgaactcctcatccgccatcgcctcctcgtcctccaccgccacctccatggcgccctcaccgccatggctcttggtggtggctaataattgttcatcaatgccaatggtaatatcatcctgtcgcgctggaaggaatctcaccaccgtcacgctcacccacgggtgcgccgccagccgcgtcgcgtacgctaccgcctccctgtcgtccggcccgcccaggaacaccgccaccacctggttcttcaccacgtcttccgcgcccttgtcgccgcccccgccgaggcgccgttccaccaggaccccgacagtgcagggcaagcgctgcaggatccgctggttcagctgccgcctcccctctcgccggcacaccatgcgcccgtcgtaccgctgctccttgtggaagggcacgatcaccagcgacgcgcgcgagtcctccacgccgttgcgcacgtctgcgtccatggaccccaggctggagatggcggtcatctgccgcaccggcacgccggcgtcgtaggtgaaggtgttcaccgccgcggccacctgctcgatctcgcgggcataaccccactcgtcgtcgtcggcgtcggcgtcatggtacagatgggtgatggcgtacttgcgcgcggccataagctccaccaggtggaggaggtagacggccagcggcgcggtgcccttggaaagctccgcgagcgtcagcatggtgtggacgcccccggcgccgtggacgcagaccagcacgcggagctcgtggtcgaccttgaggtcctgaaggcagcgcgaccggtatcgggaggcggcgcgctgctgtcggacgatggccgcggcagccgggcctgccatgaaggtgttgaggatggaggagaggagcagcaccacctgcgccgtctggccccagatgccggcctggttgccgaagttgatggcgaggatgtcacagtagcccttgacgttgagcaggaagcccagcaccagcgactccctcgccgagatgcccagcatgcggcccgcgagcaccgtgccgcccaccttcccgactgcgccgagcagcgtcgtgaaggcgacggcgacggcgaactgcatggctgtgaagctgccgacggcggcgaagtcgagccttgcgccgatggccccgaagcagagcggcatgacgagctggtgcacgggataggtgaggcggtcgacgagcgtgcgcgccgtgggcccgtcgcgcggcatggcgaggccgatgaggaaggcggtcatggaggcgctgtagccgaacacctgctcgagcagcgagagggcgatgatgagcaggagcatggcgcagagctcgtacttgctgacgtagcggcggccgcgcttgagcctgttgagcagcctggcggccctggcggccgcgagcaccgccaggcacgccgtgaaggccatggacatgacgatggacatgtccgggaaggatggggtgggctggccgtcggggccgtaggcggtggtgccgacgaccatgatgctgaagacggagaggctagccatgtcgttggcgaaggcggcgccgatggcgagctggccggcctcggagccggtgagcttgagctcggtgacgatgcggatgaggaccggggaggcggtggtggtgaggacgagcatgaagagcgcggtggaggcgtagagcttctcgggcttgaaggggccctggccggggtggaggaggccgtagaagaagggccccgcgagggcggcgagcaggaggcagagccccgagccgccgcaggcgatggcgagggagcggcgcaggtggtggcggaggtaccggaggtccatctccaggccgatgaagaacatgaagatgatgcggacgaagtagatggtgtcgctgagcgcgctgccggcgtcctgcatgcccagaggacgcaggtccacggcgcggccgagcaccgtcggcccgaccaccacgccggcctgcactgccatgctcgcaatctcatatatatatatatatatatatatatatagcttccatctcgatctctctctctctctctgctggaaatttaattatcaatccaatccaatccgcatgcatatatatatatatataccaggatgtgcgagattatgcttggctgcccaacgcgtcgaagcgcgcaatggaagatgccggagagcgccaggacggtcgccatgaggccggtcacggccatcacgccggccatgaagtaggtgccgtcgttcacctcgtcggagcacttggcaccgtcacctgccatgctcgtcgccggcccgccggaccgatcgatcagcacgctacctacctacctacctatagcgggctatcctatatatagcctgccttatatttatcagttaaaatttgaattatcaactttaaatttgaagctaaatttgagggggtttttttgaattttatttttcagtctttacttttagaacgctaataacacgtatctaaaagttttattgataaattactttttatttgtaaatataccgttttgcttaatccccttaaattgcattcctagcttccatccctttcgtcaacccaatctaggattcactatagccaacataattgtgtacgtgactgtaggtttactggtgctcaagttaagatacacagttgtaatcgactatgcagaaataagatatcaagggtcctaatgaattttacctatgaaaccctctaactcatgggaaggataggaaattttttttcattgaaaactttcgttacctttacgttgttcgtttcatgaaatgttattaaagggattccttcaactttttcattaaaataggattagagaaacataatacttaatttccctgtcgtctttaattgttgcaatcacgggtacttttctaagtctactatctactatatattatatatacttatatatacttaaaaagtaaaacctgttttcgtcgtccgtgaaaacaaaaagaaacgatgagaaaaaaaccaaaaaaagaagtccgactcccattaaaaaaaacttccgactcccttggaaattccgtaaaaaaaagaaaagagatttctttatggaaaaaaatcaagcgcgaaaaaagtgcgaaaattttgttatgtccgataaaaaaaagtgctataaaagggtttccgtctaccgtaaaaaaagaaaaataatagtgcaaaaaaagatttatgtccgattaaaaaaaatcccgtcgtccatccccccaaaaaaaacaagcgtgaccattttttctgtccgattcaaaaaaagaaagttgggaaaaaaggttttccgtttctctatctctgactctatctcttctctgcttcttaaaaaactaaatgtgtttccgtcgtccgtccgtgaaaaaaagcgtgaaaaagaaattgagcgaaaaaaaatcgaatccgattatacgtgacgcggtaaaaaaaacaaaaaaagggagaaaaaaatgaaaaaaaaagagaagtccaattcaatctatctatatatacctaactaaaaaatttgtatggcttccgggttatagttttcgttcgtcgaaaaaaatatttccatcgcacgtgcgatcgatcccatttcaacccctctccggtggcaaaaaaaagaaaagaaagaaaaaaataatgagagaccgcatcaaatttggacataaatcatagagaaaacactgctacaagaatacaagaatacaagatcagattcaagaacactaagaaaacgccgatgccggaaggggagggtttcgttgtcgttgccgaaccgccaccgccgtcgcagggatgtcggtatgccagggcgcagccacgttgttttgagagatagagagcggggggaggggaaatgattttagggttagggtttgggctgttgaacttttatataggtcgaggtcaatcaggaccgtctatcagatcagacggttccggcttctcccgcgtcacaccgaacgccaatcccaggccgcccacacggaataagttcactttaggtagcttaagtttttcttcccgattctattcctaggccgcccacactattgggccatctcatggaccacgtgtacgctttgtatggaataaggtcactttaagtcccttcagctggactttttttattttattatgaatatattttcttaaagagctcatatcatgtaaaactaaatcttaatcatgtaatatttttatatttgttataattttaatttacacgttgcaacgcacggatatttttttctatgtaaaaaaaagggaccatgacatacgagtacgagtgagagatatatgccgcacgcacccgcaggctcatgtttaaacgagctggcaacatattgtcaattacaggtctaattgttttatttgggtgattaaatttgtttttatttacataattagtttgctctatttaagctttttgaaaattgctaaaatttgagaataacttttcctacttcatattatattatttttagctaatggaattaacagaaaattaattatatatttttatctttttaacaaaggtcactgcaattttatattttattatgattatgattatgattcctttatattttttctcaccaatatacatgattaaaattatcttcacccgttgcaacgcacgggcatcattgctagttaaaaaaaaagttgaaataggagataatgtgaggccttgagattaaaaggaccccgaaaacgagacagatcgtggccgttgaagagggacacagacaccgtggatctgaacgctgccggtgtttgttatccacatttgcggggcgcagcagcaaaagcacaagggcaaagcctcgccgccgtcgccgccgccgccgccgccgccgccgcggcgatcgccacgccatgtctccctccctcttgcttacctctaggggtacccactcgccggcgccacggccgcaaacccgtcgagcatcacaactgctcgtctctttcccctcgcgctgcagccgcttcgtcggcctccgcctcgcgcgcgcagccgccgattcgcaggggcccaacggcgctgcccctggatctggatctggtggggacggagagggcaaggcagccaatggtgccgacaccaaattggtacggtaaacaaccaacccttccctctctcttaaatcttaatccccttgacttactactactgttccctaatccctctcctgttctccccaattactgttccttctctgtcttaatggatagatagatggattggttactccttttctttcgcctgcctgctaccgtctgcattctcacaggctggttggatgcatgccatgatagaacaggagagataatttcaatttactaacaaataacatgcaccgcataatttggagaagtttcttgtgttaattttgcatcaatcacatggtatgcgttctccacataaacttgtaatggtttgcacaaaaataattcgcactagccctcaactccaagtcgactacctgagaatatgtcggagaagcagagatagttatgatgtcctgagcattttatacattatgagatccagaataagacacaagtagtcaagcactgcataggtcacatgatgaggcaatttaatttaattaccctgagatctgaactataggcagatgaactaaacaaatcaggcttacaaaacattgagattatcttgcagaacatttgggaatggtaacaggacatggaggttgatcctataccaagacaccatgtatatatacatatataaatgatacaccaccaactgcaattctatcagtcggtttcatctgaattacactgtgcaatgaatagatatatcatatgtatgactcatcatgctcacattttttctccattagtgggccgcttgttaataatatataagttgatgaaatattgttaactctcactgatccatggcatcaatgatctgtctaatactgcacgagcgactgttgtctgttgctagggcagctggtagtcaatggattgttcactctccacaaaacatgttgagttgagggcttttatgatatcttgcctttgttgatctgttcctacacaaaacaacttgaaggtcctatatgtaagaaaattagcaaggattgcttgacaattgttgatagccttatagctcagggcagaaagttctggcagaaccttatattcaagaaaattagcaaggatctcttgacaatctttgatagacttatcgctcagagcagaaagttctagcacctctacttctacatccattgctgtagagtagtttccttttcatccctgcagagtgtgcacagagattctcaaaagtcaaaatactgttctgtacttctgtgacctgtttttttgagtgtcaagctgccatgcaggagttcattagaagcagaaccatcatgctagttggactagactctgtttgtagttgtatcgatggaaatatatgcatgaacaccctttcgtccacatgtctttggttctcaattaatccattgtctattatcatgtttggcaccaacgaaaataagctatactaatatcttcttgctaatttagctataatattattctgacaacaatccatattttaaagctatggctataatattctgacaacaatccatattttaaagctatggctatgtgtttttttcattcttacagccaaagaaccggagggacatactcctggaatacgttaaaaatgtccagccagagtttatggagctcttcataaaaagagctccgccacaggtttttatcatcttacttccctcctaagtttccacaaactgtgttttggataattcataaggatgggactgggtcaatccatgggtaccaattgacccactatagttcaaccagatgaactaaaacacaacatcaaagttcatttttagatgatttggttgaactagaggcaatgggtacttatgtattgacccacttccaaccctagatatatagggtggtatgctgatgatttcttgaaatactttgatatgatgacatttccctctgtccatttttttttctgaaaaggttgttgatgccatgcgccaaacggtgactaatatgattgggactctgccacctcaatttttcgctgtaactgtgacaacggtaatgggatatcatatgttcaggtcttgacgccggtttttcttgtatggcattatgtcatactactaattattagcacaattcatttgtacacttgagccatgaaattgtgacatgtttatttacctttttcatcgacacaggttgctgaaaatctagctcagcttatgtacagtgttctgatgaccggatacatgttcaggaatgcgcagtatcgtctggaattgcaacagagtttggagcagattgcccttccagaaccaaaagaagaaaatgtacttttccaccaatgctgagttgtggacatatattccttacagggacatatgattaaattgttgccatgttgacatgtatatatctgcttagtaatctagagttgattatgaaaactcattttttgatcatttgtttgtcttttgaaaggttaacactatgtgcaacttacattaattcacacaaccaaatctatgagtggataaagtcaagtttttgctggtagtaactttacattattaaaactgcaaatattttattttgtcttattttgcatggcagcatttactcgctgttgctgtgcatggtttaaacctccataaagagaggtccaagtagtgtatccctagaaagtaaggttaggaagcatcaatcaatgataacttgataagtatgtagcaatgatgcttcccggattcaaagtaaagaggactgaaattaatctgatctttagagtgtttctattggttgaagagttatttttttcataggaaagcttgttgatgagtgatcattacctcaggagttcacagcgttatctaacatggaaaactaaaatttgtctttctataagaaaaccaactcagctattgtaactattggtggtttccagctactgttttggcatcctagtgtttaattaggctttgagtaggagcgatgaaagatgcaatattcattttggatgttagattgattgaggagcacacatccatgcataacataaatgttgtcactaacactaattgtaaaatgtctcacgtctctctcctgccagggcacctcagtgtgccatataattcactggcttgtgtcactggtcagccacatttggtattgttttctaaccagtactttgcattgtcatatttgctcattgctgtttgacattgtaaagagattagtgctagaggttattgacttgtgtatttagatttgtttactttaatgtcatagctttcagaatgaagtcggtcaacattttgtgctcctggtgttttgatcatttttctgcaagtgttcttaacagtacattacaatgtggtgtagcttccctacttcgcacaaatagtaaatactataaaaaaagcaaagatgaggttgtttaatatgcatgctggcatttgtaggattctgcagattatgctcctggaacccagaaaaaggttactggagaagttatccgatggaacaagactactggtcctgagaaaattgatgcagtaaaatatatagaattgcttgaagcagaaattgatgaactcagccatcaagttgctagaaaatcatctcaaggaagtaatgaactcttggaatatctaaaaactctagaacctcaaaatctgaaggtatatcttgatcccattaccctctgctgcatccatcctaagaatcagaatatatatagttaatactgactttatgttaggatgatcaatctttttggttggtttacatgcgtgataattcatctactattctgaaacattgtaggagctggcaagtagtgccggcgaggatgtcgtttttgctatgaatgcattcataaagcgccttttggctgtctcagatcctgcacagatgaaggtgagtgtttatttacttctttctgtgttcatgttaattgattttgttcagaaccatgcatacctccattttgttgaattgtgccactcattcaggtttgcttccattccatttagtattttctgataggaaatcgcagcattttataaattgttccccaagtttggaatgttactgcaccttaaagttagtcactttgttttgttttgttttgagtgcagacaacagtttcagaaacaagtgctaatcagctagccaacttgatgttttggttgatgattgttggctacagcatgcgcaatattgaagtgcggtttgacatggaaagagtattgggtgctgccccaaagataggggaattaccacctggagaaaacatatagcagggaggaaaggggcgtaagagtggggaagtgatgattagttaaaatctagggttactggccggccaagataactgtatttgcgtggtcatattattttgagtggaatggattacagcatttgtgcaaagacaccaatccacattttgggaactaagatgagatgctaggcatagccatttctgatatatttctcggggaggtatagacgacgagatacatagaaacaatagaacgggacctgatgctgtagttttgcaacctgactattgttggtaaaatacaatcaaggcaactcatattaccatattgtactcccatgttgtatgtctagttcaccaatcaagttgagtctgatgtgagtttgtttagaatcttgactaattttgctacatgacacataagtttgtgtaatttgatagcgtacatcgtaaaaacgtgttatggctgttggacaccttaaaaaatgtgttccttgcacaggaaaaaaaattcttttgaatagatattgatacaaatacctcgaaacgggttgggatacatattcgttattactatagataagatcttttgaataggtattgatacaaatatctcgagataggttgggatacatatttgttaatactatagatagagtatgattttttttcatccaaatagataaatctctaaatataggcacttcttttttcttcacttttgcatttcttaattttgtattctgctattctgacaaatattttttcattcttgcttatcttatcttactttcctagttgttctaagtaatacacgcggtacaaagttcgtgctagggaatttctttgagtcatcatgtttttcttcatacaaaaaatgaatatgtgatttttcaacgaaatgaagctttttttttgcttagcctatctgaaccttttgtataattggaattaattaaaatataataggtattttgtttcgtctagaaacatagcgtaaaaatattcctcgacttgcataaaatctggagtactatgctagatgccattttcagctcaattggagagagaatttttcttagaaagacaagtgttcatagaatcatagtgccaaaagcttctaatttagtgcaagagcaaagatttaatatgccaatatgacgcactcaaggaatgtacttggggtgacgacacatttagagatgcataatttttaaattttcacttcaaagcctaaggggtgaaaatggagcggatttgaacggatagtaggtataccatatcttaaaccatatttcttgagtggattcgaagcggattgtttcggatgttggaaatggtgcatattcgatttaaaaacggattgaatttatcagatattacgtgtataagcaatcaatataacatcgagttagcaatgcaaggaacaaacaacacaataatcgatgaacaaccctcgtaataattatattttttttgagaacgtcgtaataattatatgcataagtgttaaacaatatgaatacttcatagtataaaacacacaactatgcaagtgtgagatgagattatgaaagcctcgaattaaggagtcttggtaaattgatgactagcaaaatttacatagaatcttttagaacatttaggccggataaaaatcaatttcattgtctgtcttctctgcacacggcacgaccttatatgaccctgtaccataacgtttagcggaaaaagctttcaactaatacaacttattataatatatttctccaaattttagtgcccacatattttaaaaaatacgataaattgttattactacttaagatgagaggggtgatgtttttttaagcctttttaatatttaattaaaaaaaataaataatccaacaatttattttcaaatataaacttttggtcagtggcaagaaaacactagcaagcctgttgctatggcgtgattaaaagatttaaatttgtaaataagttttggagaggatttattttaaaaataaataatattaataaaaggttaaaaaataataaaaattcgagagcggtcggttccttggaaacgaagggaacagggaaagtatgcagaagcaagtcaccgcccaagcgaagaagccaacgcggtggaaagtggaaagaaaagcggacaaaccaacccgaggcgaccggcgactcggcgaggcaaggaaaagaaaaaaaaaggaaaagaaaagaaaagaaaagagagagaaggtgtggtggtggaaggaaccctagcggcggcgaccggctccgatggcccctccaccgccgtctccgtccccatctccggcgagcggcgcgcagtacgcgcaccagttcctgaacacggcgctctcccagcgcgggccctccgccctgccctacgcggaggacgtgaagtggctgatccgcaaccacctcgtcgccctcgccgacgctttcccctcgctccaccccaaggccgccctcttcacccacaacgacggccgcgccgcccacctcctccaggccgacggcaccatccccatccaccacgccggcgcctcctacaacctccccgctgtcctctggctcccggagccctacccgcggtcgccgcccctcgtcttcctctccccaacacgcgacatggtcatcaagccccaccaccccctcgtcgaccgctccggcctcgtcgccaacgccccttacctccgctcttgggttttcccctcctccaacctcgtcgatctcgtccgatccctctctcacctgttcggcctcgacccgcccctcttcaccaggagccccaatcccccacccccttccccttccccgccgatccctgccaccccgctccctcgcgtccacccctcctcctcctcctccccctccccatccccctacagattccctgcctcgccccagcttgccgcgcgccccccacccaccgaagaccccgctgaggtctacaagcgcaatgccatcgctaagctcgttgacatggcctatgccgatgccgccacgctgcgcccagtccgcgaggctgaggtcgacactctcttcgccatgcaggctacgctgcgcagccggggggaggtggtctctgatggggtgcgcaagatgggggaggagaaggaggcacttgagcgccgcctgcaggatgtaatgatggccacggacctcatggaggcgtgggtcatggagaacaccaagggtgctgccggcgacactgaagcggacgaggcaattgagaccgcagatgtactgtctaagcagatgcttgagtgcactgctgcggatttggcactcgaggacaccatttatgcgcttgacaaggccattcaggagggttctgtgccatttgatggctacctcaggagcgtgcgagcgcttgcacgggagcagtttttccaacgcgtcctgtcaaccaaggtgaacaaggcacaacaacaggctcaggttgctagaatggctgctcgggcaccacagtatgcatcataggaccggtgaggggtaacttgagtatacttactttgatattgcctttgtctaccaactctactatagctgtcacagtgtaaagttcgtttgctctttgcacatcttttttggggtggatgggggttacttactagatattggatggatgatcccatgtcaaataagaaccttagttgggagtgctgcactggatcttgtgtacgatttctgtacttcaatacatatcttcagttttgttctttgtgataactccatgtctcaatcttcatcgcaaaacttttatcaaagattacaaatcttgaccttggtagaaaatttcagatgcctgggtgttccccatcttactaattgtagtcattgccattggtgccgactaattggtgccagcgccggaacaggcaataataggcccttctgaactggcacctatgggctttcctgcactagtgaattgtggtaattcagatattggaggctgatatacctgaagttactgatactttcagaatgttcagttatatttcttttgtatgactgcattgccagctgtggaaacctagcctatttgttagaactcaaagttgggaagcactaagtaatctaattaaaaattagtaatttctggcttgcttaaatgttatgacaatggaagaggcaatctaactacctctgttgtaaatgttggacgctctaatgtgatataggtatctcaagtttgcttagaggtttgtttgtggtcattgtgtttgtaggtgtcaggcgcgaatgtaatcaacaatttttttggtgtgtgggtgtgggtgtgggtgtacttggggtttcttccctatacgcagctctcctacgtgttcaagagaaaaacgtttgcatataggctttctggccactcttatcaatattaatatatttataaattggcttagtagttggttctagtttggaaatatggttcccctgagcacagggcactgcacactttggaccgaatgtgacatattctagtactatgaatctgggctgtatgtctagattcatagtactaggatgtgtcacatctggtactaggttggttttttatgggacggagggagtaggttatttattactagatgatctgcacgatgcaatgcttacatcatggagtaatgttctgtaatttctggacaacctgaacatgcccatccttagtcggtggtgttggtttttatggttcaaatcgcagcccagattttgagctaactctggttctgtttgatctcaacacatttgtagagccaaacagaatgggtttcttgcagatttagagtgtgagtttacatatgctgcttgtccttgaggtaaaaaacatttttaaaatgtattgcagaaaattacattgaaccattgcaggacaaaaagttactgatgttgccctgttgctccgatgagattcgagtgagcatgccttttgctccagtatagatagtctgagtaaaacctagagttatttagtgtggtattaaaaaaaagttgaactcgaggaggcggcagtggtgatgttgagcccccgagtgaggccgtggacggtgccatagccgcgggacccgaggccgatgcagccgtagagcagcagcccctgccggtatggcaggtacggccgcccctacatctcctccgcctgcgtcctcctcacctcgtacatcctctcgtgcgccgatctcctcctgctccttcccgttgttcctctccctcttctcggcggccctctgccatggacacaacagcgctcacacacagcccaggtggaggaacagcaggccaacgtcgctgccgtagcggtggtgcagggtgtccaatgagcggtgtgggagctggtcgacgaggtggaggtggctgacgaaaggaagcaacggcggtgatggcagaagcttcccttttccaagactcttgattgtgaagacgactaggagcaacgctatggcgaggatgacatatgatcattacatcttggtggatttttatcccaaaggttggatttttactccgaatgtcttggtgcttataaatcaattagagcacattccatgtccttgttccattatctctacaaaaatgttcttgtagccaatcaccacggggcggtgactttcacagatctattgtgtgtctagaatattctatggtagagttttttttctccaaattggattttcacatgcatgtttgatgaactcttatgccatgtagttggggttatttatgaagatcaccatcaatcatcttcagttggattgctgttttcaggctattgtgctggtgcagttgtgcagcagtgcaggtatgcttgtgagttgtgtcaggttgatctgggattacattcagcaatacttctctctcatttcctggtgaattggcaatctatcctaactgttgctggttttccttctcaggtaagatggcatacagctcactatgccgggtatttgcaatatcgagcaccagcattatgtgttgtgaaattccaaaatactattacagttaatcacccttcatatattttttcaggtaagagcacctttcatacaaaaacacaatgtgcccggtgaaagataaaacacaactacaggcttttttttaaaaaaaaaaaactatcacctgtactagtgcagtaaaattgcactttgatgcacccacacaagattcagtgcaaacccaaaaaacagaagagaaaaaaaaattcctctaatcccattttatttgtaaggaggttgaaatggcctggattagtccaggctagcttttgcagggaaacaaaatagagagtacttgagaggctaggccctgtagccccatcttttgaatacgtgttagtgatgcatattttctcttgatttacactgcagatctggcttaggatgataagtgtaccttattttatctacctatctgatgtcttgcatcatagttaattatatgaatgaattgacaactcgatatttgtctacaccctgcattttttcccgtattcatccattgcctgactgtttacatggatgcatgtagaaccttgtgctgttttggttcataagtttagtagatagaatcttatgatgcagaatgaaatttcccttttccttggatgatataaaagtaacatactctttggatgtgagcaattagacatgtcactagcgccccaacagatcagctcaaagtatgttcccacccatgtttgtaagtaaaaagattgtccaggtccattttctttgtttagcattccttggtattatttcccaaattcatttgttcagcatgggaaggccttttttgtcaaaatgcgtgatggtcagtaatgcagagcttttattttgtaactttattggcacagatggattctaaccaagaatttgagaatattagttaatctctttctgtgtaacatgtttattcaatagtgtttgtttgcatgttcgaggtatgaatttacagttgaggttatgcatgccaagaagtatatattttttggggggtttttttgcctggtgcattctaaccagtggcttggagcatgcttaagcagactgtgctttagcccagtctgtacaccggaaatcattatcccgacatacatgattttattcagactttatcattacctttagagatgattatttcatacttccaaatattcatttctgaatgttatacctgctacatttagagttcgatataaacgtttgcagttcacatactatccaatggggccttgaaaaaaaaaagagcaagaatcaatgacgaagcaatgcttcttttcctcttgtttgtaggttgaaagaatgacttgatttatggagctataattatattgaaaagttcgttttgtaattcaatacaaagaagagtgtgagcatgactagaagatctctgtggatttcttacaaggtatttattttgcatcggtcactatgttaggaacctttagtggtttatatagtcatgaaagtttttgagccagtgcatcaaatatcttggtccattaagtgcctgcacttctctaaggaaatctacaggatttatctaagctgcaaatcagaatattcaggattaataaagtaaaaattgcatttctgcagcaacaaagaaaagacttcgaggttgtgattgaggatggcaggtcctaagtcacagggaacgtggaacgtgggtgagttcctcgtcccggaacaaggaacgggaacgaagcggaactttattctgaaaacggaggggtcgtcgttccaatacgtggcatggcgatgaaggaacgagaaggtggtaggatggaggaaccaagtacgctgagctaaaaataaaaggggaactcaccggatcaacgcttcaagcgacgagcagcgttgttgctccttcgttgctcaccgccatcatgccccgaggtgcctccgccagcgcacgccgccgccgtcgagcaggggagagggctgcactgctagtcgcaggtccatatataagaacagccggcaaaatccttgacacatctagagggaagaaatgataaatggatctttgttccgagcagatcgaagaatatgtatgttgggcaggtaaatattcagataccctccaacaagctacggtagacttctgtgaaatggttcatcatgtaacactgtccatgaaacactactgcaggagataagggggaaatttcagcaatccaacttatttactcaccgacggagcaacatttgctactggccaactattaagtagaaaatgttttcaatggaagaagaaacctgcacacttgtgactcaaaaatcgtagtctgcgggtcatgaagtttcactacaaaatacaaactagctattttgaactgactattgattcacatattagaaatgatcaatacagaaattttacatggctgtagtgcatttaaatatcatttttagggggtaaatatagtgctcaattttctttccatatttatggcaacttttcaattcctaatggaacttgcatactgatgtggatgtctttgcagagagaaatacgctcgttacatgagatagaggattttgttgggaggcaattaggtgcgtacgagtataactctaagaaaggtgtcacaaaggtgtggttcattgaattcatacttttaaattggtgaattgtgaaagagatcaatgtgtaaatgatgggttgttgccgtttcacttgaaacaagctgatgttttatttcacttaagaattattaggaaggatgtggccttgagttaacatttaattatgttatgtaggaagaaattgttttttttttcatgctacgccttctaaagcccatgcgtgcgcagcgtgacaccgcacatacccttatattatgaatcaatccagttttccggagttaggatgtgtttagttcacgccaaaattgaaagtttggttgaaatttgaacgatgtgacggaaaagttaaagtttgtgtgtgtagaaaagttttgatgtgatggaaagttggaagtttaaagaaaagctttacaactaaacacggcctcactcgttcaccgtcttcggtttataatcgggcgtgggtttcatcacttctaatagtagcatgatgactatccatgatgactatccgctactgccggcccgcctattaaagtcctccgctcacgcagtttgaattcatctagctaaagtatgtataagtatttctcggttcataggacaatgctacgtagggccaatttgaactgaataatacagtattagtatacattgctccaaaaataattcgaagtggtctcaggttaaagaaaggcaaattctctatccttctaaacttatcaagctgtttacgcagcagcaaactggcttacacagtaaacgaaaaccaccacaagaaacaagggagcctttagaataaataaaacggctacacatagtaataacactagcaattgaacaatgttggtagcaagtaaaaatggcatctcctagcagaccgacttgaacataaatacctacagaatcacccgctcgttcatttaatccgtagtattgactgcttagttgccgctccatcttcaaccagctagctgcacaagagttatgcaatggctgcacttatcatgacattcacaaaccgctccgacagaatcatgcggggaaaagaaaaccagaaaaatatggatactgcccttctctattactcctaccttcacaagcatggccataaaaaatcaacagtacaacatattaggttgcatgcctcaaatcatcaaatcaacagggataggctatctcatatttttctcaatacgaccggatctttcaaaaaaaatatttttctcaatatgaatccccatgactgtaggctagtgagcctactgaatgccttgctcctgcatttccctaacagattcttcttttaaggtgagctgactagcgtgtgatactcaacaaatgacggcgggcaaatttaacaggttatcgtaatttgcattgatttgacactatacctcttaagttaagagccttacccaagaaaaaaaattataatgcagaggacaagacaatttataaactaataccagggtgtaaaagataggaacatcaaacctctgttttgggttcctcatgcaaaaatgaccaaggtcctgatttccatagaagcctgcgatttctcaaattattaagataaaagcataaaagagcatccattagatcaattacagaacatgaaatacaaggctccaaaagggaaacagacataatattaaaaattctttatcgccaattgttatattcataaaagtgatgaaaattgggaagatacccttatacaatatactgcccagtgcatggatatacatcaaataacagaaatttgtcctatccacatgaaactattagttatgttctcctaaataaactgcaaaatatgcgtggcaattcactgaacagtcaattagtttacatgctccctgaaaggttacaactttcatatagaaaataagttgatcttcaagataacatgcaaatatgttacttattgtggcagtaacatatttcgaccgctatagacgtcacattgcttacttaacatagtgcttttagcaaatacagtcaccctaatcaattgccaaataacctagaacatagggcatgtgtagcaagtttattcccaagtctgcaagaactataatttgcattttcacagttgaaccacatccacttagttcaataaaatagcagggcacacacgcgcgcgcgcgcacacggagagagagagagatcacttacatggctatggtttacggttacagaacaacacaagatattcattcccaaaaaggcaaacatttttaactgcaagatcatgtatgcatgcttgtctttttacaccggattagaacaacaaaacaagaaatataatcacctgagaatgcccgaagccatgcgcaatcccataagtgttgtcaaaccagcccaaactccagcaagtccaaaaacagatggagcatataacaaaactaatgatgacattatcccaacagcaatctgtatagccaaaagatgacaaagaaatcaatataaagtaaagaaaaaagagagacaagtgtttccataccgtagcnnnnnnnnnnnnnnnnnnnnnnnnnnnnnnnnaatgcagaccatcaaatatgaatgccagagcattaattggttgactggcacatacaaactgaaatgaagaaaaaacattagaataatagatgtgatgtgataactaaatgataaagtagggagatgtaccaatgaacaagatttgacaaccattaggaccacagggtcactggtaaataatcttgctatattactgaatgaggtaaacaggccagcgaataagcttaatccactgactactcctatctgcaagaaaatctccatttttctatgttaacaagaaagggcgattgcatctatgaatacatgaaaaacaaagcttcacaatagaaaacagagaaatgacacatgacctgcaaagcaaacattgctatcttctggaccctcttgtagtccaatattgcataggagcttgctatcattgcctacaaatgcaagtaaacttaagtctgaacattttgattgcacaaatcatgatatatcattgagctagaggaacaatctttgtattagtagtattcgctagaagtttgagggctcgatgtaaattacaatttataaagaaagaagtatgtgaaatgaagccgatttaaaagtgtggataccatgtacaatcaaagatacacacctgggcagaaacagctaaagcatctgcaagcaaagataccgcaagccatacttgtagcatatctgatgagctgccatagctgttgggccttgtcgagcagccattgatgtccctatggtcatcgttaataaaatcgagagggttcttcctaacagcatgccacctaagcatttcaaaaacagatgatggaattatagatggtggtaagtgcaataaaaggaaaaacaagataagaagtatgaaattataacatggaggttctcaggatgcatatcatag

SEQ ID NO: 9047 - DNA, 1890 bp, Oryza sativa
cagaaatcctcaaaggccttaaaacctagaccttcaatatgtctcaagaagcacggcgattcatggatgcgaggagttgccagcggtgctctgggcaaaccgaaccacaccaagccgagcgaccggggaaacgcctttcttcctcgtctacggcgcagaagcggttctcccatccgagctcaccctgaggtctcctcgggccaccatgtactgcgaggctgatcaagatcagcttcgtagagatgacctcgactacttggaagagcgaaggcggcgcgcggcccttcgagccgcgcgctaccagcagagcctgcggcgctaccatcagcgccacgtccgggcccgatcactctgcgtcgacgacctcgtcctacgccgcgtccaaacgcgtgctggactgagcaagctctcaccaatgtgggagggtccgtatcgagtgatcggcgtcccccggccgggctccgtacggctggccacgggcgacagcactaagctgccaaacccgtggaacatcgaacaccttcgtcgcttctacccctgaggggggggtcgggtgtcaggtttcgggctcgggctaaccccgcacccccctcgggtgtgcagggttagccgggggctaccacacatgcacagccttacttttcttatttcaagcatttcaataaaagcactttcaatttcctaaaggttgtgtctgtgccgtttttccttctcaagaatcttaacttgaaataaggtcactcgtgctcaaccttgccctcaggggctcggttcggtcagctaaaatcgccaagcggggcccagaaccgagccgtgccccggggcgtggtgaactccgggggggaatcggcaaaaacccacaatcgggtcacccataaccctcggtcaccatgttcccggcctggccagtctcgacatgtggatctccccaggcactagccccgacccgagccatttgaggatcgggacttgagcacgagcccttaaatcaagctaaaatgcaaaaggaccacggcacaaatcatcctcaactcatatgcataacaaaacaaagttaacatagaaatttttcatcatttttgattgcagattaagttgatctatacaaaaagaagaaagaaaaagaaaaaattggagattggcgggggcctgggggctcattccaatgcgcccgggtcgctggcctcgtcgccaccgtcgtcctcgccgctggcgtcgccctcctcgtcggagctgggggcgaacgcgagccgaggggccgacccctcgaagctttggacgatgtggttggcggcatcccggacccgcgcgcgcgcatcgtcctcggtcccgggagggaactcctccagcgccatccatggggagaagccggggtccctggcctggtaactcgctaacacgagttccaccgctccttgggcgaggtccctcgaggatgacttgatggtcttctcgagctcctcggggagttgttggacagcccaggccatcctcctaaggtgcggggcgaggccttccagattggtggagcgcgaaattgtctggcctttccagaggcccgcttcccgaccggcgcgatccagccgggagactgcatcccaaagcatgccgggccctatctcacccgacaagcggagggcctcggcttccccggtggatgagtccagggcgcgctgcatgtccgcgacgttgtgttcggcagctgcgaggcgggcgactaagtcgctttcgcccgtagccgccccgccgctgcgcttcctcgcatccagctccttttctcgtgtctcgaggttagcagcctgctgctccagcgcggctctctcggcgcggatgcattccagattgcggcgcgcctgctcctcctgcgctgcctcgcggagggacaggctg

SEQ ID NO: 9048 - DNA, 6504 bp, Oryza sativa
cttatatcacttaatttctctaacttttcctattgaatttagatagccaaagtaacaccggaaaacaaaaagaaatagtgactacaaaaactatgtttggcaaaattcaaatgaattagggggcatatgtatatttcaaatgaagagtcgtgtcaaacaaatataggaggctttccctgctttaaatggttttcgagctattttcatgaaaactgacaaaaccgctcaagagaagtttttgatcagtgaacggttttgtaaaccctgactgcaacccatctgattaggaacatagttcagcttttcattctctacattagaaggaaataactcataattctattatatacacctacatttatatgaaaagcatataattttaataagtggaaataagtcaaccctaaagagatgtagtttgactaccactatgggtgtatatactgtgtattttctgtagccataaaaccatatcatcctagaactaaatgttgcaacttgcaatagacttatccaaatctttgctcaattcctatccattggaatcaacttatctatatatttactcaatttctacctgcggaatcaacttatctagatcattggcgttgacaattacaactcacactgaaaggattactgattggtaattgtgtaattgttggcaccatagttgggaatcggagagagggaaaaagggttggcaccagtcctctatttttttttctcaatgtaccgagaagaaagggggcttagcaggaataataagatgaatgattgcgatctgtagcccatgtaagaataagaacgaaattttgcaaagacaaatgaaaatcaatgaaagtactaaagggaatggtgaaaaggaaacgcaaaatcaagtgaattacaataaggaaaagataattcaattacaataaggaagcgataattaaaaaatcacttattaattttattcgtcacgcgacgtcaaggcgcatatatattcccactatcctccacgcacgttatagggaaatggagacagaaacacgacgtgtcactatgcaattttagatgcgccaagaaaaaaaagaagatcaaattttggtgacacagccttacaatttcaagatatgcctttgataggatggcattgacttttcacattacaataataccctagttgaataatgtattaatgcatttttctcatgtctaataagatatttttaacatcatggtagttactcagaaagcgaagcttgccgcactgtaaattaatcgtcaatattaatactttgtttgtactccatccattctataatataagacacaacccatccattccataatataagacacaaccacttttcttagatgttccataatacggagtataaggcatacatgcaagcatgaaatataactatgacatcttctccattaaattattacttttttaaatcctccactctcatgctatctaatcttattggatgcatgcattatatttattaggatgatccaaactacaagatgataataattatttcttagtttttgggttaagggtggttgtaccttatattttggaatggggtgagtaataaataatagccctccaggagtctggtacaccgtacaacaccaaacgataagaaagtgatttcatctcctcgttacgtgcatgtcacctaaatggtcatcaaattttttttaaaaaaaatagcaagatagattaatatgaaatataccactccacaaacattcaagttgaaattcaacatctacaagttgaaacaaaaagaaacaaatatgtaagcgaatgtacgataaccattttaatttgttccttttttgcaacttgtggaaatcgaatttggttttgcatgtttgttgagtgatatatttcatattaatctatgttgtcaattttttttcatattttttaatgactatttagatgacatgcaaataatgagacgatatcccctcgagggatgaaaattcatttcccggcacgatgtttatttctgtggagtaatgactttcacgcttggtttggggtgtggctgctaagaaaattggcatatatgatatattcaatgcaggtgcttccattttgttttcttgtttatgctgggagttgagaaaatcttagtccataatcaactggtcaagtgccgaggaattgcctgggtctcattgactctgttaacttgttccattggcggctgtaataagcctgggacagtgagaattagtaaaagaaatgactgtttaatttgcagctaaacagtatctcaatttcgaaatgtcattgtcaacaaccatgttattttccctttaaatcgttcggagctcacgcatctaaatcctaaaccacctgggttccatgatgagtcgtcgaatccatggcatgtgcttactcgtcctagccaccttcctctcttgcattgctctctcggcgggtgatcaccggagcgttctgtggcgcggcggctccatcgccgtggaggacgccgccgaaaacgtcctcgtgtcgccgagcggcaacttctcgtgcggcttctacaaggtggcgaccaacgcctacacgttcgccgtctggttcaccgcgtccgccgacgccaccgtcgcgtggacggccaaccgcgactcccccgtgaacggcgtcggctcgcgcgccgagctccgcaaggacggctcgctggtgctgcaggactacgacggccgcgtcgtgtggagcaccaacaccagcggcacgccggccgaccgcgcccagctcctcgacaccggcaacctcgtcgtcgccgacgccgccggcaaccggctgtggcagagcttcgactggcccacggacacgctcctgccggagcagcccgtgacgcggtacaggcagctcgtgtccgccgaggcgaggggctccccgtactccggctactacaagttctacttcgacagcagcaacatcctcaacctgatgtacgacggaccggagatcagcagcaactactggccggaccccttcaagaagtggtgggacaacaaccggacggcgttcaacagcagccgccacggcagcttcgaccgccgcggcgtcttcacggcgagcgaccagctgcagttcaacgcctccgacatgggcgacggaggcgtcatgaggcggctcacgctcgactacgacggcaacctccgcctctacagcctcgacgccgccgccgggcgctggcacgtcacgtgggtcgcggtccagaggcagtgcgacgtgcacggtttgtgcggccgctacggcatatgcacgtacagccaaggcccgacgtgctcctgccccgacggctatgtgcctcacgacgcgagcgactggagcaagggatgccggcgcacgttcgacgtcaggtgcggcgaggacgtcgcgttcgccgagatgcggcacaccgactactggggcttcgacctcaactacaccgccgggatctcgtttgacacgtgccggcgtctctgcctcgtcgactgccgctgcgaggcgttcggttaccggcagggcaccggtgagtgctaccccaagatctctctctggaacggccgggttatgagcattccgtaccaaaccatctacctcaagttccctacgggtgccaagaacctgaacccgtccttgctgcacttcgatggccacacctgcaccatggacgaacgggacgctacggtcagcagctcgtaccttcatggcaggcgcaacacgataaacttcatctacttctacagcttcctcgcggttgtgttcgtcgtggaggccatttttgtcgtcgtgggttacctgtttgtctttcgagctgactccgtggcggcaggacgggtcggtgatgaagggtacagcttggtgtttagccatttccggaggttcacctacgacgagctatcagacgcgacgtgcggattcagagacgagattgctaagggcgggacgggatccgtgtacaagggtgttcttgaggatggccggagcatcgccgtgaagcggctggacgagatgacgcaggccgacgaggtgttccggtcggagctgagcgtcatcgggcggatcaaccacatgaacctcgtcaggatatggggcttctgctcggagcacccgcaccgcctcctcgtctccgagttcgtcgagaacggctcgctcgacaaggccctcttctgcgacgacggcgagagctccggtgtggtggtgttaccatggcggtcgaggtacaagatcgccgtgggcgtcgcgaaggcgcttgcgtacctccaccacgagtgcctggagtggatcgtgcactgcgacgtgaagccggagaacatcctgctcgacggcgacttcgagcccaaggtgacggacttcggcctcgtcaagctgctgagccgcgacgccggcagccacatggcgctgtcgcgggtgcaggggaccagaggctacattgcgccggagtgctggacggtgggccgcccgatcaccggcaaggccgacgtgtacagcttcggcgtcgtgctcctcgagctgctcagggggcagagggtgtgcgactgggtggcggcggcggacggggcctgggatctccagcggctggccgcgtggctcaaggagaagctgaagcgcgacgacgacgaggaggaggtgtcaacgtggctggaggagctcgtggatgcacggctgcgcggtgatttcaaccatgtgcaggcggccgcgatgctggagctggcagtttgttgcgtggacggtgaaccaaacaggaggccgagcatgaacgccgttgcgcagaagctcctctcgctgcatgatactcgctagagcatcagtgcatcatcatcagccatctgcaccatgcatgagcccagcatgcatcgatcacctttcctggaaggctggaaccccaatgcatgggactgtgtgtgtcataccaaaatgaaaaaaaaaaaacggatttgctataattgtggccacagattttctgtccaatcgcagtcgattttttggccttaggatggcatgtagattcgtgcttatgtgttgtatccgcgcgcgttttacggctcttccacagcttttgcctcgtcaattgactccgtgtgtgttgtttgatgagggacatgctgatttgaccgatggatgagatacgtgtagtaagttacaccataattacatcatatttacactacaattacatatgtaattttaaaacttacatatgtaattttggtatttacatagtaagtacactattttttggtgaatacaatgtaaataaatgctgactattttttgagggaaaaatatggcaccataaatatagctactccccaaaaaaaattgcttagttagactgttcagggtgtgaaactgtgagtgtagtagtgtacattgtcccacaatttatttatttatcaatattcactaattattctcaaaataaattaaaaatattggtgtacttctttatacgacctagtggatggttaagcggataaaatatataaaagcaagtcctacttttgtggattaacggatacggagtatgcaacaatcaggctgatggagtgtttcgtggggaaataggataatgtactgatgtggaagcacatggccccatttcgctgaagggaattcaatttttaaaatactgtatgcatctgcttgtgtgttatatatgtaaagagaggaaacgaagaacggaaaaataatatagagtaagaattttttttttcatttttagtggtctaatagaggctgagggacgaaagcgactataaagccctcaaaatcaatctaaaaagtaaaattggttgtatcttataattcgcgcgccttccacggaaattattggattaattccaaacggatgcaacttgatggcagaaatattggcactaagttgacattagcacactaaaaccaatcgtcgacggttccatttcttttctccaacgaattagcggtgttaactattatatgattgcgattgcgatgcatccagctggctggaataatgcaatgcaaaaattgacaaaacaattatgacaggatctaatcagaattactccctccgtcccacgataacttcatttttggatttttatgtccaacgtttaaattaaccgttcatcccatatgaaaaatttatgaaatttattttgaaaacatagtgacgcataaagtattattcatgttttatcatctaataacaataaaaatattaatcatataaaacttttaaataagacaaagagtcaagcgttgtatccaaaatctgaaaaatggagtcttcgtgggacagagagagtagtaatctaaagcacatttgtttaatacgcaacctagtttagtactaggtcgcactatcttcaggttgatctactagtacatggatgatcgatgctaaaaaaacgactttggttaatcgtgtttgtcaacacgaagaattgatgcacatatgtccaattagatggccacaacgtccaacttaacgagtcactttcgagtatgaatta

SEQ ID NO: 9049 - DNA, 984 bp, Oryza sativa
tataaaccagatgtagaggcgagggcactagtcagcagcagacgagatgaccggcgatgaagatggtaaggccaatcaacactggcagaatcatgcagccatggaagtgaagaaaccagtcggcagccatggcaaacgtaggcagcttgtgttgaagatactgatgcctattagtagtgacagcgatgtagccagccgtgaagaagatagcatcagttggcgttataacaggccagccgtgcaggcggtgacaccagtcagcggcggatgcggcggccggtcggtgaagacgtagacgcccaacaacggcggcataaaggccagccgtgcaggcggaaacaccagtcggcggcggcgaaggcaagccggtcggtgaagacgtagacgcccaacaacggcggcataaaggccagccgtgcaggcgaggacatcggtcggcggcgacaaaggcaagccggtcggtgaagacgtagacgcccaacaacggcggcataaaggccagccgtgcaggcgaggacatcggtcggcggcgacgaaggcaagccggtcggtgaagacgtagacgtccaacaacggcggcataaaggccagccgtgcaggcgaggacatcggtcggcggcgacgaaggcaagccggtcggtgaagacgtaggcgcccaacaacggcggcataataggccagccgtgcaggcggaagcaccagtcggcggcggacgaggcggccggtcggtgaagacgtagacgcccaacaacggcggcataaaggccagccgtgcaggcggaagcaccagtcggcggcggacgaggcggccggtcggtgaagacgtagacgcccaacaacggcggcataaaggccagccgtgcaggcgaggacaccagtcggcggcgacgaaggcaagccggtcggtgaagacgtaggcgcccaacaacggcggcataataggccagccgtgcaggcgaggataccagtcggcggcgacgaagg

SEQ ID NO: 9050 - DNA, 8602 bp, Oryza sativa
tactttctcctagaaacgcatgcttgcgacgcggggaattagcgttgctttaaccgaagcaaaaaaaatattcctcatcgagaagcagcagcagcagcgtgtgaggtgtgagtgagcgagtgagagtttatacgtgtctcgctcgaagaatttggcgagatttggaggaaaaggatttgattgggttttgctttgctgttgcgttctgatgcgctaaccgctaaaggcgataaaaaaccttggcgtttcttcgacgcattttgtcggtgtacaagcctttttggtggtttccatgctgtacaatcgcaacctgctggtttcccatgtagcatatgctgtgaacatcagggatacacccccactgatcgcttgttgtatatgcagaattaacctgtattcagataaagaaatgtcttgcaaagtaattaactgatttcagataaggtgccggttgcctgaatttggctttggtgttggaaggacataaaggaaagccgaatggtacgtttgatttggattattgaacggactattaaagcggattatcgatttgatttagaaattttaagaaataaacatgatgaatagtttaaagtggtccaagtaatacagtagaaaatgttttttagaatgtatttttttcaagcatgaaattaatagttaaataatatgatgaacaagtaaaaaaaagtatcatatgcacataaatctttttgtgtgcacaccacctaacaaatttcactaaaaattctagaaaaaatatatatctataattttagtagtattacatatatgtataaagtttcatcttcaaaatcattatatttagtgagtaaaaaaaacaaaattcagatacatttatactcttaaaattgtcagaattatcatctttttattaacgttaaaatataataaatttgaggctaagtatttacacataggtgtagtactggaagtacataaataattgttttaaatttttgataaaatttattagttgatgtgtctgatgtgtacccgagaaagattctgtgagtaggattacaaataaagcatatatagctcttttccccctgtcttgtaaattagttatgtaagacgatttagcacactagctttgaccagcaagctgtgtgcagtcataggatcatcgattgttccaacatcggatgataataacagcgtgttacttccagtaatctatatactccatctggctaattaagacagatagatgggttttgatccagtgatgttagcggtgactgacgcgggcgcgccacgccgccgtcaggtgaccgatcgatcgattgctcgtacgtcgccgtcgtcatgatgcgccatgggtcaatcactgcctgccatcatggtgggcggccggcgccggcgacggcgacccgtagatctcgattgaccgattagccggacaattagtgcagtattcagatccataagcccatttagaattttcgcttatatttatacttatcagccaaaatttaaatttaaatttttaattttaaaataattttaatgttttttcatcataatttatttttcagcaaattttatttttcgtttgcgatacgccgtttgtcttattcctcgaataagccagataatggggctgtttgtagggggatgaacagtatttcgggcattggttccagcttaaagtgattatctaattactgcaattccttgtgcaatctgactgctgctcccggtatatggcagacgattattgcacggataacgctgaagttttttttttaagcaaaggataaagctgaagtagtcgagtgggctgttggcctagggccaatgggcatctggtcaggccaccagaagatgggaattgggccgatcctgaaacataatgggcctaggaggccataattactttttgggccacttaaatctcatcgtttggcccattcggacttcggagtgtactccgctgccgtgggcgggccgcagggaagcactgtgaacctgtttgtttgggagaaaagtccggagatggtgagaagtcgttgatgagcattccgctggtgaacgccaaaagctaagaaattccgattccaagctgctagttcaggttttttggattttgtagctagaaattcttaaaatatgaacggaaatctgattgagttcctccatgagatttatttggaattgtattttcaggtcaaaccaaagtcgcaacaaagttatcgatccagggcagctattttctgcaactttgaacttgccaaatttcaatacaaaaacggatgagatggaagaccagtactgaaacaagcttgaaatcaggtttacattcgataattaaccactactagcatctagcaaggaaatgaccaacgacgacaacgacggttcatcatcctcctgttctcaggcagttgggctgatctgatcatcatatcgagatgtcggtcagtcacttcttcctggacttgcgctcggcccgccgtcgcgcgcggcgctgccggccgccggcgtcgtcgagctccgagtacttctcgtcgagttcctcgaaagatttcttcatgcaaccaccgacgaaatcaattaatggtgagaaaaatgcatggttgaagatggggacgacgacgaggagagctagcagtatagcagacgtacgtctcggagctccatgaagctgacggcgtagaaggtcacggcggcggcggcgacgatggtgaggatcggaccggcgaactgcgcggctacaccttccatgagcgctagccgctaggttactggttctgatgagaaagaggctcaaaagctttttttctcagccaaccactactccagtagcctgtgtaaccctatccagaattcagatagctcactccgtcactcgtatcagcatttgtcgatcacacaaacaccctccgaaaaacagtatatttatatacgtgcccttaaaagcatcaagtgatatcatatatcagttgataacaccttaaaccaatcttatatatgtcattatactattcaactatttagagtcatgccattataattttttagatatacatgggaaatataccactacacaccctttgatgatgtactgatctgattgctgatgttatactgagatattttcttacaagtacaaattcatcatatggtagtttacaaacattgcaggccataatatgcagaacatgtatagtcgtggcggggggagagcaacgtcgtgggatgggaggtgaatgtgatcgtggtgacagtaagcgtcgaggccaatcgtgatcactgcagtaggagggaagaaacatatttctattggtagtttttatagggcctatacttttcagtttcagagaattaattatagctcatctcttggagagatgatattttcacatcttaaattttgtttaggattatctttactattataaaagtttaagatgtttttgccgaaactattttcgtacctcgtggtatccgattctgctcgctcatgcgccacgccccacgtcgcgttcgcatgcatccgagtccgtttcgcatgtgtttcctccggccgtgagctggttaattagtcgactgtatgatcgttccgttcgacgcaatgcgagaaggttttccgtgcgcagcaaaggccggccagtccggatcaagatgtactgttaattatctttgcacgtagatagattttgcatgcatgcaaatcacagctagactcatattttcctggagcaaataatgactggctagcaagatctcagggatcattgcgtagaggtcagaaggctatcccagcacgatagctggttgtggagaaaataacaaaacacgagatagattcaattttcaataggtgcaaatttgcagtaaaaaactagaaatataaaaagtgtcatccaaactatatatggtaacaattgcaaatcgtgaagataaaatttatcaaaaaaattaaattattttttaatttatttgaatttgatatggttctcgtgcaattaccattatcttaccttagtggtaacctaccatgtaataaagtaattcatttattagacgtataagttttagttaagcctatggtgggtgacagtcacataaaggtcgagtgaggacgcagatcgaggttgttcaagttagatcaaagctggtgatgctcgatcaaaggtcaattgaattaatttggatcaaggaacaagtgacattatagagctctacaccattaagtttttggatgtcattgcacgtgctccacatccacctactgttgtagtgttgagagatgtcctcctcggagggtgaaccctccagctatagtcggaacgactcaagatacaatgtccatttatgagtccttcatcctaccatactagattgcctagggtgaaatgacaataagaaaaacctaacatgtatcatctctctttttttttatctcgattaaaccaaaacatgtgccgctaaaaatattcacccggtgtaacgcacgggcattctttctagtggaaaaccaaattttggggatgaaactttaggattctgttggcgatgctcttagatgacatgcaagtaacgatggggcatccctcgaggatgaaaattcatatctcatatattcccaagcacaaaggtatgtttagaaattcaaaaggaactataatatttgaattgcatgcatttgtggtgatatgatacgcaccatgatatatactgtgttttcattaattcttgtatacagaactgtaaaaaggatatgcgtaagtccaattaaactatatatactcatcgagcgagcggtaggcatcatcgtgatggctggcgacagatgataggaaagatcgtctggatatagattgtgcacggccgtggtccctcgttccatgtcatgagcatacaaagcagctctgttgttcagcaaccagtaataatagatgcaattcggttttaggccagcttcctccgcatcgaacgacgctccaattctatcttgaccgatgaaaaacgaccttcgtccaccgagcgacttcaccttcatccatgtcgctgatcccttcgccgccatgtaatcaagcttatagacgctgacgcgcgcaacgatccggaggcatcggatcgggtatctaaaccaaacgcagtacagctccccgtccgattccacaaggttagtggagttggacgtgcacgccaccgagacgccctccgcggcgaccacggtgaccacgggctcctgcgacgacagctcgagcacggcgaggcggtgatcgacgaggtccacgaggagcttgctgccgtctaccgccgtgagccgccctatcgcgcggaggacgtcgtcgcggtgctcgtggtgaggcgtgccgggctggaggtactcgtgcctcgcccattgctggtcgtcttcttcttctggtggtggtggtggtggttcgtcggtgccgttgccacggccggcgggcgccggacggcaatgccagagcaccgtgtcttctaggtcgacgacgagcacgacgcagccggggtccgtggggcggcggcgcgacaggaggcaccggcgccgccagtggtctacggcgaggacggtgccgtcgtggtcgggcgacaggccgatcctggtgccggtgaaagggtcccacaggaaggtctccggagagccgcggcgcgccatgagcagccagccctgcggcgtggcccagattcggtggtctctgacgaacgcgctccccgggtgaaggcacggaagatgcagcatctcaccccgtggcaggctatacacggacatgccgtcgccatcgtcggcggcggcggcgtgtcccactcccagcagcagcagcggagcaagccggcgatccaatgcatcagatggcttgtggcctgcctccatgaattcgatctcaatttactcctcttcttggtgtttttttcctgatagagggtatggctggtgaaactgaagcaaaaactcatcaatatacatgtacgtattccatgatttatagtaacagagatttgtttccatgtcgtaagtaagaggtgtccggaggaaacacgaaaagaaagcagcataatacgcggcatgcaacacacgtataacagaaaagggaaacactaatcatctcttaagggaatatcccctcatttttcatgtagcttaaaaagtcatcaaattttttttaaaaaaatcaagatagatcaatatgtgatatatcacttcacaaatatgcatgttcaaattcaaattatacaattagaaaaaaaacaacaaatttgatattgaatataacacgtaattcgcagttaaatttattatttttgtttcgaattgtataagatgagatttaacttgcatgtttgccgaaagatatatcatatatttatttatcttaatattttttttaaaaaaattaatgcctttttaaatgatatgtacaaaatgagaggatatcccctcgagggataaaaatccatcgacatctccaaatgaaagagagagagagaagaattcctccctctcgatctccctcctcgaggcctcgaccaatcctgcacaccgcacgtgcgctggtgttgaacgatctagaaagcaaaagatggagccgacgagcttcctcgggttgtttttatttttgctgattcgcgttgattaggggaaacggaaataggagatcgagtggataaaaaacactcaaccaaattttggagattaagaaagattcgactggatttgatggggagggtcagctccgcattgtacaagcacgagactgttgttcggaggacgctacgaaaacgggtgggtctggcttgacagcttgcaggtaattttcagagcaatatattagctccggtagtgggcacaattacataaatgtaatgaagatggagagttcctgattgttgcatatcgtaggcttgaaacgacggttatgcaacttttttctaattatggatggagattcaccaatagaccggaataatgttctccttgtcctgttcggttttcttctattttggttttgtcacgccccgaatgtcacgcccggaaattcactagtaatttccgaacttatttgtgcataaaatcctcgtccaggaatcaaccgaggtacacaaattgacaatttaatatacagattcatcaaattaactaaaacgataaatacttacttaagaggcacttagtcctcaccaagaagaaaactgcagcggaaaataaaatctagcgaagctccggctccactcccacaggcagctcaactggggtataagccaaacgtcttctccttctgaattctttttcttcaactgaggttgatcgattattgcaagaatgagcatatgacatactcagcaagccacacagcaaatatgcaagtgcacaaagataccaaaggatggcataatataggttcatttgcaaaagcagcatttagcaaaacttttaagagaagtaaaaacagtggagtgattaatcagaaattttaatcaacactgaacagcacacccatgctgcacaggcccaaccatcctgaacaaccatacccggctgtacagatctaactccaaaccaggagctaagcaaattattaccaggtataacatccataattattgtgagaggtgtgggactaatcacgaaaaacattgttcaactcgcccataaccgcgggcacggctattcgaatagttttactctggccagaggtgtaccactgtacccacaagacacagccccacatcatgtcaccatgtgcctcagtaccaccacggtacctcggaaaggggctgtgacaataccccttgcacaacacaatccaccacagcgcacctttcctggatcataatcaccccctcaataaccagaggcatggactccccagcgacccccgtgggcttatctctgccacttctcagtctgatgctccgcaatgaaccatgctgtacaaaaggtaaagccattgcccacgctagcttgtggttggcacgattaatgtttcacaatagtagctcgcgaaccggtccttaattgtcatgagcacgactctcaaaaccatatgctcacaacccaccattatcaagttttagttggcaaataattaattaaccaatcacgattgaccatcgtgaagtatcattaagccatccttaaataataatgagtcataagttatcccaatagtgtgctaatgtttctaagcatggctaagcaattacatctaatatctagctgaaccaatatataaagctcaactagtcaagttataacaacccaaggtatccaggaataaagtaatcaatgcaaattggccataacaaaggaatagattctttattaacctgttaatcgataccagtcccaggaaacagtgctggtatcacagggagacagaatatcacagcaacagaagtctctttattatagagtagaagtacagtcatgttgggctgcgaacagatcccgagctcacaactgcattacaaaaggaaagcggaagccaggacttggaccaatcatcacaggcgtgacttgggaactaggccaaaaccctaaaactcatcgtagccggcttgctcctggaagaactcctcatcagccggatccgcttcatct

SEQ ID NO: 9051 - DNA, 3162 bp, Oryza sativa
caactactgcttttaaatgctagctttatgcaaaagaacctctagcctcctttggttatatcctgcatcatacctcctcttccggtatgactgctgagtacagtgggtagtactcagtcttgctctcttttcccccacaccagagctgaagatcttcctagttggagctgttttgtcaaagttggtttcgtcgctgccgtcaaggattgcctgtggagtggagtcgcccgctgctgaagtcaagcttcccggtttagctcgcttttatctcttccgctgcatttgtaatcttttctatttttgtaagacgtggatctgtaggtcaacaattgtcgtttgtgtaccctggctggtcctggacagggatttaatgcacattcagcttagaaattctggttcgagaatttctgggcgtgacaagttggtatcagagccgaccttgaccgtaggacaagccaactggaaaccctaagagccctccgaacccctttttcatctgcatatgcctttttgcacctggaattgttttgggaaaatttggagttttgcctctttggtttgcgggaaaaatcttggtcgttcattcggatcggatttttttttttttaaaaaaaatgagctcagcctagggctttagaaaaattttagttggagtttattcgacagtcagtcgggaatttattgggggttatgcattaggtcgtgtctatattcgatgggggcaatgttatgcgcatcattttccatgcaactagtctatgcattaatttattgtttagttgcattagtgtctttatttgagttcatgaaaaatgttctatgcataaaaatcatcctgctcggttatttatttgagtcttcttttgctttgtttaatttggatttgagcatgaattggttcctatcccttgtctactttagatgtcagtcctatccctcgtttgcaagcgccgctccgagcttcagagtcgccgcccttagctttatcgccttcttagtctgtttgcttgctagttttcgtgtttaggtttgttgcttgtgggttagtcggcggtcgatatcatgtgtcagtggtatgactgcctcaattaggagttgcgtgcctctttttcagtgttttaatcaagattaagataattgcacttaaattcataagcaagattagtttctgagcccctgttttcttccttttctcatatttctacctaccccctcagatggagacaaggaatggttcacgcgactccaacaacgccagtggcagcgaagagccgatcaatggagcacgtgccaacggtgcatctgacaacagtccgtccccaccgcccgagaacccaacaattgctcaggtgttggacaatcagactcggatgatgacaatgatgatgcaacagatgcagcaacagtaccatcaggtgttgcagcaggtgcagcagcaagcacagctgcagcagcagaacctgcagtttggtcctccacctcctcagtccaaactgttagaatttcttcgtgtcaagccgcccaccttctcaagcaccaccaacccaatcgaggcccacgactggcttcatgccattgagaagaagctgaatcttttgcaatacaacgagcaggagaaggttgcttttgctacacaccagctacaaggtcccgcttctatttggtgggacaactacatggtgacccgtccaactggggcagaagttacttggacagagttttgtcatagtttcaataaagcacaggttcccgagggaattgtggcacaaaagaagagagagttccgttccctgcaacaaggaaccagaacagttatagagtatttgcatgagttcaaccgcctcgcgcactacgcccctgaggacgtgcgtaccgatgccgagaggcaggagaagtttctgtctggtcttgatgatgaattgaccaaccagttggtctctagagattatgaggactttgagaagcttgtggacaaggctatccgtcaagaggagcagtgtaacaaaatgaaccgtaagaggaaggcagcccagttcaggactccccaggggaagtgtcagaagcctcgtttcacgatgggacatcacggtggaccttccaccatgattatccggcagcaccgtccctaccacccgggtaacttcaacaagaaccaccatagtgacagtcacaacaatagtaagcagcacagcctcaaccctactccgagttcactaaagattccagctcaatcagttcagccagctctgccagaacagcccaagaggttgggagaaaaacccgaactctgcttcaattgtaacaaacccggacacacggttggaaagtgcccgaagccaagacgtgccggacccaagttcgttcaggcccgtgttaatcatgcatctgcagaggaggcgcagtcagcaccagaggttatattgggcacattccccgttaactcgacaccggcagtaatattgtttgattctggtgcaacccattccttcatttccaagcgttttgctggtgcacatgggttatctttagtgaagcttaagataccaatgcgagttcatactcctggaggtggcatgaccacaactcactactgcccatctgtgacagttgaaattcaagggttgatttttccagccaacctcattcttctcgaatccaaggacctagatgtcatacttggaatggattggttggcaaggcacagaggagtgattgattgcgccagccgcaccatcaagttgaccaatgcaaaaggagaggtggtaatcttccagtctccagtgccgcagaagccagggattagtttaaaccaggctgctggtgaagaacaagaggtagcagtggagaaaaccactaagaagctggaggatattcccatagtcagagagtatccagaggtttttccggacgatctgacaacaatgccaccaaaaagggatatcgagttccggattgacttggtacctggaactgcaccgatccacaagaggccttacagaatgggagccaacgagttggcggaagtcaagaagcaagttgatgaacagttacagaagggatacatccgcccgagcacgtcgccttggggtgctccggttatctttgtggagaagaaagacaaaaccaagaggatgtgcgttgactaccgcgcactcaatgagg

SEQ ID NO: 9052 - DNA, 2393 bp, Oryza sativa
cgctttcaccgccggcctgcctccgtcgccgccgattggtgcctccgcctacacggctggcctattatgccgccgctgttgggcgtctacgacttcaccgccggcctgcctccgtcgccgccgattggtgcctccgcctacacggctggcctattatgccgccgctgttgggcgtctacgacttcaccgccggcctgcctccgtcgccgccgagtggtgcctccgcctacacggctggcctattatgccgccgctgttgggcgtctacgacttcaccgccggcctgcctccgttgccgccgattggtgcctccgcctacacggccggcctattatgccgccgctgttgggcgtctacgacttcaccgccggcttgcctccgtcgccgccgagtggtgcctccgcctacacggctggcctattatgccgccgctgttgggcgtctacgacttcaccaccggcctgcctccgtcgccgccgactggtgtccccgcctatacggtcggttggtcacaccaccgttgatgggcatcgtcatcttcaccgccggcctgcctccgtcgccgccgactggtgcctccgcctacacggctggcctattatgccgccgctgttgggcgtcttcgctttcaccgtcgaccgccttcgtcgccgccgactggtgtcttcattgttattgatggacaactttgttcccacattggccacttctgccatcaccaaggggaatattacaaagctaagtcatcatttattttattctttatatgatatttttccttttcctctgcctcactacaccaattggtcttccattgagtagtgagtcgggggctacagatgttatatcatattttttataatatttatcttgattgcttgcgacataatctgagtacaaaagtacctatcgagttatggagttctatcttcctatgctttccgtttggtttgccaatggatggctgcctttgggccgattcctagcacccgggggctcgttggatggaccgagtaacgcaaggtgctaagtattattcggaataaatcaaaagcatagagataagataaattcattttctgctcttaataattgcaaaagtacccgagtagtaaattctgattcgtgaaactttgttccattaatggcgaactcatgtcactcatatgcatgtctgggaagtgcctaggccgactcccggtgcttgggggctatgactagtcggacagagcgtttaaacgtaatgaatcatctgctcggggaaatcaaaattgacaagaggagaaatacatatttataaatattttaaaatacttgattttttctcgagtattatatttatatcagatactactcatcctatatgtttgttctgcaggatccagatccagatatgcataaaagggattcatggctttaagcttacctcttacgctccaggaatggatcagtcagaacatcaccaccggctcgcctcgaccgccgctgactggtgtttccgcctgcacggctggcctattatgccgccgttgttgggcgtctacgtcttcaccgaccggcttgccttcgccgccgccgactggtgtttccgcctgcacggctggcctattatgccgccgctgttgggcgcctacgtcttcaccgaccggctcgcctttgccgccgccgactggtgtttccgcctgcacggctggcctttatgccgccgttgttgggcgtctacgtcttcaccgaccggcttgccttcgccgctgccgattggtgcttccgcctgcacagctcgcctttatgccgccgttgttgggcgtctacgtcttcaccgaccggcttgccttcgccgccgccgactggtggttccgcctgcacggctggcctttatgccgccgttgttgggcgtctacgtcttcaccgaccggccgcctcgtccgccgccgactggtgcttccgcctgcacggctggcctattatgccgccgttgttaggcgtctacgtcttcaccgaccggcttgccttcgtcgccgccgactggtatcctcgcctgcacggctggcctattatgccgccgttgttgggcgcctacgtcttcaccgaccggcttgccttcgtcgccgccgactggtgtcctcgcctgcacggctggcctttatgccgccgttgttgggcgtctacgtcttcaccgaccggccgcctcgtccgccgccgactggtgcttccgcctgcacggctggcctttatgccgccgttgttgggcgtctacgtcttcaccgaccggccgcctcgtccgccgccgactggtgcttccgcctgcacggctggcctattatgccgccgttgttgggcgcctacgtcttcaccgaccggcttgccttcgtcgcgccgaccgatgtcctcgc

SEQ ID NO: 9053 - DNA, 3304 bp, Oryza sativa
atttcctcgcaaaaagaaaaaaaagaagtcctcatgctatccacttgtcgatcagtttgactgtatgtgccgttcccgtaaagcagttgtggcttaggctgtgtttagttcctgaaaaaggttaaaagtttgagaaaagttactagtttgaaaaagaaagttgggggtttatatgtgtagcaaagttttggatgtgatgtgatgtgatggaaagttgaaaagttaagggttaactaaacacggccttaatccggcaaccaattaataacacgcgtgaatgtcgtagtacggtacatagatgctgtggtcgatcgagaatcacatcttgtcgatgtcgccgttggacaggggcacagccctgatgggcctgaatgcccccctgattcaatgcttcatcgtagccacgtctcagggtgaacagggtacgtatgcacattgacgtaggtccagcctgtggatcggcaatgcttcatcgtcgtcagagttcaatcggccaggcagccagaggcaggggaacgtggtgtcgcgcggctcgtccgtctccggtctccgcgcctatgttgtccggcgttcgggggaggagtagggtcgccgccacgttcatcttgttgttagtttcctcatctcgatcagtcgatcgcggctgcgattctaccgatcgatgtcaaattgtcaatcatggtgcattgcggtgcagtgcatcgcgcgtccgcgtcaggattctgcagtgctgggtccgcagcagagatacgctccggcggccggtgctcgatcggtcggctccctaacccaccaccgcgtcctactatggctacagaatgcaatgtccgttgtttgtttgctgcttccatgtcaaatgcagtacgcggtgcaggaagaaacggacagcaaaaaccgtcgatcgatggaagaaggctacttgtgtttggaaactcccaacaccatgatcgatcgccgagcagcgagagattgcaattgaaattgaccgaccgatcggtattcggtcaggttcgttcggtgaggccaaattaaaagcggacgtacatgggactgcggggcggcaacactcgtatcatatatatgccgctttccacgtacgctttcgaggaatagcgacggcacgacgggctgctgctgccgctgcgtttctctgtacgtgcccatactccctccgtcaaaaaaaaacaaaccctgatttccgtgtctaacatttaaccgtccgtcttatttaaaaaaattaaaaagataagtcacgcataaaatattaatcatgttttatcatctaacaacaatgaaaatacgaattataaaaaaaattatataagacggacagtcaaagttggacacgaaaactcaatatttgtcttttttttttttgggacggaggacgaatgttgtatcggtcggtcggctggtctgacatttctttctcatctcacaaagtcaagagtctcaggtcatcctcctgcgtcagggagcgtcctcccccgattgttgtgtagccaactgcatttgtacacatcgatcgatatcctagcatctgccgagctgcagccatgcaatcgtcaacatcactgatcttattatgatactagtattatctatccctaagctagcggtgtgtgcgacatcatcgtccattatctgaccaggttggcatgcaggttcccatttccaaaccatcttaccgtctgttactagattttactaccagacagaattttttttcctttgaaaaatagtagatttacagtttgtgcccagaatgttttgttagcatggtaaaagagataggagtaccagtgagcagcaagcaggtcgacagttaaagcggtactccctccgtcccaaaatataaatatttttagcataatggcaagttaaacattattaactttaactattaataaaaaaaataaaaaaatcaatcatgtaaaattaatgttactagatttatcattgaacaaactatcataatatacaactctttttatttaaagcatcttacttttatagatattgttagtcaaagtagcatcttggagaccgcgtcagagtccaaaaattcttatattttgggatggatggagtacctcttttcaacttactctctccctcttttttcttaagcacgttttttgaattactatactctgtgtgggttttaaaaaatatatatagaaaaattgattttaaaaatcatattaacctatcttttaagtttattttagctaatgcttaattaatcatgtactaataatttttttacacgtcggaaggtaaagtttccaatctctactttcaaacgcagccttatagatgtatcgaaaatgcagtggaaaccatgggaatacaattgttagagggtactttcgtcttcgggttcatgtacggtgggaaacggtcggaaatgatatcatgtttatcaaacgattcacggctgagttgaaattttcatatttatcaatttaattaatagtggtgatttgatgcttcaatttcaaattttatatactatttgaattggaacagtccagaaaaggacatcacctttacagaaaggggcccttacagaaacaatatatgctccgctgatgggaattttagtcaccattttcatttgcgtgcagcaaagggaaattgctatgtatatgatccaacggttcgacttatgttcgattgaatttaatcaacagttacaaacgactgcaatacacatgaacatactctttttgaatgatctatgatcgtatgcctctagttgtacatgagttgtacaactgagtcatatgtacatgagttaggaacagacgtggcttcgtggcccagctcgaagaggcccgttggtgaaatggcctcttccatgatcttcacaaaatttcggcctttcagtcgtcagccgaagccagcaaggccgcaaagcctgttccgcgaaaaccgcagaattttcgggcccagcctgttgaaagcgctccacggtccgtcggtcccggttggaggcctggaagtgggttactgggcttgtgatgaggcctggaagtgctccaactgggctttctgggcttggcgctcagtaatgaggccgtggcccacagagagacgaggccaccactactattttgattttccatgggttttagtactttcagcaaattactgttcttttcatctaaacaaaaatgaaactatacgtgttttcttcttcttgatggaaatatatactccctccgtttcgaaatgtttgacgccgttgactttttatcatatgtttgaccgttcgtcttattcaaaaaatttaagtaat

SEQ ID NO: 9054 - DNA, 11315 bp, Oryza sativa
ttcatcactcggtacgggttgttcgaatgcacagttatgtctttcggactcactaatgcacctgccttcttcatgaatttgatgaacaaggtgtttatggaatttctagacaagtttgtcgtggttttcatcgatgacatacttatctactccaagtccgaggaagaacatgagcagcatcttcggctggtacttgaaaagttaaaagagcaccagctatatgccaagttcagcaagtgcgacttctggcttaaggaagttcagtttctcggtcacatcgtgaatgctcaaggagtagctgtggatccagcaaatgtggagtcagttaccaagtggaccccaccaaggacagtcactcaggttcggagtttcttaggacttgcgggctattaccgccggttcattgagaacttctctaaaattgctaagccaatgacacagctattgaagaaggaagaaaagtttatctggtctgctgaatgcaataggagttttgaagaactcaaacgacggttggtgtctgcaccagtcctaatcctgcctgatcagacgaaagattttcaggtctattgtgatgcatctcgccaggggctaggatgtgtgttgatgcaggatggcaaagtggtttcttatgcttcacggcagttgcgtcctcatgaaggcaactacccgacgcatgatctggaattagccgcagttgttcatgctttaaagatttggcggcactatctcatcggtaaccgttgtgaggtatatacagatcacaaaagtctaaagtacatctttactcaacctgatttgaatctcagacagcgaagatggttggagctgatcaaggattatgatatgggaatacattatcatcccggcaaggctaatgtggttgcagatgccttgagcaggaagagctactgcaatgttgcatgagtagagcaactatgttgtgaggttcaacgcgacttggaacatctgaaccttggtatagttgagcacggattcgtggctgccctagaggcacagcccacactggtggagcaggttcgcatagctcaagcaagtgatcctgaaatagcagagcttaaaaagaacatgagagttggaaaagcccgaggttttgttgaggatgaacaaggaacaatctggatgggagaaagattgtgtgtacccgaaaacaaggaattaaaagacctgatactaaccgaggctcatcaaactcaatattccattcatcccggtagtactaagatgtaccaagacctcaaagaaaagttctggtgggtcagcatgagaagggaaatagctgagttcgtagcactctgtgacgtctgtcaacgagtaaaggcagaacaccaaaggccagcaggtttgctacagccacttcagattccagaatggaagtgggaagaaatcggaatggatttcatcaccggtttgcccaggacgtcatcggggcatgattctatttgggtagtcgttgaccgactcaccaaagtggctcacttcattccggtgcacactacctactcagggaagaaattagcagaactctatctggcaagaattatgtgtttacatggtgtacctaagaagatcgtgtctgatcgaggaagccaatttacttcaaagttctggcaggaattacaagaagaattgggaacccggttgaatttcagcaccgcttaccatccacaaacagatggccagaccgagcgagtcaatcaaatactagaggatatgttgagagcatgtgcgcttgactttggtggagcatgggacaaaagcttaccgtatgctgagttctcgtacaacaacagttaccaagctagtttgcagatggcaccgtttgaagcactgtatggacggaggtgtcgtactccgctcttctgggatcagacaggggaacgccagttgtttggtacagaagttttaaatgaggcagaagagaaagtcagagctgttagggaaagattgagaatcgcgcagtctcggcagaaaagctatgcagacaaccgccgaagggagctcgttttccaagtaggggattatgtgtatctccgtgtcactccgctcaggggagtacatcgcttccaaaccaaaggaaagttggcaccacgctttgtgggaccatatcggattttggaacgtagaggtgaagttgcttaccagctcgagcttccctccaacatgcttggcatccataatgtgttccacgtctcccagttgaagaaatgtttgagagttcctgaggaacaggcaagtccggatcaaatcgaaatccaggaagacttgacgtatgtggagaagccaactcgtatcctcgaaaccagcgagagaaagaccagaaacaaagtaataagattctgcaaggttcagtggagccaccactcagaggaagaggccacttgggaaagagaagatgagttgaaggccacccacccgcacctcttcgccagctcttccgaatctcggggtcgagattccgtttaaggggggtaggtttgtcacgccctgaagttttcccccctttgcttgctttaaaaattggctaaataaatcgtccgaagaaattatcttaattaacctagagctaattccctaattaataaatgcaaataataatcggaatcggcatgtggaatttttcttggattctacatgtcacaatatattaacaggatttttagtggaattttcagagccttggaaataatttttaccaattaaaaatcaccaaagtgcaatttttaatcccaggaaaatcctttcttctttttcttttttctttttcctcctttttcctcttcttgggccgtcggcccagtccaccccgtctccccgcgctcggcctttcccttgtgggccggcccgttctccttcccctctctccgggacgctgacaggtggggcccacctgtcaggtcgtccccttcctccagccacccgcctccgacggcaaccgccgccgaatccgccacgtcgccgcctcctccgctcttcccgcgcccacgccgcgccgctcccgcgtccccctcccacgtcgccgcctctcccccgcgtctcccgccctcgcgcgcctcgcaaatgggcgggattcgaatttgaatcccacccctctctctctcccccaccttcccacgtcgccggcgcaataggatgggttcccggccacgtccgcctccccctccgcctataaatcgttccccgcgtcttcctctctcgttttttcgcactcgccgcgctctcccgtgccgtctaccgccctcgcgccgtcgcacccgagctccgccgctggccgccgccttcggccgcgagccgccgccgctagagtcgccgccgcgccaaaccgccgccgccgttagcttcgccgccgcaagagctttcccggccgccgcctcgcgtcgccggaatcccaccggagcacctctcccctcgcgagccggtgagtttttccctcccctccatctccggccggcaattcaagccgccgtggtcgtcgtctcctctcctaacgcctctccatcttctcctagggtgtcgccgccgcccgtccgtgcctccgcgtcgccggtcatcgccgctcgtctctttccacgccggtcgccgccatcgcctcggtgaggaatcccttttcctccttcctttcctctcccccgtgagcgccgccgccctccgcgcgtgcgccgtcatcttcggctgccgccgccgccttcgcgccggccgccgccgtctccccgcgccgccggtcaccgccggcggtcgtgcgccgtcgtcgcctcgccatggccggccggcttgagccgtgccgagcatgccgccgcccactccctcccccttgagccactgcccgtggggcccacatgccggcgcctccctctcctttccccttagtgccgctgaccagtggggcccacctgtcggcgcagccgccccctcccttccgctgacgtcagccctgggactattgcgcaataaatatattaaggcttttcttttatagaaataaacacagtttatcttctaaaattcataagtaattcatccgagctccgtttaagtccattcaagtctcagtaaatcaagaaaaatgcaaagaatccattaaaaatggttttgtttcctgtttctgtagtcttatagcatgttttgcttgtgtgctttgtttgtcgcgtaggtttcggccgtttcgtcgatccgcagtttctcgaagacgttgctgtgatctcatcagtgcgagagcaaggcaagtcatacattgcaattgatcatattgtacccaatttacaaatgtcccgcatttctattaaatattgcattgttttacaatgtaatgtgggatgggtcctattcctcagccacatattggttaccttatgccattgataacttggggatcaaaatgactagatgttggcctaggaaatgcttagccatgcttagctcaactagcacacaaaaagggatcacattattacatagactttgtctattggcatagctttagattggtgccaccgcaatggtgttagttaattaaaatacattgaatggtgggttgtgggtgcatggttttgctggtcgcacccatggcaattaaggaccggttcacgggaaaccctgggagacttaccgtgcttaccacaagcgggagtgggtaactgcttgatctgaagtatagctcgaccctttcctaggcaccggtggcgagggtgggcgtgatggagttgggtcggccggggtgtccggttgtccagctgccggattcaccgcggcgcaagaggggaccgcccactgccttttgaggggtgggggtgaaaccttagcgtggtgtggatggttaggggagggttatgtggagggtcttgtcacgatttccccctttgcagtatcatggtgatacttcggggcatggcgacatgtgtggaatcgtgtcttgtgggtacagttgtacacctctggccagagtaaaactattcgaatagccgtgcccgcggttatgggcgatcaaccagattcaccgtgattagtctcatccctagtttagcttaatgaactggtgtagttcaggtggttggttgggcctgttgcaacgtggtgtagcgttggacagtgtttggttaatattgattaattactacaactgttttactgctttcaactactgcttttaaatgctagctttatgcaaaagaacctctagcctcctttggttatatcctgcatcatacctcctcttccggtatgacttgctgagtacagtgggtagtactcagtcttgctctcttttcccccacaccagagctgaagatcttcctagttggagctgttttgtcaaagttggtttcgtcgctgccgtcaaggattgcctgtggagtggagtcgcccgctgctgaagtcaagcttcccggtttagctcgcttttatctcttccgctgcatttgtaatcttttctatttttgtaagacgtggatctgtaggtcaacaattgtcgtttgtgtaccctggctggtcctggacagggatttaatgcacattcagcttagaaattctggttcgagaatttctgggcgtgacacgttgcacggggagtacgccggccgttacgccggcgctcgatgttgaggcgggcatccggctccccatgctgatcctcccgagtcgaaggcgtcgacgagggagtggcagccgaatgacgtgcagccgccgccgctcgccgcgccctccgtcttgatgacacggaaccggtggtggcggcgccggaggtcttggtggtggcggaccgtccaccagcacccaggcgctgctgggccgtcatgaccaagttggccacgtcgtccagccatcgctgagctggagactcagggtcatggacgacgggcgggtgacgtaggagcgcgccagcagcctgaagcgcgccctgaggcgtgctgccgtcgccgtagacgaggaggcgacgctccccatctcgccgttctcctgtatcacccgcgaccggtgatgctgcggatttatcaaccctctcgagcgcctccccctgcttaggactttggtgtggaggaggtgggggagtacgagctcgacggcgtgggtttggctccccgtcgtcgccgctcacactcggagagaggtcgtgcacctttgcttgctcggccattaggctgatcaagaaaaacttggcgcacacggaagagtatgagagctcagaaaacacacgctgagccccctacctggcgcgccagatgacggagctcgtggctcctcaccgggagaccgcgcaggcccccctttgccggttcggccgggggcttagggtgagatctcaagctctctctgtatgtggaaagatcgcttgctcggaagaaacgcgagacacgtcggcgatctatacaggttcgggccgctgctcagcgtaataccctactcctgtgtttttgtggatttgtgtatggacaagttacaaaggattaactccctttcccctcagccttccaaaagggaaaaagtccccctctaaatgggcaaggtcctccttttatatctcaaggggataccacatgcacctttctctttccaaactggactgttctttttctctttaatgggcggagatcggtacggtttccatccgggagcccttctgatgggacaacccacacctacccccacctcccccgaagacagagatgacgcgggaccgtggctgtctgtcgatgacgcgaccagtgccagaccggtcattcttgtccaccacgcgtcagcttaacaacgtgcatgtttgcccttcttcgtgtaacaccttgcctgtaatggttaggatgaagcctggtataaatctgaccagggctaacgtgccatctctaagagataacaccctagctccggcttgagacgagtgcctagaggctttcgtcttgacgggatggggcaaggcgtgcgtcagaccgccagccgccacctaacccgtgatctgaccggtctgtgactggtcacagaccggataaaggaacgcactgtactgcgttgcatgcagcgtgacacgcttgaccagactgcaattaatgctgttaggtgagcacagctgtgctcacttatcccatatatgtggcgcagacttccttaaagggtcggggtgcctcggccctcggggccggggcaagcgcaacccgacccccccccccctcgggggaaatcaggaggagggcggacacctcaccctcgggcccgacgtccccgaaggtgccaggccacgtgggcgattgcgtctgcctcaagcctctggtcatgatactcccggtcccatatcaccgacagcgccggccgccgccgtctccccgcgccgccggtcaccgccggcggtcgtgcgccgtcgtcgcctcgccatggccggccggcttgagccgtgccaagccaacagccacgcccctctcccgccctgtgccgctgcccggtggggcccaccagccggtggaccacccctcccttttagccgccaccagtggggcccacatgccgacgccccctccctctccccttgtgccgctgccagtggggcccgcttgccagccgccccctctccctcccttagtgccgctgaccagtggggcccgcctgtcggcgccaccccctcccctcgctgacgtcagccctgggacttactgcgcaataaattgattaaggacttttctttattagtaaaaacacagtttatcttctaaaattcataagtaattcatccgagctccgtttaagtccattcaagtctcagtaaatcaagaaaaatgcaaagaatccattaaaaatggttttgtttcctgtttctgtagtcttatagcatgttttgcttgtgtgctttgtttgtcgcgtaggtttcggccgtttcgtcgatccgcagtttctcgaagacgttgctgaggtctcatcagttcgagagcaaggcaagtcatgcaatacgtttgatcatattgtacccaatttacaaatatcccgcatttctattaaatgttgcattcttttacaatatcatgtgggatgggtcctattactcagccatttattgtttaccatatgccattgataacctgggtatcaaaatgattagatgttggtttaggaaatgcttagccatgcttagttcaactagcacacaaatggggatcacctttttacatagactttgtctattggcatagctttagattggtgccaccgcaatggtgtgagttaattaaaatacactgaatggtgggctgtgggtgcatggttttgctggtcgcacccatggcggttaaggaccggttcacgggaaaccctgggagacttaccgtgcttaccacaagcgggagtgggtaactgcttgatctgaagtatagctcgaccctttcctaggcaccggtggcgagggtgggcgtgatggagttgggtcggccggggtgtccggttgtccagctgccggattcaccgcggcgcaagaggggaccgcccactgccttttgaggggtgggggtgaaaccttagcgtggtgtggatggttaggggagggttatgtggagggtcttgtcacgatttccccctttgcagtatcatggtgatacttcggggcatggcgacatgtgtggaatcgtgtcttgtgggtacagttgtacacctctggccagagtaaaactattcgaatagccgtgcccgcggttatgggcgatcaaccagattcaccgtgattagtctcatccctagtttagcttaatgaactggtgtagttcaggtggttggttgggcctgttgcaacgtggtgtagcgttggacagtgattggttaatattgattaattactacaactgttttactgctttcaactactgtttttaaatgctagctttatgcaaaagaacctctagcctcctttggttatatcctgcatcatacctcctcttccggtatgatttgctgagtacagtgggtagtactcagtcttgctctctttttcccccacaccagagctggagatcttcctagttggagctgttttgtcaaagttggtttcgtcgctgccgtcaaggattgcctgtggagtggagtcgcccgctgctgaagtcaagcttcccggtttagctcgcttttatttttttccgctgcatttgtaatcttttctatttttgtaagacgtggatctgtatgtcaacaattgtcgtttgtgtaccctggctggtcctggacagggatttaatgcacattcagcttagaaattctggtttgagaatttctgggcgtgacacctgctgactcgggtagctagctagtcgtagtatgcagtacttataagggcatctgtagttgagttcggcgagaaccatccacggaaacaaagttaattttggttcgggtgctacttcctccgttcaaaaaaaagtcaacctagtactaggctgtgacatatcctggtacaataaatttagacacagagtatgttcaaattcattatactagtatgtgtcatgtcgtagtacgaggttaagttttttagaacggagggagtacaacgctagcatcgatttatcgggcccatctagaatcagccgtaatctttcctccctcgcacaaactagcgaagaaacatttttctaaacggcaaaatcgactatgcgttaggttcgagatgtttttacctcacgcgacttttttttttgttgagaattacacagtacaacgcagacactcacaacgcacgcgcactcacccctatgaacacacgcacgcaaaccctacccctatgagcatcttcgaagactgggccggcaaattctggagagattgacgaagtcaccacaggcgcctcgctgtcgacgggtacgtcgcctaccactgaaagcacaacgccgttaaatcctggaaaattcgcacccatggggagtcgaacccaggaccagtggcggatccagcatgggagcggcggggtctcgagcccctactactggcgtgaagactatgagagaccccacgaagaccccactaaaattttttaccataagtagatgggagggaggactgtaactttatctagtttgctcagaccccactactatttatttctagatccgccactgcccaggacctcaggtgctactgaggctcttgtaaccactaggctacaggccctttcgcacgtgacgatttaacccaacgctgcagatgctctaagctaggagtacgtagctggtagatttaggttgagaccacagcacaaatgcggctcgagacgaggacgtttcacagatcgatggtgggatggatggatgggatgcctacgatcgagtggtcgggattcgatctctatctccctatcctatgtatccttcctaatacgcgcgtgatggatgctcgcggtgctagcattcatgaatcatgaatggtcgatgttccgagttcgtgtacgttggccatgtgttaagcatgaggagtgtacagcattagctagttatatgggtagctggtgtgtagtctttgcgtgggagccactccactacaattgatttattttctatagggataagaaagttgccaagtgatcgaccggtggtagaacctactcaccctggtttatgtttatagacttgacacgggtgctgtttacggttaaatatttttataatggtaggtagcatatcatcgacagcaaaaaccttgatgctttatgactatgatagatgaatgcccgatccagtctgtcacagcctcacaggtactcgtaacaaagaaaagactaaccacgagaagctaatagctatctagtatgtctctggaaaaagaaaactaaccatgagaaggtaatgcctatctagtccgactcgggacaattagtattgctcgggtcatatcccaatatactctccagcttctaagctagttttgagtttggacaaagagaccgtttcagatgacaaatataaaccactcatgagaaaaaaggatatcaaaatctcaacccaatacaagccacatcgagtcgttatctgctctcgaagctagccaccaacttcattgccgaggctaggtggtttttccacctcatattgtgtactcaatgcatctcggatcaatacatataaagaagacgtgaggctagcaattatctgttctggagggttgaattcaaaattatagctttaaattatcaggtcctatccatcacataatttaaaagctaattttgaattgtgcggattgattatccttttgcgacaaaattataccgtaccttctcactaagattatgcaagttttgttttcccttgtgctacacattttctttttaacgaacatttttt

SEQ ID NO: 9055 - DNA, 15375 bp, Oryza sativa
ctcacaacaactcctttcatagagtggcaaatctataccttgtatgctactctatgtgcgagtcactgcaattttataaaggatgtgtaacatactaagttttgtgataggatgtcgttatggaatgggattacttatggtgttgacatcatcctgcgcttctactttctcctcacaagtccagcgccatccaatcaatcccagcctgatgccttgagcaaggccaccatcgctggctgcagcaacaactgggcaacgccgtcaataggatgaaggaattgaggaaagaaagggagaagcgagaggaggcgccaatggccggtggctcgccaactagtcaggtggggataatgcgcccagctctctacacctttatactagataccaatagggatgaaaacggagcggatacggacggataatgctcataccatattcgtttttatattttttgccggatacagaaacgaatacggatagctcgaatacggaaacaaatacggactatcttgaatacgaataagaatcgaatatgattggacacgaatacggaaacaaatttttctcggaacacgaaaaccaatttaacttctaatagaaacaaatatcaacatatataattagctcattttatataaaatgtagtattatttataaatatttttaaaattttaaataatattaataatgtggactagtgttaagagatgaactactattaaaatctaaaaaggtatattgaaggtcatagagttataaagaaattgggtatgtcttgtggcttctgcggatatccgaatagcactgttcaccggatatccgaattattatctgtatccgacggaaatcttgataccatattcgtattcgtatccgatagaaaatatccgtattcgtatccgtatccgaactatccgagaattatccgatccgagatgtatccgtattcgtttttatctggagcggacggaaactatccgctccgtttttcatccctagataccaagggtagcaaacctgatacccgtaggtatcgtacctagcacctttgggtaccggctagtacctaagttccatacctcatatatgcaggtaccagacccactggtgctaagcctgatacatgtgggtatcatacttgatactcatgggtgctaaccaagaataatgtgtcatacgacatacctgcacacaacactgacaagcagcaaaacgggttggcaaggagcatgatggctataccaccacattgatagccaatcaaagctccagatatggtcatttcgaagaaggaaggggtgaggcccttgtctaccatcatcgtgggggagaacaccacatcccgtccccatgggctccgagaacttgatcgccacccatggccatcaggaatcccaacttccaccaccaccatctccacatccatacgacggtggggttgatagtacctccacctccagatcctcgaccaaatccatgaaaccacaccccctctctcgccgtgtccgtacctaggtaccaggtacctcaccgatgggaagcggggggctacgtcaggaacatggagccacaacaggaagtagagagtaggaagatgagctagggccagcgaagggcaggaggaggagtggcgagccatttttggctggcatatgggctaggaataggaggaggatggggaagacacgaggaggaggaggagggcattggatatgtggcgttggcagagagtgcattgggcgtgggtctttaagtatgtcgtcccctgaagggaactgtcctacaatatttcataagaaataaaatcacatgccctttagatcttgaaattcatttccatatatgatagttttctataaaaggaattcactaacttgtaggcatcatctttcttcatcaaccacatgcaactactcctatttattagataaacataaagatccgtgcattgataacattttcatcttctctcgtaacatggtgattgcatccgcgacgatactcgatttgtttcaagctagtatggtgaggctgcaaggaggattagtgatatttccttggttttgagggatatcatgagaaaagaggttatggtggagatggggaggaggtggggattcaacgttagggaattcttagtggttagataaatttggcaacaatatagttgttggagaggtggaagacggttatgtgtcggaggttcgatgagaaagtagaagatgacggtgatggatctagaagctgcaaccacctgagaggaggaaaattgtcacaccccgaagttctcctcccaagcctaaaatttaatttataaatgaccctaagaaaatgccggtgcaaatcaagagaaaaccctaaggaagtaatacaaataataatcgaatctgacatgtggaatttttcttgagttctacatgtcgaagttcactaacaggatttttagtggaattttcagagccctagaaataattttgaccaattaaaattgagcacaagcaatatttaaatccctggaaattcctttcttcctttttcttttttttctttttccttttcccttagtgggccgccggcccacttcctctcctctctcctcgcgccttgctgggccggccggaggccacgccccagctcagcccgcgccccctcctctctcccggggtcaccgacaggtggggcccacctgtcggacccgtctcccacctcgcgccgcgccgctgcgcccatgcctccgcctcctccgggccacgtcggccacgcccgcgcgtgcgccgcgtccctcgcgcccactcccctctctctcccgcccgcgcccgcgcccgagatggccgggattcgattttcgaatcccgcctctctctcctcccccacttccccacgttggccggcgattcccgcctctcccggccacgtccggcctcctctctccctatttaagctccgacgccaccccctctctctttttccccatttcgccgaactctcccgagctctccatcactcccgcaccgtgcatccaccagccgccgcctttcccgtcactccggccgccgctagccgccgctaggctcgccgccgcaccgcgccgtcgccgccgtcgggttcgcgaggctaagctccaccctggccgccccttccccgtcgagtttcgtcgccggaattcgcattccctcgcgctccggtgagttcaacctctaccgccatgaataccggtcgccgtggttcatctccctctctctaatctctctctctctcccttccttagggcaccccgaagcccgtccgccggttgccgtcgtcctcccgtggcttgccgtcgccgttccccgtggtcttcctccgcgccggccaccctcggtgaggcttcctctcccatctattcccctccctctccttcctagccgccgcttagcgccgccgccttcgcgtcgcctttgcgccgtcgcctccgccgccggttgccgtcgccggcaacgcgttcgcacgcgcgcgccgtcgccatcgccgtggccggcgggccggccttgagccaagccgagccgggtcgccgccgcccgtccgatcaaccccgggggcgatctgggccgtcggtcccgtggaccggcggtggaccacccgcgtggtcccggtccacggtgaaccgtcccccccccttgagtcgctgccgagtgggcccgctcgccggcgcccctttcctccctctcccgagccgctgaccggtgggccctgcatgtcggaaccgagcctcctccccccccccccccccgtgctgacgccagccctgggatttattacgcaataaatgatttaaggactttttgttatagtaataaacacagtgaatcttctaaaattcatatctaattcatccgagctccgtttaagcccattcaagtctcagtaaatcaagaaaaatgtgtagaatccattaaaaatggttttgttctctgtttcagtagtcttatagcctgtttgcaatgtttgccttgtatgtcgctagattccggttcttccgacgctccggtgtacttcgaaatagtcgccgaggttcctccagcagcagagcaaggcaagtcatgcttgtcacttgaacatgttgatcctatattgcaaatgctctattgttttccttcaaatattgcattgttttataatgttactatggggtgtttacctattgtcatagccatgctattgttgtaccatgtccctttgtcagcttggggttataacatgactagagattggactagggattgcttagccatgcttagttcaactagtgcacaatggggagaatcctattaatgtttagactgttggttctaatggtactgttggattagtgccaccgctttggtgttggttaattaaaataaatcacatggtgggctgtgggtgcatggttttgctggtcgcacccatggcagttaaggaccggttcgcgggatgccctggaagaacttatcgtacttaccacaagccagcgtgggcaacggctgggcttgtagtgtagctttcctctagccgacgcatccaggcaagggtgggcgtgatggagtttggatgggccctgcgacggcctatgcggcttccggattcacctaggcacgagaggggactgcccgctgccttgcgaggagtgggggtgaaacctgaggtgtggtgtgcttagttagaaggggttatgcgaagggtcctgttacggcctctttccggtatgtcgtggtggcatgtcggcgcacggaaacgtgtcgtggggctgtgtcttgtgggtatagttgtacacctctgatcagagtaaaactattcgagtagccgtgcccgcggttatgggcggtcaaccagattcaccgtgattagtctcaccctagtgtaatcttttgaatttggatagtttaggtggatggttgggcctgtcgcaacgtgggatagcgttggacagtggatagttaataataattaattattacaacggtttaaatctttcaacttctgtttataaatgctcgctttatgcaaatgaaccactctagctctcctttgataattccctgcatcatacccctattccggtatgacttgctgagtacagtgggtagtactcagtcttgctctattttttttcccaaccccagagttcgggtatgtgtcagatggaggtttctccgaggagtaggcttcatccgtgccatcgagggtgcctgtggagtggtgttcccgctgcagttctagtcaaggcttagctcctgttgtcttcctttttccgctgcatttatgtaagacttttatgatgtttgtaagacgtggatctgaatgtcaacattatcgtttgtgtaccccggccggtcctggacggggattttaatgcacattctgcttggaattctattcgggaatttctgggcgtgacaaaaatgcacaaggttgtttgctaagaaagtagaaatgtagaaggtcgtggcaaatataacagtgatgtgttggcaaaggaatgtgatggttcccgaggaaagccgattgtggcaatatgttcatgataggcacttaagaggggggaaatgaaagttaggaggttttccaagggaaatggaagatggtggtggtggatttggcaatggtaggcattggctaaggggtaagacgatagtgctcaaggtgtgtgacagaagggaagtatgcccacagtggtggatctagatattgtggccacttgagtggtgaaaatggtaaggggggggtgtgtttgccacataagtggaagattgtggtggtggatctcaaatggtaggcattggagaaagggatgacaatggtgcatgaggtttgctagggaggggaaagcccgtggtggctgttgggaagggagaagacaacaacatgagagaggtttgccaataaagagaaagtcgacagtggcaaatcaagtggtggtagccaattgaatgaggaacgcaatggacgatcgcaggaggggagcaggtagggaagcacggtagtcagtgggtctttactcttgagagggtgtcggcaaaattaggccatgaatgttggtagtggtacatagattatgtatgagagggcgggcaagagacagagagggagcggagtccttaaggtttataaagggatggaagtactaggaccatattggattaagggagtaactatataacattttcgacaattatttgggtgaaaccttttcaaatataactataatataattgaagtgtaattatagataactaacatataactactaggtaaaaacacgtgtgtggcctaggctagaaggaccggtgttcacgaagcatgtcacaggcttgactctttgatcccacatgtgctagcgaatgttttttattctttacccgcacaaatctcgaggtaatccgacggtcagaaattcaaatgttttagagggaaaaactagccgatgtttttttagtaattctgttggatcaaatggttaaaaaaatatagggtacaatgcttagattataaaaacacatatgcgctatacatcatgatttatgtaaaaaaaaagagccactttacatgcacttcactaaaacaggaggcatgtagcaccatcgagatcctatttaggagagtttctagcggctgcaattttcactagaacctctaactccccaaaacagttgaggttcttacttggtttctaaaaatctatagctatagaatgtagaaaatatactgaaaatccgaagccgggaaaattagctactaatcagctacattttagcatttgaactttctaaacagatcccaaatcaaatttcaggtcgttaccccgttcgacagtgaaacaaaacggtcaatcccatcgcccttgcgaagctacgctgcctacgcacacaggttaaactgctgcagacgcaacgtggcctccattccccgccgacacgttcctctgcacccacccacgcggaccgttcggcctcgtcgaacagcagcacgtactacccgatttctcaagcgcgcacgcaccaaaatctatctatagattgcgtgcgcgcgcgcgtgggggcaaccccaattatcccccggtgtccggtgaggcggtgagtgctacctccttaatactctcctatctgcaagaaccaagtaatcctcctcgttgatgtttgactgtttgtacgtgagatgagtctcacgtggccatggtgttggtgcgtatatcatcccgagaagtatagcggcagcatccatcccatccagccgtccaaaaccttgctatctcttgcagccctcccgtcctctggcacagtatataaagcgtacctgcaggtgcagcacctgatacctgcaaagtgatcgatcgatcgaggccggcattgtgcgtgcgtgtgccaaaggatgacgaagtacaaaggtgtcaggcagaggcactggggctcctgggtcgccgagatccgccaccctctcctgtacgatcatcattcaatctccctttttctgccatgaactaacatgcatcatacggagatgtacgtgtactacgctgacgatgtgtgttctgactggtacatatgcatgtaccgtgtgtttgtacgacgtttgtgtgtgtgtgtgtgcaggaagacgaggatatggctggggacgtacgggacggcggaggacgcggcgagggcgtacgacgaggcggcgaggctgatgagcggcccagcggcgcgcaccaacttccctctcagcagcagcggcggcaacgcccgcagctgcctctccccgaccctgcgcgcgcggctggagaaatgctgcggcgcggggtcatcagcgcaggcgcaacagggcgccgtcgctggccaggacaacgacgatgctgctgcggcggcggcggcgatgggcgtcgacgacggcgacgagtacgtcgaggagatgatccaggagctcacgttctacggctccatagagatcgtccagccctgatctgcttaattagcaaaagcctagccggccaacaaccgcagtgtaacttaaaacttaaattactagagtatagacgtatagtatataaaaaaccttgtgctagctacttctgtgccgtctcgttaggcacattgcgttggcaattagtaggtgtcaatggaacaaggtaatggacgagcattgcagagtgtgcatgcagctagccaggacatctccctgggatcgcgatgtgtttgcaaacaggggaaggggaccaagaatctttcaggataaggcctcctgatttggttcatgatgtgaagttgggtcgggctctcgtcttctagcttctttggatagtactactagtagcactcctgtcttccttcagtcaccaggctacaatttctggtacggcgcccagagagatggatgatgagatgtgacgacgcgacgcaatgggatggatccgatgcatgcatatcttttgtgctagagccccggtacgtcgacgagccgtcgtttccactgtctgctccatttcgagatgtcaatgggggattgcaaaatgccatgaacggagttaaagagggaatggctaggcacaaaacgtagcggagcttttgagccatacaagtggccatgtacagaacaagatagcaaacgaacgcgacgggtgaggcctctctcctatcaacatggctcgcgtcagcggttagacacatctaaggagatgatttagtatgggcaaacagtgcccgtgatggcggtggtcgtgccccaggttcacgttttcaatgataaccgacagtagatttcaagttaattttcaaatggttttcaagaattcagattcgaaacagtaaatgtgacacaaagatttttatcaaaattcagcaaaaactgtcatgctgcctaaggttgggatccggcgctcgctcgaaaaggtgaaccatggtcgtgctgcctgaccttgaaccaacaaacattaacgttacaaaatgcaaaccgtagccgcagttcatttaccacacaatgaatagaatatccgtagtacgaaatactggttacatgtcgagaatcctcagcgtccagcgctgcatgatactgaagtagtacatctctagtcacctagatggctagccatttactgctacaacaatactacaaacaaaccatttgttcttccatctgcacaaactactcataagttttacactgagaagaaaaaaggaggcatctaccagtcctagtaatcacatccaaatcgtgaaacgtagtcagtatgacgcctacaataatacaacatgggtacaaagagtgggtgcacgataaaatccaccgatcaatgctaactctagttaacctaggtatcattatcataccacccatttgggccgttaatattagtggtatacaaacaattgtgggtgcagtagatgctcttctactttgctcttcctctcgtgcctcggaccacccttttccgtcctcgccgaacgtaggctggttttgggtctacctgcgcaggttcttctgaattcaatcgtgtgccattctccacagaatcaccatctgcggcatcagctttaggatcattaacctcgttattggtgggaggcacaccggtgctcgagttggtgcaactgggattatcattgcccgaagattctacccccgagttggcatttgattgatcccgaaggctgcagtagaggaaacagacgaatgccaaacatgtcagtccaaaacaacaacaacaaaaaaaaacttctgcacttgaaatataagtggcttgtgcacattatgttacccattggcagaagtttttttggtcgacccatttaagctcgcatggatgtggggacctgtatcctttgttctcaactctgaagaaagtttgaaaataaaccacgataagcatgcatagtaggtactacattcaacttagagagaaaaacatctaaactaagatcaagtcagaaacagaggaatcatatgcacaatttctgctttagcttaagtgatagaatcagataagacatttcaagccttcaactaacaaaaacaagaagagatgttacaaaattcattcatatttacagtagttctgagtgtttggtgttatatgacctgaaggattatacccttgggtcaatgctcaatagtttgtactgtcatccaaagcttcagaaaaagcatagctgtgctcttgtaagtcatttgggccggttgctggacctattcaggcaattttgtttttctaacctatgccacagtttaactcagatggaaatcttgaagaacaaaaccatttgtgcaatcgaaattgacgaagtactaaccacaaatagcacttttttctgcttttcttttatgcaaatcaaccataattgcagacaagcctgtttgattaggtaggatttctctctaattaggcaaaatccagtccttcccaaaccgttgtttactagttagctacaatatttgtcttccttattccttaaaaaggaagctgttagcttccgaccttaggtaggagcagtagtcatatgtcgcctacttgatagattgaccaaaatttaattgcatctcgtcgggccagcgtatgccggacgaattttattaagcttgggaaaagagttataagctacatgttgcaacgaaagccaaccaacatgatcccatgcaactggaccacacaggaacacactggcaaatgacagctacaggttacaaaccaggacgctacatcggcagctccttgctgccgcaaaagttaataaaatctgaaattatacccacaacatgtggtttataaaatgtagtgactgactaggaaatacagttgccattagtatccaacaccttggagttccaaaacctaataaaatcatgggttgtgatcattttcagggcataaaacaaattacacaatatcagcttggtctctataagttacaaaattattgcagtggagcagacgaacatgattcaaacaacaaaggagtaacaagagtaaaaggaacttctccaactacatcagatcatgcaacaacagagattttattggaagttcagagttaagaaaaatcaagctgattcaacaaaaagaataaaatgcataggcacacgagtgaaataacacacaaaccatggcaaaattaatgtcagaaaagggacaccacacaaacctgacgctgagtttatatctgactccatgtgaatttccggttctgcaacaggagctttaacatccccatcacggtcagcatcctttgtaacactgagacaagacagcaaatatcttctttgaggaaccggctatttgaagaaacatgtgttcaatgacaaaatgaacatacagaaaatatctccataggacccaaaaaaaacaagttcaatttcaaaaaaaaaaaaaagttcaggctacataagggttaagaatgaaacgcagcacatattgagagcaatttgtgctggtgatgtaatcacaaagcttacaactagatgttgcaagtgcagcaaatgttagtcattttcaatgcaaaagctgaccttgtggaagatatttggttcccctgtgatatctcctctgcaccataaacaacaacccatgtaaattagtccaggatatgcgtaaattttgatttaagtcatatacaaaaattatacaagtcaaatagctgacaatattttttatcatcaaagaacacaaacaaatagtgaaggaaaaggagagtctacctatatgaactttggatgcagcattgcattctttgacaacattccctatgtcatttgcagggtccacaggatcaacaaacaccttaagattgatgaaaaattgcaccggtaaataaagaaatgatacttgtgatatttaaaacatactatagagcaatattttgaactcatatttacaaacagataagaatgtccaataagataatgctatacatacttttttttttctttaccaaactcttacaaacgctgacatggcatgctatgagtatatctagttttcctattacttccatctagctaaatcaaacggttgagaactatgtttgtgagtttcgtaagaaccttttgtacgtatagcagcattctttccaatatatctaaattacttccatagatatttgaagttctacaaagttcaggtgagtaaatgacccatcatcgtgaagggcagccaaacaattttatatcacaaactggtgaaagtcaaagtaattttcgcaaaacatacaacagaagcaataagcaatatcaaacttagtcaaatgtataaatacaaaaactaccatgactcacatgatttttatcagtgataggtgaggagtgcccattagccggttctgctcctgcaaccttatcagaacctaaaatatatgaaataaattattttttcaaagccaaaaatttctaagaatgagaaatgatccataatattcatgtcaaggaaagttcaggtgagtaaattagtctcacctttattattttgctcaggtttgtcaactttcttatcagtacccgatgagaatatagatgtatcattctcaaacaatctggaagtagaaccatactgcctgactttagaagcatctggagaacttccagatgatcccaggcgagacctacgagattcctccaaattttcccaaaaattggaaagatattcttccttggtggtgaccttcaaaaggtaaagcatataattatgaagtgaaaatgcaattttagttgacataaccatgtaggtactaactaataaaagaaaagcctgcggcatgccaccccaaaaattcattaactttcagttaattttattccgttccgaaattttataaatatctgcagtatatatgatacatgaccagtagcattttctcaatacctcgtattctacagtagctcaagactccagaatatgaatcaagacagccaatgtagcaatatttacagtatttcctaaaaacctaaaagggatacagtatatccaaaaaaaactgaagttcatcaagctccgaaccaaatgacattatctgaaactaagcatcaatcaacatataataatcaaagacaatcatgcatcccacatttacatcaaggacctagaattaaattgccaatgctttttaacctttgcattacctttgatgaggggagagaatatttggacttcccttcataatcatacatatgtaacccagcagagggtggtgttttaaacttctggctacctaagaatggagattgccaaggaggcaatgactgcatgtatgattttgctaaatcaactggagaacccatgtcagattcaaacccctgcaaaaatgaaaactcataaaggtaagtcaacaaaggaaccaaatattgctgtgacaagcacataaagattgatggctataaagatgagaatgaaaacacattaatactaacagagttaagcatatcagtgtttaatgtgcaaggtccatggtcttcaggctttgaacctaatccctgccttttctcttctaaccatttctttgcttccataactgctgcgcttaatagctcgggcgatgcatggagaggagaaccaggagaaaagctaccagatccaatactagagaatggaactggttcagtgccatttctgtggcgactcaaggaacgccaagctcccgtgaaatcatttccaacaacagtattcctggttggaatttctttcggcgttccatactcaggtgcttcaggaagtgcagcatctgtaactcgtgactgtatgagctttaccattttatcacattcatccctataaaaataaacatgaataattgagaaggaaagtaataggttataaggattttatttagagtaaatttcagataactacaactattttgccaaaattatcagtttactgtaacatgcaatactcatgcaaccatgtgcacctttagctaggcatttcagagaactgcaactataataaaggattttatcagaaagctgcaactttatttgtccgacaagtttttggcccacctgtcacacccatgcaatattcatgctggtaagtcaggcccacatgtcatacacacataagggtgttgctgctttgtgataaagttgtttggtatgattgcggttttgtgatatagcagttaaagttgtagcaaagtgatagttctgacaaaataattgcagttctgtgaaatttactctgtttaagaaaacgtagaatatgtatggatctattcaacataaaattctcagtatctcggcagcacacaccacaggcagaattgcatgcttagtactttgaagtgcaattttcctcatcctactgctacagagtgtctatcttatccagttgcaataatatcatgactttgattccttctccaactcaaatttgaatagttttacccttttaattcatagtaccctatagaattcatagtacaaaaaatcaaaagaagagtagctccaacttaggccatatgcacctatgcttgtattatcagaactgttttgtaaatgagaaataaactagatttctttactgttaaatttaatcgttagcagttgtccagggaaaaaaatatacatctaagcacacatgtaaagaacaatagcattacagttaccttgagaatgtctccttcataaccatttcctcaatggcaagctttgactcattgtatgaaactattgctccatgattgtcttctgtttcatctgcacaggtattacaaatgaacgcactcataaaccatcccaaaaatagttcatctgaatgtgggcagcacaatgtagttgtgtgagcgaacagtttacgaaaggtaaaatggctcaacagaattggaaacactgttccttcatatgcaaaagtacaaaacactgattagtctgcagtgcatccctctaaaatggtctaaggtcaattaaaagtgctgtccaccattacaaagctaaagatcgagcaccttctcaaaccacaatagaactaacaggtcaataacaaatagctcaactattctacattctggaaatatctagcatatgtgacaaaagatggctcaattattttctgaattccaataatatgcaccatgtcatcctaactcgatgttcatgcaagtaactgtggttcccaaatgaggttgattctgaaaacaaccatgccagatctaaattaagccctctgcacctcgtatcataattttcaggacattataaaccttaggatggtggcagctaaccaaatacatgcctttaattttgtgttgatgaatcaatgatggtatcttcgcaagcataccaaatggaagtgtgatgctgctgaagcatcgattgatgaatacagcagccggagcactccacattgtaaacttcaaattctaattccacaacactaggactgtgtaattggagtcaaac

SEQ ID NO: 9056 - DNA, 28901 bp, Oryza sativa
tttcagtggcatataagagattctgcctagttgtatatagcagcgcggcagtattatctgttcagtaggcccgaactacaaaaaccacattgaatctagtcccatgaaagttttcatatttttttcaaaacttctcaagttgttgaattttccaggccccaaaaattttcaatacaacttttttctaaaaaagataatttctactacctccatattttaatgtatgacgccgttgactttttatctaatgtttgactattcgtcttatttaaaaaatttatgtaattattatttattttattatgatttgattcgtcatcaaatgttctttaagcatgacataaatattcatatttacacaaaatttttaaataaaacgaatggtcaaacattgatcgaaaagttaacggcttgatacattaaaaaatattgagggagtactatatctaaacggcgacgtggcagcgggtcgcgtgagcgtgaccaaagtgttttgttttaaaaataatttaatttttggaatgtttttcttaagaaaagttatcgatcgaagagttcgattttaaatcttaatggcataaaatttccaagatgttatcaccaatcatcccatggcataacggatctgaattaaggaatctactactaaaaaaaaaacttggccattagttaaccagtcgggtataaataggagcaagaaagcaaagagaagaggaaacagagcagagaagcagagcaaccatggccgcgcgcgtgctccccctcctcctcgtcgtcgtcgtcgccgcggccatggcgagagcccccacggcccacgcgtggggcaaggagggccactacatggtgtgcaagatcgccgaggtgagagatcgatcgatcgagatggattccacctcgtgctttgcgcttgcttgattggtggggaactttgggtttgcttctgcagggtttcctgacgaaggaggcggcgacggcggtgaaggagctcctccccgggtgggccggcggcgagctcgcggaaacgtgctcgtgggcggacaccgagcggttccggtaccggtggtcgagccccctccacttcgccgacacccccggcgactgccagttcaactacgcccgtataatctcctcctcctcccctgattagcattgcagtttcagtttcagtttcagatttccaagtagatcgattagctgtcgcagctgattagcagttggataggttgatagaaacctgacatgtgtctgatgacaagttgctgtcataatgagtatagtaagcaacctcgttggagcatcttgatgatgcttagtagcttcttggtccggttaacagccggccagttggagcccatcggttggcttattcgtgcagcatatttaataatttgtgaataaacttttatttatatgtttttagcgaacggaaaataatttgtgaataaaacttttatttacgtgttcctagcgatctaaaagagataaacttcgatgaaaaaaaccttaaaatcaactccgaatttaaggttgaaaatttaaattttggctcataagaataagtacaagcaaaaaaaatgagacggcagtttggactgccaaactcgacaggatgcgtctaagtataggttgcgtcttgcttgtttgattgggcaaagcaaaggcaagctcgttaggctcgtgtagccgtcgtccatatagatggcatgacattgtgctggacagaaaaaagggaactagtctgaactctgaagcctctgtttgttcctgggatcagtggtaaccgtttgcctgaattatctgttcatgcaatgattgataaaacgcttagaaccatcatgtatgggtatggctatggtagttgaactgttaaagtccataaaaggggtcaaacttagattaagaacaaaaacgaatcgaatgcaaactgtatcaaaaattcagggtgctgtcttactctcttatgcctagtgcgctgaattttgagaaaatgagtaaatgatgagacgcgtgattgtgccatttctgcgcaggggattgccacaacacaaacggtgagaaggacatgtgtgtggtcggagcgatcaacaactacaccaacgcgctcgaggactcatcaagtccatgtaagcatcactagtcacacttctgctcctgtctgtattttcagctgtaatgaagtaataaactgaacacatggcatctcacatgtttgcttgtgataactttcagatgatccaaccgagagcttgatgttcttggcacacttcgtcggcgacgttcaccagcctctccactgcggccacgtcaaagatcttggtggcaacaccatcatcgtccattggtacacaaggaagagcaaccttcatcacgtacgtagagcctaacacagatcgaattaatccattaataatttatccaattttgttctttgtgaacagctaacttaatcttagcattgtaaacttgtatcgtttcaggtgtgggatgtgaacgtcattgaaacggccttgaaggaattctacaacgaggacgtgagcacgatgataaaggccatcaagatgaacatcactgtgagcaagctcgacacttcactgccttgagctgcatttcagttttctcctcatctgtagactgtagtggttttgattggattttatgccgtgcaggatgagtggtccaccgaggagaagcagtgggagacttgccgtagccggacaaagacttgtgccgataagtaagctcatggcctgcatgaatgcatgattttggctgaatcgaactgaaatataaatattcagagattgacagctgaaagcaaatgcaggtacgccgaggagagtgcaaagctcgcgtgcaaagcgtacgagggtgttgagcaagaatccaccttagaaggcaagttcttcaaaacaccaaacttgctttcacacattcttaatgactgatttgtgatgccattaacattaagagcaatttgatgtgatgcttgttcttgaaaactgcagatgactatttcttcgctgccctgcctgttgttcagaagaggattgctcaaggtggcgtgaggcttgctgcaatactcaaccggatcttcagcgggaacaaggttcagagtagttgatccaatagagattaaacagatgaaagattaagaaaatagcccgcattctgaattacaataagattatcttgtttgaccatgttaacttcacggttacgattagatgtatcctcatttagccatttgtcaaagtagcttagatagctacagaacattgtaattcctgtaagcaagtggtgatttatcaatattgcactgtctttttgtatcattgatcatctttcaggctgaagttaagctacagccgaaacagtcaatctatatcgggtagatcagatgcatcgaatgcttgatgaaatgcaacttgaggattactattcattaatcatctcacgaggagaaaattgtgattttgctatcgcaaaaggatcgtttcgctagaatactatcccttcaaagtgattcattaaaatgctatcctaaactgagggtattcaccaaaatgctatttttggtcttttttttaatagaaatgattttgctctactttagtttttcgtctgaccaaaatacccttctctcagccgagaccaaatcgaagccattctctgccttctcttctcgggctctcggcagcggcgagcgccgtcgccctctgctcggctccggctccagcgccggcccccaccgctccctcacctgctcctccccttccccctcccctttctgctcgtgtcgctgccgcctgtctgctcacgccgtcgccctccgcatcggctccggcgccggcccccgacgatcccccacgtgctcccccctcctcccccttttttgctcgcgctgccgccgccccaatcattagcgccccctccacagccgccggcgccgccctctcgccctccccgccctccgcccgctccgccgcggcgcgccgccgccaccgaggagcaatcggcggtggattcgtcgtcgtcggtgacgaggttagtcccgcgccaccagcccaccacgcccgccccaccctcgccatgcctgccagccggccaccctcgcgctcccgacggcgtcctcgagagagaggaagaggacgcccaccaccgcctgcatcgccggcgacacgggctggggcttcatcaaccctgtcgccgctctcttcttcggggacgcggccgccggggagttggacgccgcggcggagcgaaggaggcggccgggcggggcgggcagagggcggcgagctgggagggggagagcagtggccggtggccggtggccggggaggcggagcgccggtggtcggaggagagcagtggccggcgctcccgagagagagaggaagagaaggaggagagagtggagagagtatgacaggtgggccctcaggggtattttggtccaggaaaatgttaaaattgaggaaaaacatttctatttacccaaaagagcgaaaatagcattttggtgaacacctctagtttaggatagcattttagtgaatcagtttggagggatagcattccagcgaaaccactcttttacgatagcaaaatcacaattttctctctcacgagtggacttattagttaaatcacatgagttgcctcagaaaattcagtatcaccgcacgcgttcacaacgaagagtactgaaaaaaaaaaagtaaactcgaccgattggcaattgttttaagagaaatccttgacaaactcaactctcgtgtttctatcaaagctttaatctattttagcaacatggggcaagggcaactctcgtgcttctatcaaaactttaatctattttagcaacatggggcaaaggtcgataagccatttctactctcgtgtttctatcaaagctttaatatattttagcaacatggagcaaaagtcgataagccatttctactctcgtgtttctatcaaagctttaatctattttagcaacatggggcaaaagtcaataagccatttctatcagttgtcagttgaattcgtccccatagcgacgatcaagtcttcttttttttaaaaaaaaaaaaaaaaactgaatcgacggtcaagtcttgtaagctcattcgtgcaaatatcatatgtcattgtaacaatcatcagttaagctgaaccggtcccaagaacctgacgcaggcttttcaaattattaaacggtgatttgaacaactttgccaatttcactctttcgttttctatgcacacgctttttaaactattacagtgtttttttttttttgcaaaaagtttctatagaaaagttgtttttaaaaaatcatactaatctattttttaagttttttttaagctaattctcaactaatcatacgcttataaggtatcccgttttccgtgcgaagggaattaattcccaatacaaggaaacgaacacaaccgaggctaagataagtaggaagtcttttacccttttgttatctaatatgttacagaaaaatttaagagttcagacgtccacagcaacaaatgcagagtggaaaactgaagaaagaaaaaaccattgctccgaagacagttcatacaagtaaaagtgaaattaagcctcttcactggtaaatactcgaacaacaagattgagtgagccgatgagtttcagggttcgttcttcagcagccaatgtggtttgtcaaatttaagcgtttgtcttcaaattcctatgtctgaggataccgagaacaagaatttatagaagcttcagaccaccggtgacatcatcgaccatgtcagctggccctgctcaattaaaacagtacgacaaatattagatagcacaaatcactgaaaactgtggtacacagtgatttgaatgtagcttaccaagaatagccatgactgttcttgaatctacaggaagcagagatgggaacataattaatccaacagcagatattaaacagatgctaaattgaataaagtaaagcctgaagaactcacttggtgcgatctgtgttcttccagcatcaatagttatgtgtgttgggatattcaaagactttgctcttccctgcaccaaaagaaattttaattaaacataacagaaaaaatgcaagcattaacaacgttttatactattatggaattgaaaggtaacatattagctatataaaagatctcgttgaatgcagaatataaatattatgatgcataagtgtcaagtgttgggtttcaagaagcgcggtgatttttcttttttcacagccaatgtttcagagtgagttttccaatcgaaatttcaagttgttttaaccaattgttcgttgatactactaatgctctagtccacttctaatgccatgagaatttcctttttatttattaatatgcacaatttgacaggtaaaaggggaatattttctgtttctgttcatctgcaggtattatactattccaactcacaaattacctttatagatgtagtaaaaataaaaataactttcaacaataatgagtcaacaggcaacagaaaagggtatttacttgtaaaacaagcatatcttcctcgctttcaattttcacgaccaccttaacttgaccacacctctcccacctagcaaagatagtaaattagtttccttcctgttgttatcatgcaatgacaatcgaattgcttacatatgaacatgaacatgtggaagaaacttcaaacataattggaaatgttaaaaaaaataccttcttaatgattttggagctctctgttggagttttttaaacagacccaacgttgcatggctgagatgacagaataagagataatcactgacatttgcaagataaaaagaaatatgcacaggagaaaagttataaagcatgacaacactccaatgctgaaggtaaagattaaatgcaggagctggacatgaagataagcaatttgtttgtgccaattcatttattccataacgacaagtgtatagtacaactgtataagaggcaaatttagttatggtaggatatataacaagttctctaaatcacaaggtcaacgtgccagtcccaaaaatatgagttctacctcttgtagcctcagataacaatatgatcacaaaatttcccccttcaaaaaatgggaaactctattcgaaaggattcttcctattttaacattggtttcaactttcacattcagacacacaatacactaatagcctatcactatgtgctaattagtgagctcagttcatcagtaaaataaactctactcaactgtcgaaacgaagatacagataaactgagaagtattcacctgcattgcgcggcaatcttccccttccccatcttcaaatcattcctcacaaccagcacctgccaccaccacagcaacagccaacggaatcagacatctcactctctgcgcacatcaaagaaacaaatccagcagaaaagtagaaggggattttgagccaaatttccagtaccatcttgaaatcctctataatctcagcgagattctcgacctccagggggctagccgcggtccgtgccttggccctctcggcctccttcgccgagtcggacttggtcaccacgttgcgcgcccagaacagcagccggagcccggcgcgcttgggcgcccgcttcgccgcccggctgcggccggagttttcgtcatcatcatcttcttccgaatcctcctcggaatcctcgtccgaggtctccccggaagcgggggaggcagcgacgacctggcgggggaagcggctgagggcgaggaagtagccgagggcgaagcagcccgcggcgccagctatagcggtggcggctcccgggatggcggccgccgtgggaagggagaggacggaggccgaggcgcccatcggaggatcgccggcgccggtggcggcggcggcggcggcgcaaggcggggaggggttggggttggggatgcgcgatactaccgcgtgggggtttcgggaggaggcggtgatttaggtggaggggatgattctgacaggtgggcccaacggctcagcgaatgaacggtacgtgcgtccctggaccgtccgatgggggattggcgtctgggatctcgcgaatcgaggcgcgacacgtggcaggtcgcgccgtgggccccactaagccacgtgtaccgcctgtacgggctacagcccggcctataaaggccagggattcgaactagcataacccggcggaataagttcactttgggtccctctatttgtcgccgagtccgattttcgtcccttgaccgtaaaaccgggtatgacccgtcccccaacttacaaaaaccggataaacgtggtccctcggcggttttgaaggcggttttggatgacgtggcgcatacgtggtttgtttgactaggtctccgtcgcacgtggcattgacgtggcgcttacgtggcaattatatctcggaaaaataataaaaagcgtggccccacatgtcagctgcatataaaaaattatttaaaaatggtggggcccatgtgggcccacatgtcagctacacaacaaaaaccccacgtgggccccacatgtcattccctatctcctctcggctctctctcatcttccccatcgtcgccacaacacgcgccaagatgtcgtcgccatccatcgccgccgcctccatcgccgcgcgcaaagaggagggagcggcgcggcggctgtggccacaagaggaagggacggcggagcggcgcgaagccggcggagagggaggcggaggcggagacggcggcacgcgaaggaggagtcggcggcggcgggtccgaagtcgtgcagctccggccgccgctccctcctctcccgtcggccgccacgggccgctcctctgccatcggccgccgcgccacgctttgcccgaggcccgccgcagctgcttcctcggatccaaggctgcctcattctgagcgtcctcgctgccgagatccaagggcgccgccactgcttccccggacgacctcgactcccgcgggctctccgccgccgctccgaccgccgtcgtgccgccgttgtcccgccagcttcgcgcgccgccgctccggccgccgtcgtgccgccgttgcccccgccggcttcgcgcgccgccgctccgaccgctgtcgtgccgccgctggccaccgctccgtccacgtggggaaaagagaagtaggatagggaagaggagggagagccgagagggagagggaatgtggggcccacgtgggccccaccatattttttttatagctaacatgtgggcccacgggggccaccattttaaaattattttttatgtgtagctgacatgtggacccacgatttttattatttttcaaagatataattgcgacgtaagcgccacgtcaatgccacgtgggacagagacctagtcaaacctgccacgtaggcgccacatcagccaaaaccgctatccaaaccgccttaggactttatgtgcccggttttcgtaagttgggggacgggttatacccggttttggggttcagggacgaaaatcggactgggcgacaaatagagggacctaagtgaacttgttcctaacccggcctataaacgtggcatgggcctacatttttgcgaattgcataggcccattcgccccgtgctcgcttcaagattcgtgcagcttacgttgcagcgccgatgcatactgctacctccgttcaaaattaattccatttcacctatcccacacgaaccaatacaaaatcaaaagtagaatactcaaaattagaatgatgtgactgaaaagttgtgtgtgacaggttgatatgatgaaaaagtactgaaatttggatctaaactttggatctaaacacagccattgttagtcaattaagaatcttgaagatcatgctgaaataaagaaaatgtttatattttaggatagaggaggtatttttttatatattaatttttttagaccgacggaattcgtgcagagacagctgcgacatcaaatccatcgatcggtacctacggtacgtaacgtgcccgtcccatcccatcccatccctcgatggatggacggatatactccctcggtcaacaaaaaaaaaaaagaccaacgtttgaccgtccgtcttatttgaaaaaattatgaaaaaaattaaaaagacaaataacgcacaaaattttaatcatgttttatcatctaacaacaatgaaaatatgaattataaaaaaaattatataagatggacagtcaaagttggacacggaaaccagggttcacctttttttagatggagggagcacggagtatgcaacgacgcaatcgcgcgcgagtccgtctgtttttctctagcggtacgtgcaatgtcgattcggacggttggtaatgtcgattacagtagccacgattaattaacccatgtcccatgtgcgcaggtgccggaagcccggaatccatcgagttctcgaaaggtccctgtactagctactccctctctccattaatacagaggattatgctccctaagtttatccagaaatttaagggattccgagataagaagtaaagcagcaatcagaaattgagtacccccatccattcccatcagaaaaggtatatagtgaaaagtacatgtagtactactctgcatgcagctcctttgaatcctatcttagttcatttctatgggccccttcgaatcgtaggacggagaaaacatacgaataggaaaaacgtaggattttaataggaatgtaaatgtataacagaggattgtaaaacgcaggaaaaacacaggaatgaccgtttgattgaaccaaggaaaaacttagaaattagatgagagagatagactcaaaggaaagttaccaagaggttgaagctcttgctaaatttcctccaaaatctctataggattgtccattctataggaatttcaaaggattggatataattcgatcttttgtttcaaagggcttcataggaaaatttcctataagattgaaatcctccaaaattcctatgtttttcctccaattcaaaggggccctaaatatgtattttatactacctctgttttttaatagatgacgccgttgattttttctcacatgtttgaccattcgtcttattcaaaaaatttacgtaattataatttattttgttatgagttgttttatcactcatagtactttaagtgtgatttatatcttatacatttgcataaaatttttgaataagacgaatggtgaaatatgtgagaaaaagtcaacggcgtcatctattaaaaaacggagggagaacgcttcattcagtttgctaataagttcattttcacactatcacatgctcctccatcccaaaaaagtatataggttgggttttttttttatagagggagtactctgtagcttagatttagcattccgtactcttccttaatttgaactatatttggcataatactctatattcctggacggagggtgtattagtatagaatattcatatcataaggttgtcttcgttctctcactttctcaacttctactatcttgtttccgtacgtatactttccaaaccgctaaatggagtgtttctttttaaattttctataggaaattgttttttaaaaatcatattaatctatttaaaagtttttttaagttaatacttaattaattatgtgctaataggttatctcattttttcatgcgtgagacatgaattaccaacgtccaggttcacccatcctatgtcgatttgatttttggtcaaaatcaaactactccaagtttaatcacgtttgagagaaaaatagtaacatattgaacacaagacaaatatatatactataaaatataatcaattatagatttaataaaattaatttggtgtagatagtagtattagtatatttatctattgtattgaataagagtatatttgtctatcaacttgaaatagtttaatggacgatggagtagctaggtggtagagctagcggtaactggttgatttgattggtacggatgttacgtgtacatgtactccgtacgcaggtatacgtatggactacgtacctgctgtcacgccctgaagttttccccctttgcttgctttaaaaattggctaaataaatcgtccgaagaaattatcttaattaacctagagctaattccctaattaataaatgcaaataataatcggaatcggcatgtggaatttttcttggattctacatgtcaaataatgctaacaggatttttagtggaattttcagagccttggaaataatttttaccaattaaaaatcaccaaagtgcaattttaatcccaggaaaatcctttcttctttttctttttcctttttcctcctttttcctcttcttgggccgtcggcccagtccacccgtcgcccgcgctcggcctccccttgtgggccggcccgttccctttccccctctctccgggacgctgacaggtggggcccacctgtcaggtcgtccccttcctccagccgaccgcgctcggccggcaaccgccgctcccacgccgccgcctcctccgctctttccgcgcccacgccgcgccgctcccgcgtcctccccacgtcgccgcctcttcccccgcatctcccggcccgcgcgcgcgctcgagagggcgggattcgagttcgaatcccacccctctttctctctctcctccccacgtcgccggctaaatcgggagggttcccggccacgtcctcccctccctcgcccattaaatcactctcccgagctccctctctcgtttcccccatttcccgtcccctcccgtgcctcctaccgagctcgcgccgcttgttgctagcgccgccgcttgccgtcgccttcggccgcgcgccactgccgctagggtcgccgccgcgccaacccgccaccgccgttagcttcgccgccgcgagagctacctcggccgccgctcggttgccgccaatcgtcgccgaaacgccgcttctctcgcacgccggtgagctctccatttccacccaactccggccggccgctctagtggccgtggtcatcctccccttcccctaacccggtcatcgcctttcccaggttgtgctcgaccccgtccgccgttgtcggaagcgccggccgccgctcgtctcttcccacgccggtcgccgccatcgcctcggtgaggaatcccctttcctccttcctttcctctcccccgtgagcgccgccgccctccgcgcgtgcgccgtcgtcttcggctgccgccgccgccttcgcgcctgacggagctcgtggctcctcaccgggagaccgcgcaggcccccctttgccggttcggccgggggcttagggtgagatctcaagctctctctgtatgtggaaagatcgcttgctcggaagaaacgcgagacacggcggcgatctatacaggttcgggccgctgctcagcgtaataccctactcctgtgtttttgtggatttgtgtatggacaagttacaaaggattaactccctttcccctcagccttccaaaagggaaaaagtccccctctaaatgggcaaggtcctccttttatatctcaaggggataccacatgcacctttctctttccaaactggactgttctttttctctttaatgggcggagatcggtacggtttccatccgggagcccttctgatgggacaacccacacctacccccacctcccccgaagacagagatgacgcgggaccgtggctgtctgtcgatgacgcgaccagtgccagaccggtcattcttgtccaccacgcgtcagcttaacaacgtgcatgtttgcccttcttcgtgtaacaccttgcctgtaatggttaggatgaagcctggtataaatctgaccagggctaacgtgccatctctaagagataacaccctagctccggcttgagacgagtgcctagaggctttcgtcttgacgggatggggcaaggcgtgcgtcagaccgccagccgccacctaacccgtgatctgaccggtctgtgactggtcacagaccggataaaggaacgcactgtactgcgttgcatgcagcgtgacacgcttgaccagactgcaattaatgctgttaggtgagcacagctgtgctcacttatcccatatatgtggcgcagacttccttaaagggtcggggtgcctcggccctcggggccggggcaagcgcaacccgaccccccccccctcgggggaaatcaggaggagggcggacacctcaccctcgggcccgacgtccccgaaggtgccaggccacgtgggcgattgcgtctgcctcaagcctctggtcatgatactcccggtcccatatcaccgacagtagcccccggcgttatgccagagcaatttcccttcccaagggaagcggtcaggtgtgacgccacccctaaagcctggtgacaggtgggaccggtctccgtagttgggcaaaatacccaacggtctcaacccatgcacattggtattggtaactttggttgtccataatgggcggtctattcaagactgccacaccacttgagcagcgcgcgaatctgggtgagcagattggtctcgcccggagatacggtaacgccgcttcggtcggcgagcgtaattaacgcgcgcacgatacaatccatttcgattgccacaaccgcatatccacttcatgcgccgtaagcgggcgaatgggattagtggaagcgtgggcacgggaaacgagggagcgagatagcgagatacgagggagcgaggtagtgggcgcgagaaacgaggagccaggcccagcgatggcaagggtataaaagcaccgagaaaaggatttgctcccttcctttcgccattgttcctcttgccttcgccgcctgagctctaactctttctctgctacgccctactttcgccacacgcgctcgttctcaatcatctcttcctccaccgccatggcacggggctctgctctgcacgacggcagtgtactaccgccttcccgcatcgtgagcgagaggcacgccggactgccgcgccgcttcatgccggagtccgccaccggtcgggagatagtgatgctgggcgaggggcgcccggcaccagactacccggggcggtccatcttcttcctccccttcgcaatggctgggctggtcccgccattttcttctttcttcatggatgtcctggagttctacgatctccagatggcgcacctcacccccaatgcggtgatgacattggccatcttcgcgcacctgtgcgagatgttcattggggtgcgcccctctcttcagctgttccggtggttcttcaccgtgcagtcggtgtcaccgccgtcggtggttggcggctgctacttccagccgcgggggccggtgttgaaccgctacatcccctgcgtcctccgcaagaagtgggacgactggaagagcgactggttctacacccccctcgccaacgaagcgcgcctccgacttccaagccagcccccggcgcaggtctccagctggcgggcgccggtagatctgggggaggactacgacgccgtcctcgaccgcctggcgggcctgcgatcccaggggctcaccggggccatggtgtacggcgattacctccgtcgccggattgcgccgctccaacggcgcgcccggtgcgcctgggagtacactgggcctgaagactacatgcggacccaccagggagccagatgggattgggctcccgaggacttcaagatcgtggtccaaagggtgctgaatcttagctccgtggaggcgtctcgcattcctcaggtgatcctccccctctgcagcgatcccgaccgcgcctccattctaaccattatgatgggggtcggggcctcagaggagagagcccctaagggccacgacggcgcgggcgagcgccgccggggggaacaatctgccccaggagggggtcgtgcttctgggccccgcgtcgggggctcggggagcagccgccctgccgacgcccaggggaagaggaagttgggaggaacacctcccccatctcctccccgagggggcggggcggcgcgtgccagcagtcggcgcccggagggggccgcgccgacgtcgcagcccgagggggagcgcaagaagaaacggctccgcaagacgggggagacggaaccatgccggggaaacctgatttcccctccaaggtggtcattcaaccgaccccctcgcaggttcgtctcactctcattgcaaccatctttctcccaaaaggaagctttttcttactcattttgttcgtcttctggttttttcttctgcttcagtgatgtcccgtcgcattcctcccgccaccccaagtccggccagtccgaggccgaagatcctacggccgcggaggagcggaggcgagaatctgaccggcgtgaagccgcagaccgccttcgggaagctgaagaggccgcccgggaggccgcccggattcgccaagcggaggaagctgctcgggaggaggccgcccgggctgaggaagccgctaaggaggaggccgcccgggctcgccaggctaaggcaacagctgctgctggcgcgtcaactgggcccaccccttcgggcaaccctcaggcgacagcctccggggaggctcgcgacgaggccgcgggcacatcgcttgggcccacctccccgggcgacgcccaggatcaaacgggtccgggggacatccccgagcccagcacgtcctccggggggccgagccgcatcgccttctctccaaggcggctcttctcctcatcttccgtcgccccgctgagcgccgagcccattctgcaggccttggccgccgcaaacaccgcggtgctagatgggttcaacgcccaagtggaggccctgcgcgcggaacgagcggagctcgaggccgcatgggcacgtgttgaggaggggcggcgctcggtggacgccatggtggaggtgggccgtaaagctcaccgccgtcacgtctcggaggttgaagcccggaaggcggcgctgacggagatcgctcgtgaggtggaggaggagcgggcggccgccctcatctctaccaccgcgatggtcgaggcgcaagacaccctccgccttcagcatgcaagctgggaggcggagctgaagaaaaagctcgacgccgcccaaggggtccttgactccgccgctgcccgagagcggcgggtgacggagactgaagcggcgtctcggcggcgcgaggaggcccttgaggcccgtgccatggcgctggaagaacacgccggcgccgtggagaggggcttgacggaccgcgaggccgccgctggtctccgagaggcgacgctggcggcgcatgaggccgcctgcgccgaggaggagtccgcgctccgcctccgcgaggatgcactcgctgagcgggagcgagctctcgaggaggccgaggccacgacgcaacggctggcggacagcctgtccctccgcgaggcagcgcaggaggagcaggcgcgccgcaatctggaatgcgtccgcgccgagagagccgcactggagcagcgggctgccgacctcgaggcgcgggaaaaagagctggacgcaagggcgcgcgtcggtggggcggctgcgggcgaaagcgacttagccgctcgcctcgcggctgccgaacacaccgtcgctgacatgcagcgcgcactagattcctccatcggggaggccgaggccctccgcttggcgggcgagatggggcccgacatgctttgggactcggtctcccgcatggatcgcgccggtcggcaagcgggcctctggaagggccagacgaggatgcgccccatcaatctggaaggcctcgctccgcacctcaacaggatggcctgggtcctcgaacgactccccgaggagctcgagaagaccatcaagtcatcctcgagggacctcgcccggggggcggtcgaactcgtgctagcgagttaccaggcccgggaccccaatttctctccctggatggcgctggaggagttccctcccgggaccgaggacgacgcgcgcgcgcgcgtccgggatgccgccgaccacatcgtcaacggcttcgagggctcggcccctcggctcgcgttcgcccccaactccgacgaggagggcaacaccagcagtgcagacgatggtggtgacgaggtcgtcgactcgggcgcgtcggaatgagcccccgagcccccgccaatctttacttttttctttttctttcttctaaggccttcatgcctcttttgtgtacaaattaacttaatctgcaatcagaaatgacgaaaaaatttttgtgttagttttattttgctatacatacgcgatgaggatgatctgtgccatggtccttttgcgccttagcttgaaataagggctcgtgcccaagtcccagtcctcgaatggctcgggtcggggctagtgcctggggagatccacatgtcgagactggccaggccgggaacgtggtgaccgaggggtatgggtgacccgattgtgggtttttgccgattcccccccggagttcaccacgccccggggcacggctcggttctgggccccgtttggcgatttcagctgaccgaaccgaacccccgagggcaaggttgagtacgagtgaccttattttaagtcaagattcttcaaaaggaaagaacagcacagacacaacctttaggaaattgaaactgcttttattgaaatgttgaaaaaagagaaataagaatgtaatgcatgtgtggtagcccccggtcaaccctgcacacccgaggggggtgcggggttggcctgagccaaaacctgacacccgacccccccctcctcaggggtagaagcgacgaaggtgttcgatgttccatgggttaggcagctccgtgccgtcgcccgtggccagccgtaccgagcccggccggggaacaccgatcactcgatacggaccctcccacattggtgagagtttgctcaatccagcacgcgtttggacgcggcgtaggacgaggtcgtcgacgcagagtggtcgggcccggacgtggcgctgatggtagcgccgcaagctctgctggtagcgcgcggctcggagagccgcgcgccgccttcgctcttctaagtagtcgaggtcatctctacgaagctgatcttgatcagcctcgcagtacatggtggcccgaggagacctcagggtgagctcggatgggagaaccgcttctgcgccgtagacgaggaagaaaggcgtttccccggtcgctcggcttggtgtggttcggtttgcccagagcaccgctggtaactcctcgatccatgaatcgccgtgcttcttgagaatattgaaggtcttggttttaaggcctttgaggatttctgcattggcgcgctccacttggccattgcttctggggtgggcaggtgaggcgaagcagagcttgatgcccatgtcttcgcagtagtcgccgaagagttcactagtgaattgggtgccattatccgtaataatacggttaggcactccaaaacgggccgtgatgcccttaatgaatttaagagcagagtgcttatcgatcttgacaaccggataagcctcgggccacttagtgaacttgtcgatcgcaacatacagatactcaaacccgcccggggcccgtttgaacggtcccaagatatcaagcccccagacagcaaatggccatgacagtggtatgatctgcagggcctgggccggctgatggatttgcttggcgtggaactgacacgctctgcatcgccggaccagatcgactgcatcattgagagctgtcggccaataaaatccttgacgaaaggccttgccaaccagggtgcgcgaggcggaatgggctccgcactcgccctcatggatgtcagcaagaagctcaacgccttgttcctgaggaatgcacttcaggaggattccgttagccgcgcgccgatagagggtcccttctaccagcacatagcgtttggaaatgcgttgtacgcgttcactcccttcgcggtcctcaggtagagtcttatctgtgaggtatgtttggatctcagagatccaagcgatcaatctgagggagcttggagcgctcccttcgggtcccgaggcctggactccgacgggcctcgggggccggtcaggcgcatccgtctcccctaaggggtcgggtcgcgccgacggctgggtaagcctttcttcaaaggcgcccggtggggtctgggctcgcgaggacgcgagccgtgagagttcgtcggctatcatgttatcccttctgggtacatgccgaagttctatcccatcgaaatggcgctccatacgccgcacttggcgtacgtaggcgtccatctgtgggtcagagctccggtactccttacagacctggttaacgactagctgggagtcacctaataccaagaggcggcggatccccagtccagctgccactctgagtccggcaaggagtccctcgtactctgccatattgttagtcgctcgaaagtcgagacggaccaagtatctgaggacgtcccctgtcggggaggtcaacgtgacccccgcaccggcaccctggagagacagagaaccgtcgaactgcatcacccagtgggtggtgcgaggcagctgaaaggggtccgtgctggcctcgggtattgagacggtctctggagccggggtccactctgccacaaaatcggcgagggcctggctcttgatagcgtggcgtggttcaaagtgcagatcgaactcagaaagctcgattgcccattttaccactcgtcctgtaccctctcgattatgcaagatttgcccgagggggtaagacgtaaccacagtgacccgatgtgcctggaaataatggcgcagtttcctcgaggccatcagaatagcgtaaagcatcttctgggcctgagggtatcgggtcttggcgtcccggagggcctcactaacaaagtagacaggccgctgcacctttcggcggggccgaccctctttgctaggggccgcatccccggggcattcttcgtccaagtggcctctcggggcgcactcgccttctgtgccgatgtcctcggggtcggaggatgacaggagcggccttcccacagtggcctcggggccgtcctgggggtcgggggctcctggcgtcgtcggacaagcgggcaaagggcctactccggtcgtcaggggcctcaggcctccgttcggctcgggggcctcttctccctgctttctcccgggtcgagtcagcacagggttagcctcggggccaaagggcgttaggtgcggccttcccgcagtggcctcggggccctcctgagggtcgggggcacccagcaccgtctgacaagcgggcagagggccgactccggtcgtcaggggccttaggccaccgttcgactcgggggcttctcctccctgctcgctcccgggccaagtcagcacagggcgggggtgcgcgaaatgaggattgtcttcatcgcgctccacaaccaacgctgcactaactacttggggggtcgccgctaagtaaagtagcaggggctcatttggctccggggcgactagaaccgggggagagctgagatatgcctttaactgagtgagggcatgttcagcttcctccgtccaagtaaacggccccgagcgcttgaggagcttaaacaagggtagcgccttctctcccagccttgatatgaaacgacttagggcggccatgcaaccggtgacgcattgcacatccctaagtttgctgggggggcgcatccgctcgatagctcgaatcttctcggggttggcctcaatgcctcgggcagagaccaagaacccgaggagcttgcccgcaggtacaccaaacacacacttatcggggttcagctttatgcgggcggagcggaggttctcaaaagtttccgctagatctgaaagtaaagtttcttggttgcgcgtttttacaaccaagtcatcgacataagcctcaacattacgtcctatttggctacccaaagaaattcgagtagtacgttgaaaagtaggacctgcattctttaacccgaagggcattgatgtataacaataggttcctacgggggtaatgaacgcagttttttcctcatcctccctagccatgcgaatctgatggtaaccagagtatgcatctagaaagcacaaaaggtcgcaccccgcagtggagtcgacgatctgatctatgcgaggcagggggtaaggatccttaggacatgccttgttaaggtcggtgtagtcgatgcacatccgaagcttgccgttcgccttgggaacgaccaccgggttcgccagccactccggatggacgacttcacggatgaatccggcctccagaagtctcgccacctcctcgcggatgaaggcttgacgttccggggcctgccgccgcactttctgccggaccggccttgcgcccggccgcacggcaagacggtgctcaatcacctccctggggaccccgggcatatccgctggtctccatgcgaagacgtcagcgtttgcccgcaggaaggagacgagcgcgtcttcctatttgccatccagaagaccaccgatccgtgtggtcttggatgggccgtcgcccaaggcaacctccttgaccgggacctcgtcgcatgtggcaatccgctgcctcggggcggtgggggcggaggtgccaagcctctcgtcaccaccctcgggcttggtcacagcagcgaggtggtccgcacgctgctccatgcaagcgagcgcgactttaaggtcgccacggacagagatggggccaccggggcccgacatcttcatctggaggtaggcgtagtggaccgccgccatgaacttcaccaacgcgggtctccccaggaccgcgttgtagggcagactgaggtccgccacatcgaagttcacccgctccgtgcggaagttggctgatccaccaaaggtgaccggtaggtcgatgtgacctaacggccatgtgtgccccggcgtcacaccgatgatcggttgagacggctggagcaccatccccggggccttgatagcatcaaaggccgcgggggaaaggatgttgagagccgctcctccatctatgaggacacgccccaacttcacattgcagatggtgggggaaaccaccatcgcaatctgccctccccgggcaacgcacggtgggtggtcggtctggtcgaaagtgagggcaacctccgaccaccgcgcccggcgcgtcgcctcatgagtaggggccgcggccagaagctctcgcctcatggccttaaaactccggcgagaaacgtgagcacacgctcccccgtcgacagtggcaatggtggccccgggttcctggaaacctaggtcatcatcaccgtcatcaatgtcaacggcgggggccttctgtttggcctcacttcgccgtttaccggagggaactgccgcggacttgccctcacggcgttcctgcctcctgtcctcctcccacttcctcgttcgctcagccaagtttttgactgcgcgacaatccgcgagatcgtggagggaggtgttgtggacggagcaccacttgctggctgggcgctccctgctgggagtaccagcctctttctttttgtcgctcgcaggcctcccctttcgggtggcccgcggaacgccctcgacggcgaggacgtgaccctcgtcgccggaatggaccgaccttttcttcctcctcctgtcacgccgccctgtctgagcggcggatccgggggcggccgaagctgccacaccggaaccggaggggttccaggtccaggcctcctccttacgagccactcggtccgcgagctgaaaaagctctgcggtagtctggggctctttggaggcaatcttttcgagcatgcggttgtgccgcacaccccccctgaacgcgtagatcaccgcgtgtgcagggatgcaaggtatagtattgcggacttggcagaaacgctgaatgtacgagcgaagggattcatcatcccctcgctgtactgcgtgcaagtccgcttcttcacctgggcgtggataagtgccttgaaagatcatggtgaactgctggcacagatcctcccaggagtggaccgacgcgggtggcaggttcattagccaaccccgcgcctgtcccttcagggccatgggaaagaaattcgccatgaccctgtcgtctcccccagcggcctcgatcccggtcgtatagacctggagaaactcggtggggttgacgctcccatcatactcctcggtgatggtgggccggaaccttgggggccaacggacattccgaagactcgccacaaaggctctacagccaacaccaccaaccgggggcacggagggctggtcctcacgtccatgtggaggtgacactctggacgaggaggcgccctccgttgtgtcacgccctgaagttttcccccgtttgcttgctttaaaaattggctaaataaatcgtccgaagaaattatcttaattaacctagagctaattccctaattaataaatgcaaataataatcggaatcggcatgtggaatttttcttggattctacatgtcacaatatattaacaggatttttagtggaattttcagagccttggaaataatttttaccaattaaaaatcaccaaagtgaaatttttaatcccaggaaaatcctttcttctttttcttttttctttttcctcctttttcctcttcttgggccgtcggcccagtccaccccgtctccccgcgctcggcctttcccttgtgggccggcccgttctccttcccctctctccgggacgctgacaggtggggcccacctgtcaggtcgtccccttcctccagccacccgcctccgacggcaaccgccgccgaatccgccacgtcgccgcctcctccgctcttcccgcgcccacgccgcgccgctcccgcgtccccctcccacgtcgccgcctctcccccgcgtctcccgccctcgcgcgcctcgcaaatgggcgggattcgaatttgaatcccacccctctctctctcccccaccttcccacgtcgccggcgcaataggatgggttcccggccacgtccgcctccccctccgcctataaatcgttccccgcgtcttcctctctcgttttttcgcactcgccgcgctctcccgtgccgtctaccgccctcgcgccgtcgcacccgagctccgccgctggccgccgccttcggccgcgagccgccgccgctagagtcgccgccgcgccaaaccgccgccgccgttagcttcgccgccgcaagagctttcccggccgccgcctcgcgtcgccggaatcccaccggagcacctctcccctcgcgagccggtgagtttttccctcccctccatctccggccggcaattcaagccgccgtggtcgtcgtctcctctcctaacgcctctccatcttctcctagggtgtcgccgccgcccgtccgtgcctccgcgtcgccggtcatcgccgctcgtctctttccacgccggtcgccgccatcgcctcggtgaggaatcccttttcctccttcctttcctctcccccgtgagcgccgccgccctccgcgcgtgcgccgtcatcttcggctgccgccgccgccttcgcgccggccgccgccgtctccccgcgccgccggtcaccgccggcggtcgtgcgccgtcgtcgcctcgccatggccggccggcttgagccgtgccgagcatgccgccgcccactccctcccccttgagccactgcccgtggggcccacatgccggcgcctccctctcctttccccttagtgccgctgaccagtggggcccacctgtcggcgcagccgccccctcccttccgctgacgtcagccctgggactattgcgcaataaatatattaaggcttttcttttatagaaataaacacagtttatcttctaaaattcataagtaattcatccgagctccgtttaagtccattcaagtctcagtaaatcaagaaaaatgcaaagaatccattaaaaatggttttgtttcctgtttctgtagtcttatagcatgttttgcttgtgtgctttgtttgtcgcgtaggtttcggccgtttcgtcgatccgcagtttctcgaagacgttgctgtgatctcatcagtgcgagagcaaggcaagtcatacattgcaattgatcatattgtacccaatttacaaatgtcccgcatttctattaaatattgcattgttttacaatgtaatgtgggatgggtcctattcctcagccacatattggttaccttatgccattgataacttggggatcaaaatgactagatgttggcctaggaaatgcttagccatgcttagctcaactagcacacaaaaagggatcacattattacatagactttgtctattggcatagctttagattggtgccaccgcaatggtgttagttaattaaaatacattgaatggtgggttgtgggtgcatggttttgctggtcgcacccatggcaattaaggaccggttcacgggaaaccctgggagacttaccgtgcttaccacaagcgggagtgggtaactgcttgatctgaagtatagctcgaccctttcctaggcaccggtggcgagggtgggcgtgatggagttgggtcggccggggtgtccggttgtccagctgccggattcaccgcggcgcaagaggggaccgcccactgccttttgaggggtgggggtgaaaccttagcgtggtgtggatggttaggggagggttatgtggagggtcttgtcacgatttccccctttgcagtatcatggtgatacttcggggcatggcgacatgtgtggaatcgtgtcttgtgggtacagttgtacacctctggccagagtaaaactattcgaatagccgtgcccgcggttatgggcgatcaaccagattcaccgtgattagtctcatccctagtttagcttaatgaactggtgtagttcaggtggttggttgggcctgttgcaacgtggtgtagcgttggacagtgtttggttaatattgattaattactacaactgttttactgctttcaactactgcttttaaatgctagctttatgcaaaagaacctctagcctcctttggttatatcctgcatcatacctcctcttccggtatgacttgctgagtacagtgggtagtactcagtcttgctctcttttcccccacaccagagctgaagatcttcctagttggagctgttttgtcaaagttggtttcgtcgctgccgtcaaggattgcctgtggagtggagtcgcccgctgctgaagtcaagcttcccggtttagctcgcttttatctcttccgctgcatttgtaatcttttctatttttgtaagacgtggatctgtaggtcaacaattgtcgtttgtgtaccctggctggtcctggacagggatttaatgcacattcagcttagaaattctggttcgagaatttctgggcgtgacacgttgcacggggagtacgccggccgttacgccggcgctcgatgttgaggcgggcatccggctccccatgctgatcctcccgagtcgaaggcgtcgacgagggagtggcagccgaatgacgtgcagccgccgccgctcgccgcgccctccgtcttgatgacacggaaccggtggtggcggcgccggaggtcttggtggtggcggaccgtccaccagcacccaggcgctgctgggccgtcatgaccaagttggccacgtcgtccagccatcgctgagctggagactcagggtcatggacgacgggcgggtgacgtaggagcgcgccagcagcctgaagcgcgccctgaggcgtgctgccgtcgccgtagacgaggaggcgacgctccccatctcgccgttctcctgtatcacccgcgaccggtgatgctgcggatttatcaaccctctcgagcgcctccccctgcttaggactttggtgtggaggaggtgggggagtacgagctcgacggcgtgggtttggctccccgtcgtcgccgctcacactcggagagaggtcgtgcacctttgcttgctcggccattaggctgatcaagaaaaacttggcgcacacggaagagtatgagagctcagaaaacacacgctgagccccctacctggcgcgccagatgacggagctcgtggctcctcaccgggagaccgcgcaggcccccctttgccggttcggccgggggcttagggtgagatctcaagctctctctgtatgtggaaagatcgcttgctcggaagaaacgcgagacacgtcggcgatctatacaggttcgggccgctgctcagcgtaataccctactcctgtgtttttgtggatttgtgtatggacaagttacaaaggattaactccctttcccctcagccttccaaaagggaaaaagtccccctctaaatgggcaaggtcctccttttatatctcaaggggataccacatgcacctttctctttccaaactggactgttctttttctctttaatgggcggagatcggtacggtttccatccgggagcccttctgatgggacaacccacacctacccccacctcccccgaagacagagatgacgcgggaccgtggctgtctgtcgatgacgcgaccagtgccagaccggtcattcttgtccaccacgcgtcagcttaacaacgtgcatgtttgcccttcttcgtgtaacaccttgcctgtaatggttaggatgaagcctggtataaatctgaccagggctaacgtgccatctctaagagataacaccctagctccggcttgagacgagtgcctagaggctttcgtcttgacgggatggggcaaggcgtgcgtcagacccccagccgccacctaacccgtgatctgaccggtctgtg

SEQ ID NO: 9057 - DNA, 16658 bp, Oryza sativa
ctcaaacttcaaaaaatggcatatcaaactgtccccaccagtttcaacgaatagaaaacaatgcaatattctcacatgagttgtaggtacaaagaaagggcacaataatgaccatttcaaactgtcagttatatttaccccaaagaacacaagaagtccatctcatcttccaaagaaggaaacgggccgttgttttgggtgccatttcgaccattacgaagattaattttggctgcttcaactgctccagccaatcaaccatgcacattacagtggtactaagagcaagtttaatagtatagtccactactagctccaaattatctatagccaatgtaatagtcaattcatacaatatttgcttactacactattaatacatggtcccacctgtcatacacacattatgtttgtccgtgctgcagctgactacagatctgtagcccgctgcttttctctcttttcttttatctgcttaaaatatgtttatatctggtttatagcatgctattgtacctactctaagtagtatactccattccaaaaaccaaaaaaatataaaatacattgcacagaaatccgctcaagaaggcatgtagtaccatcaccgtactcacattgatgtactctcaatatccatctggctgttcctgacaagataatctttgtaagcatatggtacggacttaaggatttcccaaaaaatatatatattcctctctatccgtgacctaacaataacacagcaagagacacctagctaaatccaagccctgaagcatccctcgattgctccatccagaccgccgagatggctacaaatttcgagagatttttttgaattttttcctcggatggaaaaaaccagccgaatcttccccgtttttgtacggcctcgcacgcgtatggaacggaattttgtcgtgaataaccgtgaggataaggtgaatgaacgggggtgtgcgatagaagggaagaagggtcgctttttttagatctcaagttgcattcatcgccgaccctgttctgtcctgaattattgtccacaaaagattttactaatttgcatgccaaggagactttctcttctatctgcccctatataagttttttttattttatgtatttttcatataaaaaaagtggatgctgctagcagctaggtgatgcttccgtcacctgcaaattgctcgttgaaaccggctttattcaagtgaattatttgcccattatgtgcaggggattagaataatgctaggggatggtagtacaacgcttggtcggctcttacctctttgagagcagcagggttcagtttgacacttgcaattttatatgtaaacccccaagaaaaaaaggtttagtggaacagatgggaaatagctgaactgaggcagctaggcctgcactggaacatccctgatgaactatttaatttcttttaaatccagcaactacacagatacaatcatgtcttgtagataatacttctatcgaacggtacgcaggtgccatttgggcgaaaataagatagtacttctagagccggccattgtaaattgaacaggaacaacaaatttagcgttagttcatattaaagccaaattttatcacatggatactttgtaagagcgagtttaatagtatagcccactattagctccaattcatctctggccaatctaatagtcaattcgtcatataataattgcttactatactattagtatatggctccacccatcatacatacattttgtcttagattccgtactgcagctgactacatatatgtagcccgtagctcttatctctcatattttattttattaaaatatgtttgtagctggataatagtctgctattatacctgctctaagtcttaaaatatttcgatttagtcttctacagatatgagtgtacgcgcgtgtttatatgggtaggtgtacgttcatactgtgtttgtaatttaatccaccatcgagatcagctagcttcgttcgtccgtgagccgcacgatccacatccatcggacggtccagcttgtaaaatgaatctcactactctactcactccaggcacaacacggacggttccccacggagttaaaaaaccacacacacactgtacacacccaaagcccgaaaacccgttatctctcccgtgatgcggcgtggggcccaccaccacacaccaccccaagtggctgacatccacagctccgtgggcccgggtcccacagcctccctttcccctccccctccaagagtcaaatctccacctcccccctacgcccacggcccaccgacacgtgggccccacgacccagccagccagagtcccagaagttaacgggggcacgcgaacagagaggggggccccgcgcggcgaggtggggcccagtgcgggtatgaagcggggaggcgctatatagagcgcacccatcctcctcccccttcctccctctcctctccactactaataccaccaccgccgcgccggaggtggaagacggacggggtagagttggggtctcgcggtgagccgattcctctctagtggtcgcgcctggtgtgttcgccgacgacgccggcgtcgcgtcagccatgggtgggctcgaggagatcaagaatgaggccgttgatctggtgagaaaatcactcgccgccaccagctacctactacttcttcttcctcgcttcctccctctcgcgtgttgggttgcttaggctttagctctagctttagttcttaccatttttgactggcgatagaaatagtctgagaattgaaaattaatgataccggctagctggagctgagtagatttctgatacgcttaataaatgaaaaggaaaattttccatgtaaagatgagcacggatcgttcgtcgtcggcggcggccttcacgtcacgctctctttctcaacgcggcttttcataacagaaggggccagttgtccatggccgcctgccatgttcttctcttattcttcttctctctcaccctgttcgctcctctgtactgttttgctgctgttcctctcaccatcatcaatttgttcatctgtctccggctcctccttttttttggttgaaatgaaactttttgaaagatcctgctcacatgcgtgtttaatctgtcatgtaggagtacactataccactatggtcacttctccaccaaactatagtataaaaaaaattgaatctcagatctacgcgtaattaaatgcccacctccagttattagtattactcttgcctctactttcctttttttttagttcttcatttatacaaagaagcagtgaacaaatatactcaaatagttcttcagcttcgcaagtactcctactccataaaactatttttcagcttcacacgtaaaattaaaattattcatgagcttcatacgaatttgcatgtacgtaaagtcaaaagtcacttgagcacgggcgcgagctaatcacgcagcggagattagtggctaaccaccataaaggcaagctaaacacacagtggaatccgtgcgtgcctagctgagctgcggccttttttttggtttgctttgttttttttttgttcttttttgttgaccaagcggacagcccaatccaagagcacaacgtataccagccgctgctcgctttatcttttttttaaaaaaaataaaaatagattaaaaatcagtttaattttgggctggttttgttcccttcggctcacgcgacgagaaaacgaaaccgcatcttcccggcacgcatctcaaggacgacacgaggggggccacgggaagtacgcgcgcctcctctgactgccgctgagccgtctgatctccatctgacggccgtactttctccaatcattggccgggcactgcaacccccctgttgccccttggactcttcctcctccgtgtgttcctagtagatcctgaccgcttggctggtaggcgctgacggcgtgggcccacacgcaccacctgggagatattttatctgtcaatgacaggtcgggcccatccaccaatagtaatagttttttgataaggctgtaaattgttcaacacgcgaatctaattataggtcgaataacgagatagtgataattaaggatttatcgctgtactcgcatatcatagacccgactgataaattcttaattgtcacgtcttactcgaataactgggtaacccgagttcttatttctcactctgttgttgctgactagtgtggttgtggcttttgttgttgttgcaggagaacataccgatcgaggaggtgttcgagcagctgaaatgtacgcgcgaggggctctcctccgaggaggggaaccggcgtatcgagatgttcggccccaacaagctcgaggagaagaaggtgcgtgctatgctttgtcaaagccttttgcattctcttgttgcgtgtggttttctttcatttctgacgcgaatcgctcatctttgttgcgtctttttgtttgtgtgcttgtgcaggagagcaagatactcaagttcttggggttcatgtggaacccgctgtcgtgggtcatggagatggccgccatcatggccatcgcgctggccaacggcggcggcaagccaccggactgggaggacttcgtcggtatcattgtcctgctggttatcaactccaccatctccttcatcgaagagaacaacgccggcaacgccgctgctgctctcatggccaaccttgcacccaagaccaaggtgagctcaagaaacactggataggagtactaactaatgcactttgaactggaaaccgaccttaattattccgttgtaccacacaaggctttgatttttgtattgactagttgtcataatagtattatacagtagtggaaggaagaatctctatgtgcgtacttttcggacgggcactttcaattagagtgcctagaaactgagctctgaattgtccagtggatgggtgggcatatattccattattgcaagaaaataaagatagggacccacctcttggacagtactgttcatttggcgtaaataatagcctaggtgttctgcaattgcggctaatttggatattgttagcaaaacaacgtggtctaatttttctgctctggagctggaagtcaagtttctgtctttcatacgtatgatagattgataggtctatgatatcaggaagtatcctcttggacatgaattatttcaccatcacaattctttaactgctacggagctcatcctcagttagctagtcgtccctttcattgtatttttatttaataggataaggggagaaaaatgtggcagcgcacgcacgcacatcgttgtcacgtggaatttttcttttttcgtgcaacttgtcaactcaaatcagccgaaatgaaatgtgttaggtactaggatgtggtcatgtagcagttggcactttggaataagttgcaataatagtgaacactgattacgtaatcttgaatttttcttttaaccaaacttgtttgcttattccaggtgctgagggatggccgatggggcgagcaggaggcagcaatcttggttcccggtgacattatcagcatcaagctcggtgacatcgtccctgctgatgctcgtctccttgagggtgatccccttaagattgaccagtctgcacttactggggagtcccttccagtgaccaagaaccctggtgatgaggtcttctctggctcgacctgcaagcagggtgagattgaggccgtggtcattgccactggagtgcacaccttcttcggcaaggcggcgcatcttgttgacagcaccaaccaagttggtcacttccagacggtgctcactgcgatcgggaacttctgtatctgctcgattgcggttggtatcgtgatcgagatcatcgttatgttcccgatccagcaccgtgcctaccgcagtggcattgagaacctgttggtcctcttgatcggtggtatcccaattgccatgcctaccgtgctctcggtcaccatggccattggttcccacaagttgtcccagcagggtgctatcaccaagaggatgactgccatcgaggagatggctggcatggatgttctgtgcagtgacaagaccggaaccctcacccttaacaagttgagcgtcgacaagaacctcgttgaagtgttcactaaaggtgttgacaaggaccatgttttgttgctggctgcaagggcatctaggacagaaaaccaagatgccatcgatgctgccatggttggtatgcttgctgatcccaaggaggcaagagccggtatcagggaagtgcacttcttgcccttcaacccagttgacaagaggactgctctaacatacatcgatgccgatggtaactggcaccgtgccagcaagggtgctcctgagcaggtgagaaagattgacccttgtttcacttttttttttttgctaatttctttacttataatacgtgactgacatttttttggttgaaatttggacagatcctgaccctgtgcaactgcaaggaggatgtaaagaggaaggtgcatgctgtgattgacaagtatgctgagcgtgggcttcgttctcttgctgttgcaagacaggtatgatggctgccttactgaatgatctatcacctttttagtgattagggaaccatattctcataccaatatgatgtcgcaggaagtacctgagaagtcgaaggagtctgctggtggaccatggcaattcgttggtctgctgcccctgtttgatcccccgaggcacgacagtgctgaaactatccggaaggctctccatcttggtgttaatgttaagatgatcactggtatgtacaaatattataaaaacagaaagcagtataatagaattttgcaagagctaatggttggattttaatgtacatcaggtgaccagcttgctattggtaaggagactggtaggaggcttggaatgggtacaaacatgtatccttcatccgcattgctcggacaaaacaaggacgcttcacttgaggcacttcccgtggatgagctcattgagaaggctgatggttttgccggagtcttccctggtatggcttggatcgatgcagacttacctgcttgtttgctttcaatgtttgcattcctcaatgtgtttcttgttatgcagagcacaaatatgagatcgtgaagaggttgcaagagaagaagcacatcgtcggtatgaccggagatggtgtcaatgatgcccctgctcttaagaaggccgacattggtattgctgttgctgatgctacagatgctgcaagaagtgcttccgacattgtgctcactgagccaggtcttagtgtcattatcagcgctgtcctcactagcagatgcatcttccagaggatgaagaactataccgtaagttcttcctttgcaaataacttgtgttctctgtaaaacatatgatcacatcgcattctaactttgtattattttgtctcgtgtacatcagatttatgcagtttccatcaccatccgtatagtggtaagtaccatttcgtacataaaagatggaatataagctcttttctcgattttccaaactctaatatcaattttattttccagcttggatttttgcttattgctctgatctggaaatacgacttctcacccttcatggtccttatcattgccatcctgaatgacggtatgcattcctattgcccagataaattactgataactattccctccatgtacattcctagtgtaaggatcagttctcacgcaatatttttgcaggtactatcatgacgatctcgaaggacagagttaagccttctcccttgccagacagctggaagctgaaggaaatcttcgctaccggtattgtgcttggaagctaccttgctctgatgaccgttattttcttctgggccatgcacaagacagactttttcacggtatgctctcaccttaccctatctgtagtctgtccactacacttctctctcattatgtatgcttttgcgtgaagttttgttctcactaaagtgcttttgttcaggacaaattcggtgtcagatcaatcaggaacagtgaacatgagatgatgtctgcactgtacctccaagtcagtattgtgagtcaggccctcatcttcgtcacccgttctcgcagctggtccttcatcgaacgccctggtcttctcttggtcactgcattcatgcttgcacaactggtatgtacaagacagtaactactcaacaatcgagctacgtcataacaacgtcacggcaaatcatgcctaatcctaaccttactgtttctgtaggttgcgacattcctcgctgtctatgccaactggggctttgccaggatcaagggcattggctggggctgggctggcgttatctggctttacagcattgtgttctacttccctcttgacatcttcaagttcttcatccgctttgtgctgagtggaagggcctgggacaacctccttgagaacaaggtacatatccagatctttcagttgtcagaaatgtacatatatggttgtctgctccattttttgtttcagctggctgatgatccgaaccttgtatttgcagattgcattcaccaccaagaaggattacggtagggaggagagggaggcacaatgggccaccgcacaaagaacacttcacggccttcagccaccggaggtcgcctccaacacgctcttcaacgacaagagcagctaccgcgagctctctgagatcgctgagcaagccaagagacgagctgagatcgcgaggtacattgctcacttccaacactgataaaatccatcaagtgcctaaccacttatgttaattaattaattactactacatcaatgagaaaatgttgctgaaaactaaaacacttgttctggatcataatctttcaggctgagagagctgaacactctcaagggccacgtcgaatcggtggtgaagctgaaggggctggacatcgacacgatccagcagaactacacagtgtgaggaaccccctcggcattcaacgagagatcgtcatcagcgctggagcgggaattgcaaacggcgctctggttaaaggaaattttcgatgaatgattggaagaacaaaaaacaaaaaaacatggctgatctgaacagccctagttgtaaagtgctaccaaatatatggtccggtttccctcttctagagaggttttacgttctagtggagtaccgtacgtacgtgttggagtacgacgacgtgttgtgatcgtttttggtctttttttactcttttccccctaactagcggtcttcttgcggaatgcaagatggagaaataatggatgaaaaattttctgccacgttaattctcactttggcaaatgggtctgcttcaattacttcttaattactctgcaatgccttcctctcgtgaatgaatactgactgatcaattggtgtgttgcgagtttgtgtattctacttccttcatacacaatcatattgtttttccgttgtttcacaatacaagatcgtgtattgtgttttatattttaagacggaagtaaaactaagattcgaatcctaaacctaatgtgtttcttgtggtgcatgctcactaactcaaaagaattagcctcctttggtttggaagttctaaagaaattttgcatgaattgaactaattcatgtgaaaatcctgtacaatcttacgttccaaaggaacctaatataacttatctctttccctattgttttctttttttttctctgtcctaaaaagaaacactattacaattctagcaacgaccttatgaaattagtactcctataaaattaattggttgctcggattacaagtactccccaccttactagtactatactctctataagctactccctccatcttataatatactacgtctagtaccagattgaatatattctagtattataaatttaaacatgagacatgtccaaatttgtaatataggctatccagattcatagtattaggatgtgtctcatccaaaactaggttgctattttatagggacggagggagtagcattgcactcggcatggcaaattttaatgctagaaatgcaattttttgtacacaaaggtagtatcgaatacacaaggaatttgaagaaaccctgtagcacagctccagctgagaacataatgtgaatatgaaaaatagtaaatagttaggtgttaatagaaaccgactaccctattgttaggcttatgcttataaaccaaaattattttttgaaatctaattttaaagttgatgttgtgattttttttatcatagtttattttgtagtacttatttttgaattgctaaggatacaaatataaaatttttatttataaattattttttatttattaataagccatacgaataagtataagtgaaataataggctctgaatagggggatattaactggctaggtgttatatgttcaagccacaaataaagcggcatccacatgggttgtaaaggagaagcttcattggtgtagtatacaataagcaaagatgccttgaggtgcatcaattatattggaggagattctacactccaagactcgtcaattatattgggaggattctgcactgcagactcggacaatacctactccgtagtcctaaccatgtggaggagatgaggcgaatacagtacgctggctataaaaatcggaaaaagaaatatgcctagcactcactggtcactactgctatatctttcctgtggaaaaaagggtagccgaccgaaccgtctgcagatgtagccaatacccaccacagatgagcataagccagagaacggaatctctatcgttttatcattatcatcatcgtgtactactccataaaagaagatatagtggaattcggttcgtacttcgcctacaattccccttcaaaaaaatcgccacccttttttcctttccacaacccaaagaaagatgctccatgttgttggcagtgcgtccgtacgccaagccggcgccggctgaggcctcaccatttcgtttacaaccaaattttaaattttaaatttaaagctgattttaagaggcttttaaagttttagcttttgattttaagtcgctaagaacaagtatatgaaagttttattcataaattatttttcgtttgtaaatataccactttgtttatttaggcaaataaacgaaacgatggttccgtgaaacgccgcatccacccacccatccgagcagaggatttagcgctgcaattcccagcaaaacaccgcggcgacgaggcggggtgcgtgtggcgcgtcccgtcacgttgccatcccgcccgcgacccatccaaccgacacgcattttgctccgcctccgcgccacccatagtgcgcgtcgccgcttgcccttgggtcccgtcccgatctccgccactgccacgagaaggagaaaaaaaagcggccgattctcgcgctgttcccgcatgcagccgcggacgtcccgtacgtcatccgctgctccaaatcaaaccggcggccgcacgcgcttgtctgatgtcccttcccttccccgtaaaaatcaccacgcatcacgcggaagatagatatatggattggcagcaagattgttccctttccttcgcgttttatgcagcgagccgagcgatcgctctccgtcgctcgccgctacggcagaaaacggcgaccggtgcttccatcgatcgatcggctctcccgtcactgcacgcacgcctaaatctcacagtatcaccgatcgactgactttacaggttcgcgtcgttttccgggggtcctggaacgtgtttagcagctacggtgacagttacggcgcccaagtgtcgtttgctcctggaacatccggtgaaattaaaatcaacaaacccaaacagtatcagcagtactagtaactgtgctactatagtgctaaaagtgatggtttaggaattgtttactggagctcgtgagccagccaaccagctcgaccgtgcaccttttctctgcaaaagcgtcgtcgttgttgttgttgtcatggacggcctaaatgcgtgatacgatttagcattattacgatccagactgatttggttggggtgttggcctctcgctagggatgcacgaagtgactggatgagcttaaaagaggcgacagcaagagcccggtccgtgcacaagataagattcagttcaattggcatctgttattctccttttttttttcttctctgcatgagcagccaaaagccctgaaagttgtgtggctctactaatcagtgtaggataggacggctaatttgcctaattcgctagctgctgattactaattccatggaaaaagttgtgtagtactagtgctactacagcatcagcaacgctgtcagattggttgattggtcccttcaccaaagtgcagggaaggaggacagggacatgtccagatcaggttgcgaagaacaaatgaattagaaccgctgactcagcatcggcgaacgttgggacggcgactttgttagttaaaaccggcaccagtttggacagtcactagtagtactactcggcacagagtttaccagagtaatttgcggttgaacttagtactcctactaattaagatggtttgattatcttcatgatcacagtttgaagccgtcggagataaacaaatcccgagacggtgaccacatcagaaaattttcgcctttcctttcattttcctccctccgtactgttcgactattttgtgttttttgggtccaaattcccttttttttcaggttatttaattttaaattttgattactatttttttacttttatttttttgcttactaaacgttttggttttcctgttttgatcaagtactttcatccttttgttttttttatgcctgtaccagtttttttccttttgatttgtcagttctccttttgattcttgaaaggagagtgagagcaaatatggaaatgaaaaacggggctagtaaggaggcctggggtcagattttcaacgtggccttataagccattgccaaagtttaaaattttaaatagttaatttggggtgtttttgctgtaatttattttttagcactgacaaatcgttaaggacatagatatgaaagtttgtcatatttttatttcttcgataagccttcagggcagcatgaaaatgttcctagttgcaactcaagcttcagggggaagaaaaagtctgcaataattctcagaattcatggtgggctggacatggacatcagacagcctactttcaggtgagcagttgaaatgggctactttgagttaggccaatatagcccaattacatcgcttcgcctctctgtagctcatcggcttgtaggctggatgggccgaaaaaggcaatggacacctcctgtcctgtatctcgattttttttttcatttttaaatttttattttttaatatttacaggaatataatactggcgaaaatatttacaaaaatagaccctggagggcggcagggtgatgtgtgtgaccaggcgctggaggccgttgagcggtcatgcaaattttgcatgcggcgaaaattgcatttcacccccttacggatctcagcacaaaatgcgcacacggcgccgtgtgctacgtcaccttgctgccctccacttgagcggtagggtctatttctgtaaatattttcgctggtataatatttctgtaaatattaaaaaataaaaatttaatatctcctcctctccagactccagagaaagaaaacgtctgcacatctttccctggctttgtacgcatgcatccatttcataccgttcgatgcagaaactgtaactccttttggagtctagcttgtacagacagttaaaagttgttagatgaaatcctcatcgacgttctcatctgccggctagtacgtagatcgatgatgatatcctccgaccgacgcaaggatgtttccaatcataaatgccgcagagacacatgtttgctgcagtgcattgccatgctgccatccaatgaactctggcatatatactgctcccttttgctgtggcaaagcaagcaggatatatcgatcagggtttcctctcataaatgggcaggagactagatccaagaaagaagctagctagcatgggcatcaaactattcatgggccggccaggagctgaagcccattattatatctatccagcttttcaccaagaactagcccacctctacagtctgcactatacatgcagacatgcagtttgtgtatactatcttctctctctcattggttatcactctaagacagttatgttacacagtgaacacaactagctaggtagatatattgatctgtttaattagtgtgggagatgtcggtgtcagctagcagtagaatatcacacaatccttctttttgttaatcgatcgtcacgtcatattcgatcttgtatacgtcaattaatagtatgatgtatatatgtgtgtatcctttcaaaaagaccaaaaaggttcgaggatctctgcgtgcaccatgcatgcaccttacgtaccacagctcttggaaacgaggttctatcagctacagattttattaaaaaaaaaacaagtctaggcacaatgattgagatcacttattggatggacaatatgtcaatatatacacatgaaaattgcctggaacaaacgaattaagataagccagcaagctagcatgccagcgatcccccatccaataaggttttagattctcgatcgaacagtgcgcatgtacttactctattatattgcaaaataagtttgagtttcagaatttaaaatttatttttaaattaattaatttctactctcttacctacgccctttatatatgaatcgagaagttttatcccttcaatatcccttaccttctaccaactaaatatactacttttgcattaattaaatgatatcctttttttctacaagatatcgtaacttcgcggctttagttgtagaacaccacaaaaagtgacttttggaaaatacactctcaaaatatgaaaatttactgttggacactgtactcatcaggatattcatttctggttcaacaggagaaagaaaccgcgtgaaagttctgaaataccccacttgacccacatgtcagatctccatcactttctctctcgatgcctcgatgatcgctagcagagccacctccatctgcgagctggagaagaaggctcaagacagctgacgaggagtagaggagagcggagaggtgggagcctgaaagctagcaggtgccagatccaagctccccacctagatccgcgctcatgcaagctcgccgattggatccgcggctgctagctgaggagcttgtcgactgggtctctacaccagcgtcaacctcgccgtgatgactagatctatctggggaccctgctgccaacaacgtcgtcctacccaacgtccttatcattgcctccctagaacatctatcgcaaaggccctggtgcttgcctgaagcgcaccaaatccccgtcttgctgcctgcgccacggatctgcgttgccttggcactcgttggcagagctacctccatttgcgatgtgtgctcattggccgaaaacgaaggagagctgagagaaagagagaaaggagatggagacctgacacgtaggtctagaggtattttagaactttcacatggtttctctcttctattattgaaccgaaaagaatattctaatgggtatggaatcctacagcgaattttcatgttttgatagtgtcttctcccaaaaagtcatgacgtgcagtgtcctatagctaaaaccataaagacacaatattttgtatcaaaatttgcctaattaataggcaaattttggtcagttctcctatctagctactatttttgtcttattaggattaattttgtgaatcattttttttaagaaaaaacacagtatgaatgcatgtaaatatattgacgtgcagacactgacccctctgaataatattttaggactgaagcagtgcacatcacacgcactgttgaacgatggtacggtaagcaagtatatccatgcttacagctagctagcacgagtgtccccgtcgtcctctgcagcaacgatcgaacatgcatgacaagctagatcgatcatttctgttataacaacgagtcgtccaaaatgctcatatacatgtcggccggcctagctagctccgcatagggcatgggcaaaggtcgccgtcgtagagctgagagctaggataatttcggctaggttttgttccgcgtacagcagcagccatacactaccggccttttcctagctactccctccgtcagagaatttggttagatgtgacatatcttattacaataaatttgatagagaattcttgtttagatttattgtattaaaatataacacattcaattaaaattttttatatttagggatggagtgagtagctcgctgatccatcgatcgttttcccgtcgtgggcatcgcgatcgatcgatcgatcggtcacacacgacgcgcgcggcgcgacacatcacatgcggggcatgcggcgccaacgcctgttgccaccgctcgctcggtcgcgcgacgtacgcttgcaaaatgtccagtgtttttacgg

SEQ ID NO: 9058 - DNA, 16714 bp, Oryza sativa
ttcctgcagccctttggagaattaagtagatcagcatatcttagaagtgcagtccgtaaggtgcaaggagaagggaaaggtggggccaaagaaccaccccctttacgaggtgatccatcttctgcgtctgcatggacggagaaaaatgtatctggggaaagatctagcagcttttcagcctgctccactgtctcgatagcattttctgaataaacaccaacatggtcaccagtttcatacctgatacaaagttcttagaaatataagttgttatcaataaaatacaaattgaaggatcatcgttgagtcatttgacttcacacataaatgtcaaaactacacgagaagacataaaaaatgtcagttttaggataccaaagaacttacacaagaccagtgcctgagatatcgaactccagatgaatgcaagagcgatctgaagctggcttatggagttcctttcgaacagcaacattagacctgggcaataatcaaatgatgaactagaatgcatatactgtattctaactgaacagaaggaaggtgtagctaaatcattttcttgacatatgaatacctgacaggatggtgaatatcaataacaccactgccattggcaagtgaccacgatttgtcttggaacgatacatctgatttatcaataaatacaattctgtattcaggtatagcagcagtgtaaggagtggatgcaccagttgtatcatcttcatcacggagcagttggtccaattctggccaaacttgttctttcctacaagtattagaattgccaaaatgcttttagataaaataccagtatacttagaaagtaataacataatctagacatcactttgtcaataaaattcaggcaaggagcaataaattgttttaacagaacatttgccaaggaataatcatttttggtggggtttcaacctatagaccagaatccaagttgatattgttagtatcaatttaatttagtcgcaaaaacaggatagatttaagaacaataaaggggagtattaaagaatctaactacaacaaatctaacttgctttagtaaaatatatttctgttgtaaaggaaggctcaatatatccaaaactatgcaggtacatgtggaagcctaagctctgccccataaatagttcaaaaaatataccatgcacacttatttgtatcaatgtttctgtgtactgaagaaaaaaaaatggtgcatgtggtatatttgttgaactagatatggggtatatcttctacatccattttccagaaagcggaaacattccacattcaccaaaaagacaagttgttgtttcacatatgacaaaagaggtttttattcagtatccaaatccaggaccaatcaaagagaaaacttggagttcaagcctagattttgcggatatagaatcaggcaaatcagatatccaacccacttttgtccctacacgacagatatttacatagaaaagagaacacaaagatctccataccatgctgtgaagtcatcctcaatgcactgatcatcatctccaaggccaactgggacaagacgcttgccacctatatgcagcataaattagaataattacacccaataaaggatcaggctgcaggaatatatgtcaggaaatatcactttgttacgtaatgcacgacataagaaaagttcaacatgattttactacattcaggaatgactaactgatgaatatatcaggcagcaagctcaaaggtttacatcagaacaagatgtaaaacagagtaaaacctatgatggaagcataataaggaacaaatataaacatgtattggaatggtcatactatatgccaaaattaaattgctcacaagataactaaattccacaatagacttgttacaaaagttagtaaactaattagaaactgctacaatggaagtgtgccccatgcctgtgcaacaagttgtttcaatatagcaatgcactcgccctattttcccaacttttctccaaatgaagtgtagagcaaagagtacttaccctgctcctctagcagttcgtccaccacctttgcaacctatattttcaatataaataacccagcatcagttaccagaacactagtcaacctttaccaatttatactagcatttcatagtcaataaatttaaccttattaaagtgctcatactgcctatttcccaggccaaaaacagcatacttaagatccttaagccagacttccttttccttcccctgcttcaatgccaaaaattaataaggagatcataaaataatgtagttagaatatgtcaacgaaatggagtcaaaatgactttacacacctcagtgaaccatttgtagaatcttgcagcattgtcggtaggctccccatccccatatctacactcgatgaaacataattagctacagaagtcattgacacgtagcaagtgaatatagccacaagagatacagtatgtgcaactcatgtaaaggcaaagattgattgttgttcataaattctagaatgaaaggaaattcacccccaagctagttaagttctttcaagatgccattcaatggcattagttcataacaatccggacaagaataattgagctagctcccccacaaaaagcccacgtgttcaactctcacccacaaaaaacccacttgttcaactcttactcagatagcaatgaatccctctaccattaggctcattaggctgctatataattcatctgaattgcgatgtttgctaatggcatagctgattgacggcatagcgatgttccctatgttatagacttagggtagcttttgtaactatagaatctcaacaatttttgtatgacatacatgtcacttgagctttacaacaaaggtaggtgaattatgtaacccccgctagcgacaaaaggcacaattcagcaatcgaccaatcaaaatagcaaggggactcacgttgctaggaagagcaacacgatagtttccttcctgagcttctcctcgtactcctcatcctcagctgcatagtcatcctacatatgtcccacacatatctcagattcctaacaccaaagctcagacaggcgatctagcatacacatacacacaaacacatgcagatcaagatcatcacaattaccagatccacaactttgaacaccgccttctcgtaccgcgccctcgcctcctctgccatcgcctgcagcaaagcaatacaaaccgaatcgaatcgaatcgagtaagtacacgaagattaaaaaggcaaaatcgcgcaaaaaaaagaacaaaggaggggaacttttggatcggaggcggatcggatcgaacagcgaccttagcgaagccctcggcggtgccggtctgcgtgccgaagaagacggtgacgcgcttccggccgtcgtcggcgtcggcgtcggcctcgatcttgaccggcggcgggcgcggcggcggcgcggcggccttgggcggcgcccctccaccggatcggaaccacacggcgaggatgaccaccccggcgacgagcgccgcggccgtggcggcgagggcggcgagcgggtcgccccccgccgcggcggcgagctccggcggcagcacggacgccgcccacgacctcgccgcctccagcgccagcgccatcgccgcgccgcgcgcgagggaagcgagggtttggttggggaggaggcgcacctacccccaacaacaactgctgctgctgccgctgccgctcgctggcctacgctgctggagaggggaggaagacgagttgttgcgggggctaaaagtctcgcctttttctgctgttttttataaagtcgctgtcttttgcaacggaggaggcgagcggcgtgatcttgacgtgctttgcgcttgttgttgcctttctcgcctgattaaaaactttttttttttgccccagcagaagaggagaaagctgcctttgtctgaaccctgcactgggatctcttttcagcatctgctgccgtcctggatgatccatcttgtgatgcaaaaattgctagatgaaaagactttttcgtttttttaaaataattataagcctactaaagaaagttgaaaacatgccattaatatttttgctattgctttcaatttcgtaccaacttaaacaaatatttttttcctgcgatgtgacagctacaagagctttagtacagcgtctatttttttctccgttccgaatataagaggtttttatggaagtaagaaagtatgtagagctgtgatgctctatttgataaatggaagtaagaaagtatctggcgatgcttgacagttgttcgggctatctagcagatctcgataataagaagatgttcattttttttttcaaacgcgtaaaaggattgtacgtcgcatcgaatccaaacagcttatgcccaaggggggagggagaaaaagaaaaataaaataacccgagctaggaactactatgacggctaaaaacacaactccaaacacgtgggagggggtagagccacgctacactcccaagaaatccctaaaaacagcaacaccggctaaagaacacagctggccctctgagcggatggactccagaaccaccaggaccgaagcgagcgcagagtcgaaaaccctggagtttcgttccttctacagctgccaggagactaggagaaccaaggagtcgaaaccgatgcggaggtgctcaggtaaacaggccctggaggatgaccactaatcctggagccagctaccacgagggggagagagggcaactcagccaggaggggacatcacacggaattagacctgtcgagcgaacacgcagttaatgaggatgtgattcgtcgtctaaaaaaaaaagatgttcgcttgcttttatacagtgttttaaagaaataataatgatagtaggcatctatatttgcctcgtgctggctctaataagttcttatacaagttaaccaaccgaaccgatcaatcgaatggtgaggagcggatatgctatgacactagtggttgacaatgctgtatagtcaagaagtacaagttagcattgttgtgtccactctatatcacatactctcacctttgatcctgcttctagggcggtagttagattagagaaacgacgagaagagttgatgtgatggcagaatttaaggcgaggaagccaaccaaatggcatgcaaaacgaacatataaatagcaagtagtgccgtggaagcaccacttgagaattatgttatgtacttccatataagaaagaatggttatgtgtgctttgcatgtctcatcaagggagatactatgtgctgtggttacggatgggaccagtccgttattgattagtgatcacttgcattaggttatagtaacaaccaaacatagaaaaagaggagttgcaaagtttcaggtgtaaattatctgaaccgactgaataaaaaggttgtttgttccctacaagaaaactctaattctttagccagtacttgcatagagtggattatttttttgccagtcttatatatgagcaaaagagagaaccaaattaaactgccggttgtcattttcttcataacaggttaccaattggtttcactgtcactgtgtacatgatcttcagaaaacacctgagttctgaacagagtgcttgcaagttgcagttgtaaactattcatcgtactatcgtgtcaacgcgatatgtatatatatacggagagaagatactgcgagtttccaaagctagatatatcgccggcactgacaacacccagatctcaaggaagagtacgtacaaacgcgaagggaacttcaggtgcaggttgttctcaaaaaaaacttcaggtgcaggtgctgagaagctactgattactgaatacaagcccagccgcccatgtggaaagaggtgaaaactgaacagcttagcctcatttggcagcaatacgactgtgagaagatcttacgagaattgtatactcagataatcacatatctaggatatgaatgttcaacgttgactgccattggttaattgatccagaagtaattaattaatcagagatgcagagcctcgatggagaactctgaactcattcaagatgaatttgaggagaaaataatatatcagacaacatgccaaaacactcaatcggtttgcacgaagaatttatggaaggatgatcatatccggaaactgaatttgaggcaacaaattaaggcgaccatggtctgcatctaaatcagcaaaaacgactgattcatcctgttgcgttccaggctttcagagttgacaagtgagtgagtgacaaatatatctagatcggtgcaaggcagatgcgtacgcgcatcccccgctgtctttctcaattctcgtgcgtcatgactccaccgagttccaaccctgaacgtcactgacggccactgaacagtactgactcgttcgtatgccttgagtttctttttcctctctgtcccggctaatttggttacaccaacgacggtacacatgactgaccctgaatgtctgcatgagcatgaccctgactgatcctatacagtttctgtctaatctgcatatgttctttcctggcttagatatcggcatatcgctaggtgcatcagaattaccctgaagaagatctgataaaaaaggggatccatccatgccatgcatggacgagcttgcatgccgtcaatgtcacatccatctgcagtaaccactagtcctccaatgtcgccgatccatctgcctgtttttatcacgaaaattcagtaattaatggagaccaagtacatatccacgtactccttacgtacgcaggcagtaatagaacgctgttcatgacagttatgcttctggacacagcggccatcccaatctcagtctcatccattgctatcgtcaactcgatcgaccaaactgttcttgtgcatacgcgtgtaaatcgatccaatctccaaattaacagaagcagacgcttaattgaaatcgacttttatagcatagtacgtagctgatgctacactgatagattcgatatcatcgagatcgacgagtactgatcgagctggttaactgacggctacttgtaactgcatctctgtatatatgtacctgcatatctgcacgttcggacaaagcgtcggtgttcaagaagctatcgagagactgatcgatcgatcgagcagttgagaaacacaagcaatcagtgaacacaagccctcactttcaaagcaagaacacacaagtcaatcgcagacgatgactcacgagagagacggacacggcacacgacgtactccacgtacacgcacagttaagcatgtacagcgaacaagatgtgacacgagcagcgatttgattaactaacctgtaatgaatcgattaattaaccttactaatttgcagatcaattcaaccgtacgtgcacattaccggtcacgattaaaacgggattataataactaactgaattttcttaacgacgttacaaactgatgacaaaaacacaaactatttcgatttcgaaaggaggaatactggatctagtagtagctagaggtttatgtggtttagttacaagcgagcagattaagattgaggcctcatccggctagatggcttcgccgggatgatccgaatcctcctcgccacacggacgaaatccctgacatggatgtattgcaggagaatcagatcagatgaacagcacacagaaatgcgtcaagaataattcagacaaagcacgagatgaacacgaagtgagattaacaagatgagtgtgaagctaattacttccagttgaggtcgccggcgaggaggaggtcgttctcgatgtcctcgtacgcgacgacgtgccctggaacggcattggacaggtcgaggccgccacggtcggcgtcgctgcagctgctcctgccagctgcctcgtcggcggcgccgacgtcgtcgtccgcgtcgacgaacatgcggcggagcgcggcggcgaggctgcggtagccggtgtgcttgctgaggtggacgcggtggcagatggagcggccgtccaggacgacggtgaccggcggcaccacgcccgcggtcacgtcgtcgccctgctgcaccgacagcctcagcatcttcccgcggtgctgcttctgccgcctctcctgctcggacgtcgtcggcgccggtagccgccgcttcgtgtcctgctgctgctgctgctcaccgccggcgccgcttatcatgggacgatggcggccggcgcgattgatcgaagagctcgccggcgcggcgctcgtggcgtgtgggcggcgcggttggttgtgcgtgtgtgtgtgaagagaggcacagacgcacagtgagagggggtgggttaaataggatgaagtggagtgattggagcaccgttctgtggaaggttaattgtgtctttgccgtgtgaagcgtgtgaccgttttgtaggagaagatggagtcatagaggctagagtggagctcactatttgtatgttatccaattgattaaaatttagcttgtataacttagaaaaataaattaaactatggctaactaacgtatacttacattcaaatttattttttcagttgtaacttgtagaagttaaatttgatattagtgatttatcatatattaatctatcttattaaatttttttataattatttagatgacatgtaaataacgaggagatatccctcgaaagttaagtttagaatagttttcgtggagtgtggagctaaggtatggttgcaaattaacgagatcactgtactgcatttaatacaataccagtattcttttcagtttttctttttgtcgtaatgaacttggtttcaattcaaaattatatattgagaattgctagtaattaactagggacgacaataattcatttcaattgaagaaagacagtcatgggtgcgctacagtgctagtacgtgcacggtgtgtgttatatatatatatatatatatatatatatatatatatatatatataacacacacaaacacacaagtaaattgccagcagggacgaccggtgggacgtcgatcgggttgcttgcaagtgagtaaaggggtcgagcagtagtgcagtgccagcaaccaaccaaacccgagacaggaattaaacaaaactagccttcttgccattttctttccccctggggatcgatcgatcgggttagccgcccggggcgtgcgcgcgcgtccgcatgcagcggcgtccggagagaaacgaagaaaaaacgggagtctgctcgtgcaatcccggaggtcgtggtggggggcgcgcgcaccgcacgagaccaccgcggataccgtgtgccgatcgatggaccttcgtatacgtgcgactcgcgcagctggccgctgcaggtcgcgcgggggcttctcgcatgcgcatgcagcatctcgatcggcgccgcccgcgcggcgaccgatctagctagctcgcgtacgtacgtttctccggtctttgcacccgtcgtggtagctggaaaaacgggcggccgcgcggccggggagacgttggattggagctaagctacggagtactatgcgcggttgatttggtgcgagaaacatgtgagttacagttactgctgcctctatcgttgtggttggttgaattgtgctcttaccaggtctgtgttagagcaagttcaatagtatagtcaactactagttccaatttatttatagttaatctaatagctcatttatacaatagttacatactacactattaatatctggtcccacctatcatacacacactgcgctttggagtttgtgctacaactggctacaaatctgtagcccgctgctcttaattacatgaatattgcgtctgtagtaaattaaaggtcataaataatgtccgtgtggattaaattcgtgatcgcgcgcacgtacggtcgtgtgcgtgcagatcgatcgatctgggtgtgatacagtgtacacctacagcgcgtaagttaacgtcctacgtccatggccgtgtggctgccggccggccggccatcgatagcagcatgcatgcacagcacgtcgcaagacaacgtgtgcgcgcgcgctataagctacaggaccacaaggatcgacgaattaatgctagcttcggctgtacggaaccccctgtttcgatcgatctacctagccgcccgcaatggttatatatagattctctagaagatatccatgtcagcatatttttctatttgaaaaagattaaatgaagagaaagagagtaaagctatctactaacttggagatagtctatagagaaaaacgaggcaatagatgagagagctatagatacccatgtagacatactattgaggtggtttactattaatctagtatattgctgagatgtacatgttttatagagagcaccttactttaccattgcgggtgctcttagtgcaatcccaaccctccacctagaatgatatttatggcattaaatacattgtcacgtaggacttttaacttatgtggcactatattaattaagaaagagagtgaagaaaggaagaaactggatctcatgcaagacacagcttcaacacaagaacctatgcactagacactatcaagttttgcattgggagagaataatgtcttcataatagatgaagaataaatatgattggtagagaagagaggtgacgtatttattaatgtcccactttaagaaaccatgggttgtagagtgtagtttctattgtgatgtcttattgacatggcaccatagacactgcttatggacactatgggttgggactgcccttaggccctgtttagtccgccaaaaactttcgcaaaaacatcacatcgaatctttggacatatgtatggagtattaaatatagataaaaagagaaactaattgcacagtttacatgtaaatcgcgagatgaatcttttgagtataattagttcataattagccataagtgttacattaacccacatgtgctaatgacggcttaattaggctcaacagattcgtctcgcggtttccaggcgagttataaaattagtttttttattcgtgtccgaaaacccttccgatattcggtcaaacgtccgatgtgacacccaaatatttttatttcaccaactaaacaggccctcatgccccgtttagatcccaaatttttttcccaaaaacgtcacatcgaatctttggacacatacatggagcattaaatatagataaaaacaaaaactaattacacagtttgtatggaaatcgcaagacgaatcttttgagcctaattagttcatgattagccataagtgctacagtaacccacatgtactaatgacggattatctagactcaaaagatttgtctcgcggttccaggcaaattatgaaattaggttttttattcgtgtccaaaaacctcttccgatatccggtcaaacgtccgatgtgccatctaaaaatttcttttcacgaactaaacaagccttacaacgatgcacatgaacatatatagctagatctatgtgtatactctacgtacgtagtacaattcaattctctgatctatatttattacgacctgtttgtgcatgtatctttgtgctatttgttacgacggcaattgacaggtcatgtatgtgtacgtgcccgcgtgcatctatgaacgatctctctctgctatagctcgtactatatgctctacatagttggcagtttggcaccaaaaactaaacaacgtcgtccgacggtacgtagcacaataaaataacgcacgtaacgcgagtacttgtacgacatatagatgtgtgatgcatggtgtgcatgtccgataacaatgaggactgaacgcatatatatagcttggacatgctctcgatcgatcgtctcgagaaagtgggtacatcccttctttctatataaagttaagactaaaagctcaaacctcatgctttcacgtcatcatcaaattatgaaccgttggatgaatgcaatagatcgtttctcagacgttggatggaatgtagcatagagcccaacccattagtcaccgggtgagtctcttcgcctcctcagtgtcaaatgtagctcacataaacacattggcccatctccacacacatctacatgtatctagcccgtcaatccgtataaaagagctttgtggctgaacgccccttcagttgacatgtgctacctaatttatctataaattttgaatatgactgctaaaaagaatttctccaagaaagctattagtttcttcttgagattgtaccttctatttaacaaattgatgtaaaccaaatcccgtggcaaacgcgcggggcatcctctagtactgtcaagagtttcagagcctcaacatcgatcaataaatggaattgaaagggacaattaaaacaggcaagaaacggaagaatgaattgcatgccttaattttcttgtccatcgcatatgcatggtaatctcatgcatctattgcgactatgcgcaaaaatgtactgcatatgctctttcttttatacaattaaccaacacgaaagtgtccattttacgtacgcagctcggcaggcattgcatacatccgatccaaacgtacatgcactgatgcacgccggccgcatgctttcctaggctgatcgatgtgctctactatgcagcacgcacatggatggtgagctaccaaagctagctaaagttatttctagctctgtccctaagtcaccctgttcccgcactacacatgataccagcagtactcaacactgtttacttgggtcatggttaaaaaaactaatccatgcatcgaaccggtccatgcgcgcattgcgtacgtgcgtgggctagctgttgcagctattgcgctgctggacatttttaggcagcgaattcaagtgctagtactactagaagtacgcgtacactagttacccactatccggcaagtactagcccgatcaaatttaagtcgaacaagacgaatgttctggcctgcatgcagcagtgcagtagtaggcagtagccaactggcaaaatgtgcgtacgctggcttcttcaattcggttcatccgcccgtccgccgcccaatcgccgatgcgtgtacgtgcgacgaggcggacgcgcgcgcgcacgcacgcacgcccgcccgaccggcgccgtcgcgcgtggctgggcgcgcggtgcattgcgtttgcgtcggtgtgtcgcgcgcgtgcatgcggtgctcgggatcggttgcgtcttgcgtggttgcctcgcaatgtcatcgagagcttcgatgcaagcgtggtttcttttctgaattccatgcacgcgatggtcgcactgctgcgcttgttgccacggctgttcgcctcagttgtaaaaagggagaaaaaaagggactatccgaaaaaccactacaagttttttaaggaagaactttcaactctaactacagtataattgtaatataattccactatagctaattataactataatactatctccgttttatattataagactttttacctttgtctacatttatatagatattaatgaatttagatataatatttatgtctagatatattaacatccctgtgaatgtgtgcaatgctagaaagtcttataatatgaaacaaatgaagtataagttatatataagtattaaaataatactacctccgttttttaatagatgatgctgttgactttttctcacatgtttgactattcgtcttattcaaaaattttatgcaaatgtataagatataaatcacacttaaagtactatgagtgataaaagaactcataacaaaataaattataattacgtaaactttttgaataagacgaatggtcaaacatgtgagaaaaagtcaacggcgtcatctattaaaaaatggagggagtatatgtacagtgcggttacactgtagttacaatgtaactacttcctccatttcataatgtaagtctttttagcattatccacattcatatagatgttaatgaatatagacatatattatgtgagcaatgctaaaaagagttttacattatgagtatagtataattatacaactatactatactatagttacttttgaaagtttttttcctaaaaaacttgcgagaaaaaaaagcaaccaggaaaaaaatatgactaaaatttttgtctatatgttattagtgctttaaaagttaaaaggctagaaaataggctacgataaaagaaaaatcctagagcaactaagtttcataattcagttacaggcttacagctttaatctaaaataatgtttcagaattcagttatggctgacaagccaacaagcagatgatatgagcctgcgcattggcaactgcccaggtcggttatttagatctaaggtatcttctgcatttgctagttcaatagatttcccattggcacaggatagcagcacaagtgcacaacacggcaattaagccccaaaaatgacagcaaccaaagcagaacaggagagaacgggccagggccacattaactgaattaattgaatgcaactatgcaaggagactttttacatgggcgacattgcattgcatttccttgtttctgtaatctgtatacattacaaccacccctcctcctagatgcccttcagatcttttgactattgcaacgtgcaataattgctgctgcagatcatggacaaactaaccgacaccacgtgattttcccggccgtgtcaacattctgccagctcctgccagcaggctgagctctgctacggaggagcaactcaccagaattaagattagtaaaggcttcaagggtatttggtacaataattacagtgtccgtggcatcaatcatcgcctgcaaaaaaattgggagtcaacacttaagatcacagcgtatatctgctcatatgccttccagagatcaaccatctaatatagccattggttgatttcaactacatgccaaatgctactactagtactatcaaaccatggcaagaacaatttcttacatatgaccaccacaaaacatgcatggagtaagctgtcaatgtcggagttcttctcttttcatgaaattaatgaagtttgattgtgacattgaaatgaagaaaaagtagtctgtaactctacttactggattgtggatcaacgtgaacgaagaaactggcggcaactattagataacacaagatcagcataagtcctttcaagtagttcgcaacaccatcctgtggaaacatagaaagagcgtgtgatcaactggtgatggttgagatatcagaacctatgccaggtaattcataagagagctatagcagatagtgtgaaaatgaaataacaagaaagcctgatcagcatattactattgaaggtttactgggctaatattacaagcgaggtgggacaagataattaaagccactactgaaggtaaaaagtattacataaagtaggtcagttctagttcctttaaagagtaagcatttgttcattggataatatgaacattacaacactaaccaatagcaaccaccgaccattatgcttgagaaagacttgactgtatacttaataatgttaaaacaatcgtttagtaccgctactccgctagaacatgtttactctggaggggttatatgtgccaaggcatacaaaaacaaacacagcttgacaaactcttcattaagcaggcatcccttatcaaaataattcttaatatttcacacaataacctacctgtagcataaatgccacgactagtactgttatgaagagcgttgctgtttcgaatagttggaaattcaagtccatcttttgccccatcatccaaccaatgacaacacaaaatggaatctgtatatggagaataacatatgtaaaaaataacaaagatgaaaataggatatgataaatgaacaaatgcaagatctggaatgaacacagtattctgtagaacgttcatgccagcatggtatttgatgaacaagtgcggaaatgcatactcagatcatagtgagataacaagtttgaccatgcattaccacaaacattgatatctgcgttgatgacccaattgcaacacccagtgttatgtcctgcagcagagaaacaatcatgtacacagacagttaggagacaacagaagaatcagaaagaaacatcaaaactgagcacatctaaatgcttacaagtttatctttcatggcaaacattattgcactagcatgttcagcagcgtttcccacaataggaagcaaaataacactgataaaagccacgggtaggttcagtgaatcagatgccccctgatagcaaatagcaaagagcaaagcagtgatcaatagtatacccatgcagaggtactcaggtgacctgtaagacaaacaatgtataacatggccagagcagttaaatctgtcctaaaatacagtattagagatgcaatattcatggactttcatcagaaagaggtaaacatctcttatcatatatcaaataatcatttccaaatttaaggtggacattttccctgatatgagtaacccaatataaacaaaatagagttaattgtcaagtttaacaggccaaaaaaaatcatttgtcagttgcacatattaagaacagctactttttttttgtgctgtcattctaaattagaagagaaggaatacctcaatggcattaaccaggtattcagaaagaatagacacccat

SEQ ID NO: 9059 - DNA, 12162 bp, Oryza sativa
aaaatttcgagtcaagattagagtctcgtcacatcgacagtagtggagtgtaggtccaatcgacggagttgtcttagaaaagttatacgtagtacttaacaaatttcttgacatagaaacattgtattttttttttgagaaacattgtatttaacaaattaactttttaaattgaatttgaacctataatattttcatgtacttcctctgtttaacaatgtaagtcattctagcatttcccacatttatattgatgttgtctatctagattcattaacatcaatataaatataagaaatgctagaatgacttgcatttgaaacggagggagtataaacctttgatagaattttttttcaaacgagctggtacttagaaagtctgaagtttcatgaaatatagggcccgttaagtagatcagcaactgcggcatgcagctaggatgcgtgcgtgtggtactgttggttttggctgcggcacagtcgtgaaatcaactgtcgaacaggcccaaagcatgaaaaaattacaagaatataaccttaaaagattacataatcagaaaaagaaaaacaaaacatcaccactatgcacactttactgaggaaggactagcatcgaacctgctgctattaagctttgaccggtcatcgctaaaccaacaataagctttaattgtactctccatccttaaaaaagatataggatgcagcacattctagcacaacaaatctagacatatatacgtacagatttattgcactattttttttttgcggagaacagatttattgcactataatatgtcacaactaggaatagattgattttttaaggaacggatggagtatctccaaagtcgggactccaaacaaccgaggaagatgtttggacgagtatgtcgcgtgagttcgtggcgcacaaattgttcgcggatttgccatttcgctagcaggctgctccactagctggctcgaataaacggagaagcgatacgcgtatatacatacttgtgggcgtaacgtaaccgacggaatccaataatacgcacttagtaagtctaattttgggacagcaacgtggtctacatatttggggcaagcaaaccgccaccttttcttccccagcccttgcccttttcagggtgacgtggcatccttcctctcttcaaccctttcttcacggggccccacgtcgttgcttgtggagctcgtcaacgtatatacgcacgtcccgtgccttgtcgcccatgacttgtcagtccaaaaacgagacagagtcacggttgaaatcttgcttcaactgcactaaatttcgtccaatttggaccaagcaggacacgatctttggctgtgttcagttcatgtgccaaaaattttttaagtatatggacacatattgaagtattaaacatagactaataacaacacaaattacagattctatcttaaactacgagatgaatctattaagcctaattaatccgtcattagtaaatgtttaatatagcatcatattgtcaaatcatggcgtaattaggcttaaaagattcgtctcacgatttacatgcaaactgtgcgatcagttttttttccacatttaatgctctgtgcgtgtgtctaaatatttgatgtgatggaaaagttaaaagttcaaaaaaaaaattttaactctaaacacggcctttgatcaaatcgataaatttttgtacgaggactaatcgtggtaattgattactagtagcagtagactaccgtggcaggtcgaataatggggggtacagttggcgagattatgaaattggataaagccaaatttaaatacgtaaagagatgatgatggggctcaatttgcggtcgagatttacaaatatttaaatccgtcacaatattcacatgcgccgtttgctgtacacatacgactaccactagtaccctttcttccccaaaccccctcccgatttctcgtttttgctctccaatttctcgcgagaagccgaagaggaagagagcgagagagagagagagagagagagagagaggagaggaggagttggttgagatggatctgttggagaagaagaacattaagaaggggggagaagtggaggaggaggtggcgcgcaagggagaggagaggaaggaggaagaggtggtggtggaggagaagagccatcagcagcagcagcagcaaggggaggaggagctcgtcggcctctcgctcgccggcggcaggtagttttccggctccgccttctcctctcgcaagtcgagtcctattcagctttgggttgatcgattgggtcgcgggagagagagtatttggttggttgttcgggaaatgcatctcgcgcgggattctagccgcttttcagttcatagtatcgccccttctccgagaactcgccgccggggagccgcttcctgctgggagccgagcggcgccgcagccgcctccgaagtggtttaccggaggggatggattttctccggtactggactcctggtgtttgaatttttgggtggaaccggagactctttttttggtcgggtgaaattccttggaccgaccaaaaaaatctcgaatccactcggagtttcctccgttccagatggagctcttgcgttgaaaattttcctaaaaatagagtcaaaatgtttcgacttcgagttaagagtccaccctacaccgagttgcaactttcccttttttacgagttggtgtaatcatggaagagcccttagctttgctgcagtggatcaaattggtgggggttcttgcctaggtcatgtgaagattcttctgattagtggtagtctcatgcttctcctcggcctgcaatccaaatcccctttattcctttcccgctctcttgcgcttggcgtcagctgttcttaaccttgaacaaattagggtgtcattctagttgcacgtgttcttatccagatgttgggagtgcggtgaactgctgatattctactaaaccgatatcaattatatggatgttcaatttggttcacgtcactaggtaaatgatttcccaccttagaccaaacttaacggataggaaagaacttttggcaagtggcagatccaggtagtttttttccttccctttttctgtaattggcagttacttgttctccaaatacttggaactgctgtgaaaagtttccaattgagccttggaatcaggagcaatggggaactcttctaagttacttgcatttcttctttaaagactcagaaataataagcaagaaacacacatagatctggtgaaacttgagttagcgtgcagtttttaacacctccatgtaccaaggggattcaatggtaaaggcctcatccccttgtcttatctttacttcaagactaaatctgtagctggggaccaagtaccatagtttcgcaactcttatataatccactaggctgctgtgaaaacaatagatgcagtgtttgttttgaagtaagtaaggtgaaagtaaaaatacctggtaatggctaatatgaatcgtggctattattaaatgtttcagcattttctgaataggtaaaccacatatatgtaactatgtaagatgtttttaaatctagatgttctattgagcctgtaacctggtcttttagactagattatgctgagactttgaagaaaaaaatttcagtacattccgtccatcttggacaacctttggacagattattaactctgaatcagtcccatcatgctgcacatgttggatatttcagagtggaccataaagttgcaggcctagtttgctatttttagattttagatcttgtgagttttaatcttgatcatgctattagactcagaatgtgtgtaccaaaaacattgataatggtatctatcctgacttgggtataacttgtgttactggcagctgtgggagggctatgttggcgtagcgtactgaccaagagataatcctctcatcaagtagaatatagagagtagaataattatttatgaaggagatgggcctttatctggctgcagacaaggtgcatagtaaagctcattaaacctctaaaaaaggctggaaatacggcctacggtgtaattgcacattatacatcagttagctaggttggcctccaattttatatggcactttacccttggatgcccatcttatgtattgccatgtactcatgtatgcaattagtcaagaacggcccacttatgccaatatctgtgtaactatgcaatctgttattaccttcttgcacatttactaatttcgctttgtcataatcaggcccaaagtatttccaatgtcgagccctccacctaatccttcgcaacttacaattttctatggtggatcagtatgtgtttatgactcagtgccgccagagaaggtcatattcaccccacttatcttcgttatatcctccgactaactgttgaaagtttatgctaattcgttatctgcaacattgtcatcaacaggctcaagcaatcatgcttattgccgcagcagctgctgcagcggcgtctgccaccaaaagcaatgctgccattgctgttaagccccctgtgatgcctgcagccaatgctacccaagcagcagtctctcctgtgctcacaagatcgctctcattgcagagcacttctgtagcaactggacaacctcaagttgccgctgaccctagctcaatttgcaagctccaggctggtaagactacaagatctttttgtgaatctaaaatggggctgttttaatccctcgtcatatgatgtactaagtgattgaagatgctacaaatttattctttatttgctgtgcagatctccccattgccaggaggcactcccttcagcgcttcctagagaaacgccgtgacaggttggcatgaatgaatgtagaaatagcattctatatttgtctgatgcatttccttaggtttagtggtccattagaacatgctaaaagaatgtggatagctggaaactgacttgtaggggataaaacatttgctttagcttgacttggatacgaaccaagtatatgtgcaaggactgttttcagtttcattaccatagcccatgttttcatgatacataacaaagtagccagtagttatagaaacacagctttctgcaaatttgagaaatccttagcttcaactgattaagccaaatgaccatgttaagcaggttggtgagcaaagctccatatcccacaaaatcctccgagggcatggaagcatcagggatggaagtaactgctgagggcaaggcccagtaactgtcaacttcgaatggtggaggctgacgtttggagggggaaggaaggaaaggcgtcgcgttcattgtttagatggtgtcgcaccctagaaccttactaataatcgaacctatgcccttattatcgttgtactgttccttatgtgctagtctattctgtcatgaatttgtttactcgaacagcaaactgctatgatagtagtatatcattgtacatcatgcatatcattgcctgacaatgttatcgtgttcgtctagtaatgatatcatccaggttaattgttactagtaaatttcagtttcagcagctatgatagtagtatatcattgtacatcatgcatatcattgcctgacaatgttattgtgttcgtctagtaatgatatcatccaggttaattgttaaggtggtgtttacatccagggacttaactttagtccctgtctttagacactaatttagagttttaaatatagactacttacaaaactaattacataaataaaagctaattcacgagacaaattttttaagcctaattaatctataattagagaatgtttactgtagcatcacataggctaatcatggattaattaggctcattagattcgtctcgcaaattagtccaagattatggatgagttttattaatagtctacgtttaatatttataattaattttcaaacatccgatgtgatagggacttaaaagttttagtcccatctaaacagggcctaatttcagtttcggcactggggttttacagtgccagatgcatgaaagttgaggatggttttcttgtatctggcattccggctgttcctccattttacaaacagcatttgttccagatcttacgaagcttacaattttgcagtgatggattcctatactagcatttttttcgctgcctctgctcgactgccgctccggtaccatgctgacagtgtcaaccggcgaattagcccaacgcggcagtctgaccggccgccggagacgacttgccacctgttgctgccggccgcattgagtattatagtagtactgcacaacataaggtgtgtttagttcacaccaaaattagaaatttggttaaaattggaacgatgtgacgaaaaagttagaaatttatgtgtgtaagaaagttttgatgtagtggaaaagttggaagtttgaaaaaaaagtttggaactaaacacggccatatttcccatatacaaccatgccactgtacatgctgccaaggagtaccgatgttcaatcaaaattcaagacagattcaccaaaccttttattttttccatctagcatctcacatgcttaaccataggccatattgtaccagaaaaggagtgaactacgcccacaacacaggtacatgatcaagaaggagaatgtcacacagttgctgcagattctaaaacacaaaaacggaagggaaacatgaggcttaggtagggagttgcatatagtgattgccacggctactgtcagtttgtcatgcatgagtgctgcgcaagatcccatggatgtaaccaccgaccatgaccaaggagacgagggaaacgacaccagctgggaatatcttcccggacttcttgaagcgagatcccatgaccgacaagagggcagcagatatacctagaatgcaaagcgagacaacatcagggaaagactccatgttgaagtaattccatgccaaggataataaggaccacaaggtccacaacataggtggctcagaaaatgattttgcatacctaaaccaatagatgatgcaaagacaggtctcactgggagttgagtgtggacgaagtacaggaccagggctgatatgcctcctgcggctaaggatttctggcttccactcttcatgtaccccatcgctccaccggctacagaatttggaatcacaatagtcaatttctaacaaaaatgaagctctcttttgatggcaacaaccaatgcttcaatataatctatcctcagatgcaccttgaaggctagaacaggctgtcaggctctgatgtagaacctcacacaggatggtaacaccacacagtcattcactccagtagatcataacgctattattgaaccgatgatgcagctaaaattataacaggactatcatctgctagtttcacagacataatcacaatggagaaaaaataattcaaaattttaggatgatcactcttgtgttaattttcttctttttttttttaggatgttcatttttaggtggttgtttagctgtactccatttcattcttcctaagagaaaatttgtgcacattgtgcttgcctgtaggccaaaatttgtgcacatcctgtgaccagtgatatacagagtgctaatgcaccatttgtgtttgtgtctacaaaaagcacatgctggtagttgtatcatcattgttctgatacaagctggacttgagaaaccaaaactcaaaaagcaggctgctgaatctgaatgttgcataggtgttctggttttctacagttggaaattatcaagtacccagtcaagtccaacaattattgatctcatcaaattagtaataattcgacctgactaataaggatttaattttattcacgagaataacctgacaagtatgtgtgttctaacttattgggaactagttggtgaaccagaagttgaaatgcacacaattaccccaatggctaatcactttgataaagaaatgcagtagctctcattctccaaaatcaaactactcgaatccaaggcgtttgcacactacagtagatcagtaggagtactaaaaatgaactggtcgtggcattactgcatttttacctccgacgagagcggcgtaggcgagggtgatcttctgcgacatggagagcccctgccccatcttctcctcctccccttccccctcctcgtcgcccccaccaccccgcggcttctcgctgtccccgccgccgccgctcccagagccgtcgcctgcgcctccgcctcccgatccgccgagctcgggctccctggccgcgacggcgacgaggaggcgcgcggaggggcggagcgagagggcggccggggcgcgggggcgcagcaggaggagcgagcactgggagatcggggaggatggcggcgcgagggcgagtggcgcgagtggtaaggtcgtcgtcgcgatggccatggatgagctcgagttccaacttcgagtgctcgagatggaggtgatgtgatggggattttttacggggaggttggtggtgtgagactgtgggtgggcccccggttttctttttcttttcttttcttttcttttcttttcttttatttccttttctttcttttctttttctttttggaattcctttttttttccttttctgttgctggatttttgggttgggttgcatctagaaggacgattcgtttcttgtggagcgcgtgggacgcatgactgcatgtgcaccccctgcatcatacgcatgttgcccaataaagaatttcaccacatttctgaattatgattttaaaattaagtttaattttttttccctggttacacggagcacacatacgcacacaccgtcgtacacgtataccagtgaagaatataaaaaccttcaagagtttaggtaaacacgtaccacgcttgcaaacctgcgtactccttccgtttcatattgtaagactttctaacattattcatatttatataaatgttaattaattaaaacacacacacatatatatatatatatatgtctagattcattaacatatatataaatatggacaatgctagaaagtcttataatatgaaacggaggtagtaatatattttgacttacatatttatagaataatttagggaattcttttgatctaacaaactatagagcatcgtgagcacgccttttaagcttctaaacaatacgattgtggtgtaacttgcattatcaatattttttaaacacttttctaaaccaaccttttcaaactttataatactagttgattaattcatttatttgtatcttaaataattaccataagagctatattctaccgtgctactagttgtacagccgcagctgtcagacaaccattgctaccgaacatccctataagctaaggccgtgtttagttcggagtattaaatatagaaaaaaaaataattatatagattatgtgtaaattacgagacaaatcttttaagtctaattgcgccatgatttaataatgtggtgctgcagtaaatatttgctaatgacgaattaattagacttaaaaaatttgtctcgcagtttacatgcagaatatgtaatttgttttattattagactacgtttaatactttaaatatgtgtccgtatattcgatgtgacacgcacaaactttaaatagggcctaagtttcatttacaatactatccccttggaccaaacctttgtaatattcattataacaaacctttggtaatgttcattattggattatgatgcttcacacggctaaacaaaaaagctttcaactttatacatacctagtccaagattgtgactctgaccagtaacaccggcacacttgcaatctttacaaaccggagaaaacgacttgcaatctttacaaaccggagaaaacgaccgtgtttctcacccaacctcaatatcaaaatctctctttttttagtttacttccagtatatacaaaaagcttcaaaatttatagcaacccaaaactgacgaactcgatcgcttcactttccaccaagacttcacctgaccttgccttgccggccagcgtggactcagaaaacagtagccaagtctcggcaaagaggaggaaattgcccaaccaaaacacccacaaagaagaagaggaggagtcgccaagacgtcgtaggcaacacctcccttcccccctacccttgaaccgaggccgagtcgtggtcgccgcgagtggaaggcaacaactctccaaggcaggcacaggcagcagcagcaggaggagaggaggcaggcgcgggcggcgtgagcagcagcggcagcgccgcattacagccttgggagtaggaggaggaggaggcagcggatgatgatccctagggaaggggcggtgccggagcccgcggcggcgtcctgatccccgaccgacgatcgcggctgctgctgttgctattttttcaggttggttttggtgctattcgattcggtttggttattcacgagttcttggatttggggtagtttggatttaggattagtgggtgtagtgcttgctttggttaggtgcggcgtggatctgggaggtcgatttagtatgctctagtttggtatatgtgaattattcagcgcgatttgagaatattgaagctgatttatgaacttgagcatatcatagagaaaggaagggagcgaatttgtggagaaagttgcttctttttcacacttagaatagttttatatacttttaatcaactgattagacttcctgtggtggtggttatagaggatggagaatcctcagattgagatgggggccttcaaggcgaacggtccgcaattgcagaatggtgggctacgttccagcatggttcagtcctggaacctgcagagattcgttgagagcgcgctgcggagcatcaggattgtcatattcacttctaagctcaatctgctcttgccgtttgggcctgcgtcgatcattctacactatactaccagcagacatgtaagtcctgttcacagcaactgaactctattcgaccgcattttgtttatatttatcattgttcgtaggctagaaaccagagtaccctatcgagatgaactaataattgggctcactgctctttagtaacattactagttttgtattttttgttaatgtttcatcaattgaagactatctgatttagtcaataggtttttcttatgatgatctcttattgctactcagtacttgtaactgatttctactttaccaaaattgcagggattggtcttcctattcagcatgctaggaataacacctttagctgagcgcttgggttatgcaactgagtgagttagtgaactctagacctatttttttctgaccttatttcgtttaacctaaactactgttctacaggcagctcgcaatatacactggtccaacaggtatgcatttttatttttatgatttataacctattacaaaatggagaaccagtgaacaataacagacattttcttttaataccgattgcagttggggggcttctaaatgctacgttcggaaatgcaactgaaatgatcatagcaatatatgctttgaaaaatggaatgatccgagtagttcaacaatcattgcttggttccatattatcaaatatgttgttggttatgggctgtgctttctttgctggcggtattgttcatcggaacaaggaccaagtcttcagcaaggtaattttgatgcaacatgttgtgcgtcctttccactcaaaagttcctgatatgaaatcaatttttatttactacaggcaactgcagttgttaactcaggtttactgttgatggctgtcatgggactaatgtttcctgctgtccttcacttcacgcattcagaagtgaggcaaggagcatcagaggtttctctttcaaggttcagcagttgtattatgcttgtggcatatgcaagctatctctatttccaactaagtggacggaataatgcttatagtccaattggcagtgtaagtgtatacctcaatttaattcttcattgatggtgacaaatatgatatgcttgcactttgaattggaacaacaagcaatgaactaatctccttgataacagtcagttacattccctaaaaataaaaatgtaatatccatgttccatcgcc

SEQ ID NO: 9060 - DNA, 31414 bp, Oryza sativa
agatgtaacaattgaatcccgactggcgcaagtattcagttgataacccttacggggaataataaatagtccagtctttgagcatataaaatagacccatgatcatgaattcatgttgcatgtatccggagcaagtccaaattgaagatataatacttgtatttgagctagtaagcccctgagcacgtagtcacaattgttcattgatggtagctgacgcagttggcatagagacaagacaaccaatatagagagaacattgcccaccagaggtggcaaaaatattggtggtagtgaagatagtgataccaatcaaaagtactgaagtcgcatagccatggaggcgaagaaaccagtcggcggcagtcaggtcagccagcaatgaatatgaaggcgctcagcgataaagttgtgtagttgacgacaacaaacgcaaccgacatgatgaagatgacgatgtcggtgatccagccaatagcagtgtagcaaccaatgataatgacaaagacgctcatcagcatttgcatagtaggtcaaccgtgaaggtgaaataataagtcagcgaaaacataatcatccattagcaacagcagagatgtcagggtcgatgaagcagaggtgctggtgatgatgtcagtgacaataatccatcaaattaatgttatagctgttgtagatgcttcacttggaggagagttgatgttgttgcccaactcgtctaaaccgaaatatttgaagttgttgaagtagaatgtctgttccgaagcaaagatgaagataatgactcctggagttgactcattggcttatataaaatttgtcaaattttgagccttatatttgtgtagcccccgactctttggttagttgggaaacaactgaacatagagtcgagaattatagcttcttgtcgtcgagtagtcattgcttgattgaagatatgtgttgaagatgtccaagtagaaatcctgaatattggagagccacttgttgtagtaaaataacacggcatcgcatgccgagatgtcgagattcacaacaacgtcatggttggtgatgtagcaaaacttgtgaagtagcagcaatagagtttgctggttccgaagataataaagatgaagtcgctccaccatgatgacaaagttgtgttgccgtgatgaagtgaaccggtagtgaagacgcagttgtgaagataaaagcaccggtcggcggcggcataacacgagtcggcggcggaagacgatgatgtccatcagtagtggtagctgtataaaccagatgtagaggcgagggcactagtcagcagcagacgagatgaccggcgatgaagatggtaaggccaatcaacactggcagaatcatgcagccatggaagtgaagaaaccagtcggcagccatggcaaacgtaggcagcttgtgttgaagatactgatgcctattagtagtgacagcgatgtagccagccgtgaagaagatagcatcagttggcgttataacaggccagccgtgcaggcggtgacaccagtcagcggcggatgcggcggccggtcggtgaagacgtagacgcccaacaacggcggcataaaggccagccgtgcaggcggaaacaccagtcggcggcggcgaaggcaagccggtcggtgaagacgtagacgcccaacaacggcggcataaaggccagccgtgcaggcgaggacatcggtcggcggcgacaaaggcaagccggtcggtgaagacgtagacgcccaacaacggcggcataaaggccagccgtgcaggcgaggacatcggtcggcggcgacgaaggcaagccggtcggtgaagacgtagacgtccaacaacggcggcataaaggccagccgtgcaggcgaggacatcggtcggcggcgacgaaggcaagccggtcggtgaagacgtaggcgcccaacaacggcggcataataggccagccgtgcaggcggaagcaccagtcggcggcggacgaaggcaagccggtcggtgaagacgtagacgcccaacaacggcggcataataggccagccgtgcaggcggaaacaccagtcagcggcggtcgaggcgagccggtggtgatgttctgactgatccattcctggagcgtaagaggtaagcttaaagccatgaatcccttttatgcatatctggatctggatcctgcagaacaaacatataggatgagtagtatctgatataaatataatactcgagaaaaaatcaagtattttaaaatatttataaatatgtatttctcctcttgtcaattttgatttccccgagcagatgattcattacgtttaaacgctctgtccgactagtcatagcccccaagcaccgggagtcggcctaggcacttcccagacatgcatatgagtgacatgagttcgccattaatggaacaaagtttcacgaatcagaatttactactcgggtacttttgcaattattaagagcagaaaatgaatttatcttatctctatgcttttgatttattccgaataatacttagcaccttgcgttactcggtccatccaacgagcccccgggtgctaggaatcggcccaaaggcagccatccattggcaaaccaaacggaaagcataggaagatagaactccataactcgataggtacttttgtactcagattatgtcgcaagcaatcaagataaatattataaaaaatatgatataacatctgtagcccccgactcactactcaatggaagaccaattggtgtagtgaggcagaggaaaaggaaaaatatcatataaagaataaaataaatgatgacttagctttgtaatattccccttggtgatggcagaagtggccaatgtgggaacaaagttgtccatcaataacaatgaagacaccagtcggcggcgacgaaggcggtcgacggtgaaagcgaagacgcccaacagcggcggcataataggccagccgtgtaggcggaggcaccagtcggcggcgacggaggcaggccggcggtgaagatgacgatgcccatcaacggtggtgtgaccaaccgaccgtataggcggggacaccagtcggcggcgacggaggcaggccggtggtgaagtcgtagacgcccaacagcggcggcataataggccagccgtgtaggcggaggcaccactcggcggcgacggaggcaagccggcggtgaagtcgtagacgcccaacagcggcggcataataggccagccgtgtaggcggaggcaccaatcggcggcaacggaggcaggccggcggtgaagtcgtagacgcccaacagcggcggcataataggccagccgtgtaggcggaggcaccaatcggcggcgacggaggcaggccggcggtgaagtcgttgttgttatcagcaatggcggtggcgaagacaagccggcagagtggactcgcggccgatcgaccggaaagctgagacgcctcgagtccatgaccagcatcaatcgcctcaatagtgccgcgtaattatatgcgaacaacaacaaaaaatagcaagagattaatctgggattaaaaatcagtacgataaataatgataaaaatcagattgagtttccccctgactgatttggatcaagtcagagaagaggagcttgaagaagtggtcgacggaaaggaagtgaaaactcccaaagcgaaaacgaagtcggcgactcatgaaattgattccatcgcgcttgttgataagaaactcgacgcaacccctacctggcgcgccaactgtcgaaacatgatttcggcaataataaaagggggtagcgcacgagaactaaaagtggatggatgcggagacaaaggatttagacaggttcaggccctctcaatgagaggtaataccctactcctgtttggggatttgaatccgccgagtgtgtattgatctgacgatcaggttgtctcatctgccccctagagggcctcctgcccaccttatataggatggggggcaggattacaagatagaaaccttaaccaatacggtatcggtttcctaaatctggactttaggctgttccgtaatatacaaggaaacgtaacacccaagccatgatctgttacatattacatagatataagttatcccctataactagtcggataaccatgccgtgtgggtatggggtacccataatctccacagtggtcatgacgttggcgacttggcgtacagtcaaggacgcgcactacacatgattaagcatttaagctgatataaaactagccgccgtgggaacaattgccttagttaattctacatggacaacgatcgaatcagtcatccttcgattggtttagatatatatgaaaaccgatcgatcaacctatctctaatacacgtaacgcatatattgttgtcgaaaaagaagaagaagaagataacgtagtgtatccattctgaaccataaaaaaactaaatcctaaagataaatctagacacattatctagatacattaatagaatttggttttttatggagagagagagagagcacatagggttggaaattccggaacgaaatttccgcggtcatttcagacccctccgatactatattattttggttgaaatttttatttttttttaattttttccgtgaattttggtgatatttattcaagttcaactaaattttattcaaaattttggaaatttctaaaattttggcattccggtgagtccgatcaaatcggctaaaccgaaaggtttaaccctgcctgcggcgcacctacatgctacaggtgcaacacagcgatttcgtactctctccgtcctaaaatatagatagcaatgtactagatgtgacacatcttagtacaacgaatctggacagggtagaatgtatcacatctagtatatagttgttatattatgtatatagttgttatattttgagacggagggagtagttcgcaccactcgatggaagacatttcaaccggccagttccgctgttccgtgtcagtgaagataagctagtatagccagctagctagctctctccaaccctataattaccacccgaacgatctcgccaacaagcggccggcagctcgatcgatatatcacagccaacaagcggcagctcgatcgatcgatatatcacaatggttaggctcgccgtggacgccggccttggccgaggcttcgccggcggcggcggcggcggctccgtgcccgacatgagcaggagtgttgtcggcattgcgctggtcttcgtggcgaccgtagcgatcgtggcgttcgtcgtgtttaactgcgccgatggcatggatagctccggtggacggaagcggctcaccaatccaggaggcggtactgttggcgttggcgccgtctgtggaggtagtgcttgcggtggccccgcctgtggaggtggtggaggtggcggtggcggtggcggtggttgcggcggcggcggtggaggtggctgttaataaaggaacagagcatatggaggagagagatagcggtgtaggtgatggaatttcatgtcctttgatctacacaccagtttgattttgctttgcagtgtttttcatttacatcagtcgtgaaataacaaaccctttggtaattctgcttatgtatcattatgggcctattcactttgataccactttcaaccttactaaattttggtattgtcaaaattttgtgataattaccaaaatttgacagaaaactaaatgtagatattttttttggtaactttaccaaaatttgataatgttaaaaatgacatcaaagtgaatagacctcctatatatatataaacatcgtcttacgtgtttatatgtattatattaccaacaaacacccataaattcttttgaaacggtggcttccaaagaaggcgtattatttttaggtcagaatgggagtttagtgtaggtccggcctataattattgggccgaaacgggactcctatctacgtggtgctcatacaagttgggccagaatggattcccttccacttgtaggcttgcagcccatctttttgggctgggatggaattccgatcttcgtgcagcctagtagttaggccggcgtgcaggccattcttcttgggccagggcgtaacgaggagaactatcagaaaaggatgggccaggccgaccatctcatccttttcagcccatgttaaaaataatggtacagaacttcgtttcggccttgtttacggagataaatctgctctttcagcctgtaactgatctcagtaaacagtacaagcataactcgtgatgagtactgaatcttttacttcatttaaagtactgaatgcaatactagcttatgaagctggctactacacttaaaaatttctgatagttcctgcattacattacattgtatacttgtggagagcaacttcttgagtaaacaggggccactactaaaagcgatcaggaaggttagtcgtcgttccactatattgactaacttttgtaacacgagatactctgactaccttcatagtcaaataagggtccctttgattcgcaggataggaaaaacgcaggattagaaaaaacacaagatttgaagtggtaggattttgaaatcctcaggaagagaaaacagagaaaaacgtaagaagatccctttgatagaggcatagggaaaacaaaggaatctgcgcctagaagaattccaagaggtctgacctctttttttaagttacctttggaatccactcataggaatgcaatcatatggaatttatacttgcctttcctatgaatcaaagaggcttgaaggaaaaaattctttggaatctcattcctccaaaaatcctttgtcattccttaatactaattgtagttttacattgttaatgtttaacatttggttttcgttttatttgatttttttatgattagtatttttattgttattagatgataaaacatgtacacttttttaaatttttttaaataagacgaacggttaaacgttgaatatgaatatccacggctatatttattttacgacgaatgtaatagattgtgaaaaaatcatagctcctcgaggttgtccggttgagtattacttcttgtctcagtttgaatttatatatgatcagtttaattattggatgcattttgtgctgttaatttaaaaagatatatatatggacaatgtaagaacatgaggtgcaaattatttattgggtaaggccgtgtttaattagttgcaaagtttgaaccaaaaaacgtcacatctaacttttctacacacacaaacttataacttttccgtcacatcattccaatttcaataaaacttccaattttagcgtggaattaaatacaccctaaagatacttcgataggttaaggccttgtttagttcataatttttttttccaaaaacgtcacgtcgaatctttagacacatgcatgtagcattaaatatagataaaataaaaaactaattgcacagcttgcatagaaattgcgagacgaatcttttgagcctaattagtctatgattagccataagtgctacagtaaccgacatgtgctaatgacggattaattaggcttaataaattaatctcgtggtttccatgcgagttatgaaattagttgtcacaccccaatctggcaccgccgtataatggcacctgataggagcatgtcgtaggaaaaacggcgcaaaccgcttcctacgaaaccgcgatcacagtaccagtcccaggacatagcgctggtaccacggtgacaaatatgaatcattgcaatccttaaaataaatagatgacttctttaccttaacttaggttgcagctcagacagcccgagaatgcaaccgacgacacggacgaggagaacaccaacaacagcagcagcagcggaaccaacgaactaacacccaacaccacaggcgacggctgggaaccaggacgaaaccctattcttcacttcacttcatcttctctttaaggcagaggaactatatatatatatatttatatagagcaagggtgagtactttcgtactcagcaagtcacgagaatttaggtgtttaatgcaagcttggaagagaggcaaggttgttttgcaaatcttttatttgaagacattttgaaatcactaagtgatttatttctttctaagtttgggccgaaaagagacttgcgtctcgattcgactttaagagatgtttttcaatagctcatttggtaatgtaccgacctcccgggtcagatcattacttctcggctcccagagccattccacttgattaatcggttcccagagcctttttcattttctcggactcccagagtccagctgcccagtagcacaacaatccgcttccactcgggaagcctaatctatgatgcccatagacatcccgaattacacagattcgtttcttgaccactcaggtcgtccatctgccacataggctgattctggtaacgattcccacaccacaacaacttttcacaaagcataggcaaacaaatctacgctacaggaaacacctcacatccgcccatgaccgcgggcacggctgttcgaacagttagttaacctatgcagagggggtacactttacccacacgacattactaacccggatcacccagcccgtgagatcagccacgtcgggagaccttaaggctttcatgacaaggcatttggaaagccgacacaggttcaccatatgccaacgagaggggtcccagaccaacactagattaggtcccagaccatactgtgccaggaagcccgagggttctccccgacaccaccccgttgaatccacatgtctcttggcatcatggctcccccgattaactaattactcagccaggggcgtcccattgcacccgtgtggtcgcacttgttatatgctcggatgaatttcccacaggaatcggtacttatatgcgaatacgggacagtgccacacaagcacaacccccgcatcgcgagttttcacaatccattttattttccaacacaccgacgccacatgtcgggttttcaaggcttctcaaacccatttcccaagttttcgacaaacaacggtgtatgtgggatatttggtatatgcgctcagagagcacggataccgaggtaccacaaaggtggagcgacaaggaaatcagggtagtacaacctacaggaattagtgcgactactgggtaggtccgtcggtttggcacgcaaaccgaggccaagcaagttaagtgtgtgattctaataatgcaagttgcaaacaaaataataatgattttccaattataggagcaattggtcaaagggtgacttgccttgctcaaggtcttcacgaagcttcacgaatcttcgagaaaactcgcgatcgacgaaaatctggtaaccgtaactatacgcaaacaatcaaaaacctaaacaaaagaccaaaagaaagatcctatttagactaattagtactgccattaaatagatctcaattttatggaaatactggaagttgaacggagtcaatctgagctacggattgagagatatgaattttggaagtttaattggaatttctgggcaaaggaagatatttgtggaaaaggggaaattgatttatgaaatttatagaaataatattctcaagaatattattgaccgtcactgacgtgcgggaccaaggaaatgatttatggaattttgggaataaggaattgatttatgaaaaagggaaaaggatttattaatccctttggataagaaaaggaaggagggatgggatttagacttcctttggcggctcgggtacggcccaaggaataagcgcggcgcggccgagctaatgggccgggcgcgggcgcgaggaagcggcccatggccgggcaaggcgcggcccaagcgggtgggcgcgcggcccaagcgggtgggcgcgcgggaggagagagggggatgggtccgggtggaccggatccatcgtgccgggtcccgggacgggcccacgagtcagcgactcggcgcacgggggaagggttcatgcggcgcggggtgctagggttttgcggtcgcggctcacggcgtggcacgcgggtggaccaagaggtggagggcccatgcgaagcctaagggctctccgtggaccgcgcgcacagaagaaagggcggtgggggcggctgactaggtgcttgacccgatcaagcgggcccggggctgaggttgctgccacgtggtcggccacgcgggcaggggcgaaagggaaggaggaggaggcgcccgggatggacggcggatggcggcggagttcaccggagctcgtcgcgacgattcgagagagagggagtacatctgaacaatgggacggacgagagggagtgagccaccggatcggattcgccggagggaggccggcgacgacgaatcccggcggcgcttgccggcggcggcaaaagagggaaacgatgacgatgcgacgagagctcgattcctagggacttgagcatctacgcgacctcctgagttcatttctagagtcggattgggtggagctataccgaggaaggccggcgacgagcggctactaccgagtttgggcggcgatggcggcgagcctacggcgagcagcggcggcggtcgggacggtgccagcttgctattggaaggctactcgcactactacccagagctaaggagaggagagggagcgaggagggagaacgggagatgcactaccgagccgagacggacgctgtgacgagcggccgacgacgggggagcgagctcttcggcctcgggccggggaaggggaaggagacggcgcctggagtcccgcgtcagcttctcgcgcgcacgccggcttcaccagcacgagcgatggaggagggaggcgaggatggcggtagcaaggtggcaagggcacggtggtggcgagggaatgaacgagaggaagatagggaggctcggtttaatagatggcaatgtcggtttagggaggaagaaccgacattggcggtcaaggagagcgagctggcggtcatcgacgcgtgcagccaaggcggcgacaggtgatgacgccggcggtggtcgaggaaagggaaaaagaagggggaaaaagagaggctcgctccaagccgattcgggaagggagtaggagggagagggagagctcggcctccgggttttggcaggacgcgcgtggagcggctcaggcacgcgcgcggggccgtgcggctgcgtggtgcagcacggcagggcagcggggccgggcggcgcaggcgcggcagggccgacgcggcggcgaccgggcggtcggccatgcgcgagcgcgcgcgcgcggacgcgagggcgcgtccggattcaaacagcgacggcgggaaatcgacgccggggagagggagttcgacgagggagagagagagagaaacagagagaacgagagagagagagagagaaccgagagagaaggagaaacagagggagctcggctcggctcagcacgtgcaacgcacgtgcgaggctgagggaggagaaacggctgagggagggaggtgggctaagggggaatacggcccacaacacccgagggaggtaaaatagacttttgcagagaaaactgattaggagtagattcgaattcaaatttgatattcgaactcgagggtttagggatgtatcaagggaaactcaaggagaagtcatggaaaagattcaaaaggaatacttgggtatttgttcaagggagcatagggtgaggtcaaggaaatgattcggatgaggatcgatcctctcgaaatcgagagaaagatttggcaacgagttcaaggaagggagagattgacttccggaattaggatttggatgagatggaggagtcgccaacgggattcaaaaaaggggatttgaatctaaatttgatacttgtacacaagggttcaaggagacgagtaaggaaacaaagtgggagtttgatactttcgggaatgggaacaattatttggagaggattcaagggaagggattgactttcggaatttgatttcagagactcgaatcggaagaggaattttcgaggtggaggattttgatttcgatgagagggaacaacgggattaaattgagatccttggcacaacttagactcttacacaaagaacgaaaattttcgcaattaggatttttgccgaattagtttttaacgactcacgaaaagcggagcgttacattagttttttcattcgtgttcgaaaccccttccgatatccggtcaagcgtgcgatgtgatatctaaaaattttcttttcgccaagtgataattttcaaaagtgatcgagaccgtcaattgtcaaggtcaaacagcagcgttgtcgatcatgtcttggcgtacaagcaagcggtcagaattaaacggcgatcgagcacttggctggtttagttactaattttttttcctaaaaacatcacatctaatctttaaacacatgcatagagcattaaatatagataaaaataaaaaccacttgtacaatttacatagaaatcgcgagacgaatcttttcagcctaatttgtctataattagccataagtgctacagtaatccacatgtgttaatgatggattaattaggcttaaaagattcgtctcgcggtttacagacgagttataaaaattagtttttcattcgtgtccgaaaacccattctaatatccagtcaaacatttaatgtgacatctaaaaattttcttttcacaaacatttggatgggcctaacgactccgtcaccgtcctggcagtagcctagctcctcggcgaatcattcagcggatgggtgtcagtgcgtttcgccgtaatgatccacgtacgccggcgatgatgagcggttaacactgtggtcaacatgagccaatttctatcgacacaatgtacaattaatatatagtagttaacaaattaagtgcgtataatgttttggatgtagaagtagtttgtcccgatcggccaacgaagccaaatttcagtacatatcgagctaattattagttataaggtcaaacagcaacgtggtcatgacgttggcgacttggcgtacaatcaatgacgtatattgttctctcaaaaaaaaaaaaaggagataagaagataacgtaacgtaccattctgagctagattttttaaggcaatgatcctatatacatcctacaggctacaggtatactcaattagtcaaaaaaaaaaaaactaacctagaaagagatataatattgtacagattcgttgttctaggaggaatcatatatcctcttctaattattttttttgacagagtacaacgcagcaatttcgtagaaatagttcgtgccaccagatgaagatatttcaactggccagttccactgttccgtgtctgtgaaggccgtgtttagttaaaaagttttttttttcaaacttccaatatttctattacattaaaactttcttacacacacaaactttcaactttttcatcacatcgttacaattttaattaaacttttaattttggtgtgatctaaacacacagcctatatagacagctaagctagctagctagctccctccaaccctttaattaccacccgatctcactagcaagcggcagctcgatcgatatatcaccatgggtaggctcgccgtggacgccggccttggccgaggcttcaccgccgccgccggcggctccgtgcccgacgtgagcaggagtgttgtcggcatagcgctggtctttgtggcggccgtagcgatcgtggcgttcgtcgtgtttaactgcgccgatggctccggtggacggaggaggcgcaccggaggtggcggaggcggaggtggcggtggcggtggttgcggcggcggcggcggcggcggaggtggcggtggttgcggcggcggcggcggcagcggaggtggctgttaatgaagggaacagagcatggaggagagatatatagcggtgtaggtatatatatagcgttgtgtggaaacgatttcctatggaattcatgtcctttgatctatcccagtttgacgcatgttgctttgcactgtttttcatttgcatcaatcgtgaaataatgaacgctatggtaattttgcttatgtatcattgtatgtaaacatcttcttacatgtttatgtattatataacaatactttcttatgggtaaaatgtccatcctttactatacatgtgcttatttgaatatatgttatccaattgattaagacaaatattagagagtcccactacctatcgtgtgccacctaacgcgttgcccaaagcacctcgatccgctgacgatcaccgttgtcaccctagtcgctggctcgccgccctctatcgatagcatgaggggagtcgacatggtgcatggccctattcttttccgattaagattcagattttatctcaattttcattagcatattttttaaactactaaacggtatatgttatgtgaaaaattttctatatagaagttgctttaaaatatcaaatatatccatttgtcaagtttataataattaaaacttaattaattatatactaattatagccccatctcattttacgtacgtcaacttaatcttcatattcatccgtttcacatgtgcactgtattcttaggtgagtccgtgagggttgggaactctcacctccgacacgaaaacaacacaatggattagtacgtgattaattaattattagtttaaaaaacttaaaaaggatcaatatgaatttttagcaacttttctatagagttttcgtaaactataccctgtttagcagtttgtaaagtgtgcgcaagggaaataatagagtgaggttggaaacttactgaagaacgcagcccaaggctactacttttaggccagaatggaagtttagtatagtgcgggccataattattgggccgaaacgggactcccatctacgtggggaataagattcccgcccactcgcagcccatctttttttcggctgggatggaattcccatagtagttgggccggcgtgctggccattcttcttgggccaggcagcaacgagaacaatcagaaaaggattgtgggccaggccgaccatctcatcctttcggcccatgttgaaaatgatggtacagaacttcaattcgtccttgtttacggagataaatctgctctattagcctgtaactgatctcagtaaacagtacaagcataactcgtgatgagtactgaatcttttacttcttttgaagtacggaatgcaatatttagcttatgaagctggctactacacttaagaatttctgatagttcctgcattatattacattgtatacttgtggagggggagcaacttcttgagtaaacaggggccactactaaaggcgatctaacaaaagaaaagaagcaaaagctacaaagagacgtccctgcttccattgtacatgagccgccccagccgcgccgctcagctggaagccggcggcgagaaacttgagctccgactcgtatagctccgcggccgtcggcgttggacataggagaggatgaatctggattacgacccttctaggaggatgaatctggagtaagggtagtacatattcatccttctatgagggaacacatctccacataggaggggacacatcttctcttaggttaagtttttttttttggatggagagagtagcttctcgcggcgaatcatcagcagatgggtgtccgtgcgtttcgccgtaatgatccacgtatacggctcgtcgctcgcgattacaggtttattaacactgtgcgtggtcatcgtgagccaatttccatgaacacaatgtataattaatatatagttaacaaattaacactactacacgatagattttcccgtgcggtcgaatcggattttcgcgtacggagcttcggtccgtatggagcaaatcgcctgtgaaaatcgctatttttgcgcgcgggtggctcacccgcacgtgaaaatattcgcgtgcgggtgcttatgtcgcctgcaggcaaaaataaaaaatcgaaaaaaaaacaatattgaaatatacgaaacccttaccctagccgttgccgccgccgccgccctctcgtcgccgtcactgtggccggatccgccgtccgcaccgtcacccgttcccatcgccgttgccagatctgtgcggcggaggtccgccgccgttggatccgcgcagggggtggccgccactgctgtcgcgcgccacctcgtcgtcgccgccgccaccctcccgtcttcgtcatcgttgccgtagccgtggccggatccgccgtcgcccgctcccgtcgctgttgccagatctgtgcgacggaggtccgccgccactggatccgtgcgaggggtggccgccgccgccaccgttgcgcgccacctcatcatcatcgctgctgtctccgtagaggaggaaggccggggagggcggcggccgccagatcggcctggcgcctcctcatcggcccactgcccctgctcgcggtgagagagaaaaagatggggagaggaagggagaaatgagagaaagaggggggatgtgagagagagaagaggagaggatatgttgaaataaggataaggatgaaaattttgaagtgttgggagggaaaaaaattagagagaagggagagtattttcgcgtgcggtccacttaagaggttcgcacgcgaaaatcgatatttccgtacggtcttcttaagtcgactgcccgtgcggttagattaagatgcccacacgggaaaatgcattttctcgtacaggatacaacccggcgccggttcccctattttctcgtgcggttccacatacggattgcatgaaaataaaaggggacggcgtgcagaaaaatttatcatgtagtagtgtaagtgcatctcatgttttggatgtagaagtactttgtccccatcggccaacaaagcctaatttcagtagatatcgagctaattagcaataaggtcaaacagcaacgtggtcgtgacgttgtcgacatgacgtacaatcaaggacgcgcaatacagataattaagcatttaagctgatatgtaaaactagccgccgtgggaacaattgccaattagctaacttctagatggacaacgattgaatcagtcatccttagatatatatgaaaacctcccggtcaatcaagctatatatctgtaatacacgtaacgtatattgttctcgcaaagaaaaaaaggagacaagaaaataacgtaacgtaccattctgagctagatttctcaaggcaatgatcctatatacatcctgcatgcaggttacaggtatactctatttataaaaaaaaaaaaacaatctagaaagaggtgtgatattcttcagattcattatactagaaagagagaatcatgtattctctcctaagttctttttcttttgagatggagtataacgtagcaatttcgtagaaatagttagctcaccactcgatgaagatatttcaacttgacagttccgctgttccgtgtccgtttcacctggagtagtatatatatatagacagctaagctattagctccctccaaccctttaattaccacccgatctcaccaacaagcggggcagctcgatcttgatatatatatatggtcaggctcgccgtggacgcaggcttcgccgccgccggcggctccatgcccgacgtgagcaggagtgttgtcggcatagctctggtcttcgtggcggccgtagcgatcgtggcgttcgtcgtgtttaactgcgccgatggcaagggcagctccggtggacggaagcggcccagctatggaggaggtggcgggtgtggaggcggtggaggtggctgtggcggcggcggcgggtgtggcggcggcggaggtggctgtggcggcggcggaggtggctgttaataaaggaacagagcatggaggagagggcgtgttgtggaaacgatatttcctatggaatttcatgccctctgatctacacaccagtttgattttgctttgcagtgtttttcatttacatcagtcgtggaataagaataataaacacattggtagttttgcttatgtgtcactatatgtaaacatcctcttacatgtttatgtattatattagcaaaaactacctatactttcttatgggtaaaatgtactttattatacatatactactcccttcgtttcggttacaagacgttttgactttggtcaatatcaaattgtttcatgtttgactaaatttatagagaaatataataatatttataatattaaattagtttcatcaaatcaataattaaatatattttacttttttttacaaacttagtcaaatttaagacagtttaactttgaccgaagtcaaaactcattgtaacctgaaacagaggaagtacttatttgaatatatgttatccaattgattaagacaaattctagagtgtcccactacttatcgtgtgccacctcgcgctgcccaaagcacctaggcccggtgacgatcgtcgttgtcaccctagtcaccctacttatcgacagcctgaggggagttgacgtggacacttcgtgcatggcactattccattcttttctgattaagattcaaattttatctcagttttctgattaagatttagattttatcttattttacattagtatattttttaaactattaaactatacgttttgggcggaaacttttcaagttgttttaaaatattaaatatatccatttatcaagtttataataattaaaatttaattaattatatactaatagcgctctctcattttacatacgacaacttaatcttcgtagtcatccgtttcacaagtgcgctcggaaatcttcatattcacatgtgaacacatgtgtacttggaggttgatacggttgcttagaaggctattatctttaggccagaatagaagtttagtgtaggtgcagcccataatagggccgaaacgggactcccatctacgtagatgataagattcccgcccacttgcagcccatctttttttcggctgggatggaattcccatagtagttgggccggcctgcaggccagtagttgggccggcctgaaggccattcttcttgggccagggcgcaacgagaactatcaaaaaaggattgtgggtcaggccgaccatctcatccttttcggcccatgatgaaaatattggtacagaactttgtttcgtccttttttacggagataatgctccatcagcctgtaacagatctcagcaacgtaaacagtactctctccgttttacaatgtaaatcattctaacattttccaaatttatgttgatgttaataaatttagacatatatatctatttagattcattaatattaatataaatataaaaaatgttaatattgtgaaacggagaaagtacaagcataactcgtgatgagtactgattttttttacttcttttaaagtactgaatgaaatatttagggggtgtttgaaaactaggaactaaactttatggaaaatgttacaaaaacttatattgtttagttcctgcagtacatttcattgtatacttgtggagggagagcaacttcttgagtaaacaggggccgctaccaaaggcgatctaacaaaagaaaagaagcaaaagctacaaagagacgtccctgcttccattgtacatgggctaagctatcatggcacttgcagaatcatgtcagtagaaagaaaagctcaaaagaagctgagcggcaaacaaagctcagcgatgacaaaagcacaagaaaacaaagctacaaaagggtaaaagggcagtaaaataaaacaatatgcttgcgctgcatcgttttgttagcagagtcttctcctcctgtctctgacctgtcagtatctctctcctgcatactgcttcctactatgtttgcatcatactttatcatcataccactactactacattacctctcttttcccctgctctttatgtttgttgttgttgttgttgtgtgagaatgaactatgtcagtcttgatcctcatcacctctgatcagggatcaggctcttcatcctttttgcctgcaaagtgccacctccccaaatcattccatcccaaagattggtgtctgaaaggctgcaacatttgggtagtatccaaaggtgcctgctgctgtcatggagctttcatatgacccactgaaagctatgggtgttgcaaacggaatggagccgcagctgttgttggagctttgtgactgatcatcctgttgatcttgctgctgctcctgctgatgctggtgctgatgttgctgctgctgctcatgtaatgagacattggtgtagcaatttgacatggctccattgccattggcatttgcgaaatccaggtttacacctgagctgtagagaccgaagcctagcccctgaaggtttccttgctggtgatgctgcaatgcgaggtatgacaggtaatctgcctgatcatacttcattggaagagctgtgaacgcaagcgtcgacggtggcgcgacgccggtgtggttcgcttcggtggcggcgatggcgtcggcggagctcgacggagcgagctctaggccggccttggtgctccggttgccggccatgctcccgattggaaggttgctactgattatgctctccacgttataccggccgatctcaaagttggtgacagcattcaggccacggaacttgatcgccgcgatgtcataagcttctgcagcttcctcctcagtgcctgaaagaaggaagcaagcaacaatcagctgttgaacaccacacatatgcagaagaacgatgcgttattgtcaattttatttaggtacttgaagtaaaatcaacaccacctgtaaattactaatggctgaatagtaatgtcacatgaaacatatttgaattagctaattgtacttaacaaagtatggcatcatagtgcagtgagccttccagtaagtttatagataaccagcaagttgcaccagtaagactttggaccaagcaacaactgacgaaactgtagcccagtgtggtgatcaagcttagttaaatccaacatagtacaataataatggccggttcagcaaggcagtagtaaattaatcaccaatcacatgctttgtggaaagccgagcgcggtaatagcagtaataatgatattccaaacacgggctgctacatgcagtgaacgaagaaaggcagtagtgttcaggtttgcaaatcaatcagccatagatatatacatgcgtccatggtctaagcatggtgtgtcttcttttttccttgcctgctgcataaagccccaaaaccatcatgcatggcgcgcaaaagatgacaaatttcgaatcaaatgtgggcatgcttacatcttggtcaaagtagatgtttttgacctgcataaaatatgtcgacgaatctagctacaagccctgtgtgtgcaaagcataaattaagatggaacctacgtgcaagggcttaatattgtaatgttgagtgtaagaaaatgactaatgctagctaatgaggggcccaacacgtgcatgcaccctcctacttgcaatttcatctttgataaaagaaagttctaatgacaaagattatgtatagcttagcgtcgagaaaactcttgagcattcttctacatgatgagcacactgacattgcattgtcagtagatccactagtattagaaaacattagtatgaaagtagtattgcctacatgcatgaaagtattgcctacatgcgtgttttctgcaaacatcacccagatataattagtcaaatgttgagaggttttgttgggttattgatatcattttttcttatcaggtcatacatttgttgaagaagagggcaacaaaaaaaggcttaacaaatttctgctaaacaaaaaaaatgaacatggacgacagattcaacatggaaattaatgtacaaacttaattaccgaatgttccgaggtagagatccttgttgccagccactcttccgatccttgcttgccatcgcccatgctggtgatgtctacatggttgcatcacacaaaacatcagttacctgagacttacgtgcaagaggccaaacatggctagctaggctacaagtgaaagattagtacaagaccaatatatatatgaaccttgtaacacccctgtatatagaagcaccacgagagaatccactgctcttcctgcatgcaccagtacaagtttttcatcaagctgacatgaacaaataaattaacaaagctacatacatacatataaaaaaacaggtgatcatgatgaaacatgcatgcatagaatggctttgcatgggagcatatatactttgatgaatggccatgcatggaatatcacaacatataattaaacattgctaaagagtgatcattagcttgtacctcctaagtgaagctacaaactcctggcgtgtcatatgcttcatctcctcaagctccttttcgtactcggcaacctgaaagattataaacagcttgccccataaagatacatcaaccaaaaacacacacacatatacgcatgatgcacatgcttttactacacacttgcatcaatcaggagctatatattttgatcatgcatgcattgtaaatatgtaataaatccatctttatatatatgcatgagagttaattaccggaaagttggttgtggtgctaggaccccagtacttcaacgcggcaagatcatacgccctcgccgctttctcctccttatcatagccacctgtaaaatcatcgaacaaactctctgcatcattcaccttaaaatgttccaaacgatgcaaagttacaatagctgctactactagctagtagctggccaagagactagatgcatgtgtcttttcttacccaagtacactgtagatcgaagacaccagaaacatcagccataaatgagaagaagcattgccaacaagtcgacagaacaaaaaagaaaatcgaagttagctggatgcacttatgagattagatgcaaatagctagcaaaatgcagtagtaaaattattgagtagtgaccttggcgtcccttgcggctctggccctcacgccggcagctgttatcccacagatgcgcctcgtaccttccggtccaccgatgcctatacataaccaaggattttttatgccctaattaaaatctctgaacaaatattggtcatttgattcttctactcccattaacaaaaaaaactactactaaatcctattaatacgatcgatgatgcatgtgaatctatatatgaaggatgcacacgaacacgagatgattagtttgcgtgcaagaaattagacgagctagctaagaatttatttttagattttatggccgacacatgcatagactgatcgatctcagcttagcttagctatagcttaccgtgtgacgccgcggtagatagacgttctctgcccgaacgagtccaccgccttcttctgctccggcggcggcgccaccgcggcctgcggcggcaaggccagctgcttcgtctcgtcggtctgctctagagcagccgccggcaacagcgcgggcaccggcggcgccgccccagccgcgccgctcagctggaagccggcggcgagaaacttgagctccgactcgtacagctcggcggccgtcggcgccgtcgtctggaccggcgggcaagcgccaccgcttgatcccccgttgcagccgccgccgaggaagtcctccagtttcggcggcggagccgccccggctatcgcggccagctcggccgccgcgcccctctcctcctcctccatttcacctgcacaaacacacacacataccaacgcataagcacggcacttactccaaaaaatgaccaagaacacacacacatgtgatcgatgaacagacaacgaagtagaatgagtactaacagtggtgggcgagggagaagttgagccatggatagtggtgcgaggtgtccatgtccatggtaaggtaacaacgagagcttgtcgatcgaggcgagtatttttctgcgagctactagtagcagatagaagaagaagaagcagcagcagcagctaggtgaaggtgaagatgaagagagcaggaatggggcggtggatggtgataaaatagaggaaagagaagacacgacgacgcactgtagtctgtagagagagagagagaggggcgccgcacaggcaacgaggcgcggtatatttatatgagggtttcgaggaggcgccatgtatgtagagagagagagagagatgctttttactagtactactattccatggctttgaaagcttggccgctagtaggagaggagaggagaggagaggtgtggtggcagcggtgaagaggtggcgttttacaggtggagggcagggtgcggtcggcgccggcggtatccttgaccgccttggaagcaaagttgcattgcaggcaggggcaatgctcgcttcaaatctggatggatggataggcttggttctgcatgcccggccgctcatgaagataggtcaccctagaacaatcacgccgagttgatgtttacttggtaagagtacgtacaatagcatactttaaaccagctataaatatatatagagagaagatgaaaaaaagatagagataaacagtaggctacacatttatagctttatttaaggtaagagtatgtacagtagcagactataagccagctataaacatatatcgagaatatgaaagaagagagatgaacaacggtctataaatttatagccagctgcaacacaagttgtgggaccggatattaataggtagtatatatttataggtaactaatatatgaattggctattaaattgattatatatgatttggaggtagtagttggctatactccctccgttaaaaattattagtatttttgaaattcgacacagttttcgagataccattttgactagcaatatctatagaagtaagatgttttaaataaaaaagttatatatattatgatgctactttgacttagcaatatcatttttacatgttttatcatttttatttttttaatagttaaagttaaaaattttgacttggcactattttaaaaatgtttatattttgaaacggagcgagacagggagtacgtaattttctgaccgcacatatctatgttgagattagttgttttagaatagatctcgtcatcctagattataacattttataatgaagatgatataatttctatttgtatagatcgtttagattttcctaatcatttactagcaacatactatgaatctaaaatatgctctttgtcaagatttcttttactatgaaatgttccatataagattttcttggatagagggaagtaccattttcaacctaaattgccagaatatcccatataagtactgacaacccatcaaaataaagaaaataaccataacatttgtgtggtgtagagtgctgatgttataacatcgttataaagtatttaaattagttacttactattttaaatatctacttaaatatcatttaaatttgtaatataaaaaaatatttgcttctcattgttaatgtgatattttccaatgtgttcaattccgataattatgtttccatatttctcaatgtaattttgttgccattgcaatcgtaggaccaacattattttcgtctctgactataccatttcgattttctttccaagaaaaaatatatatttttggaaatggtttgaacatttttcccatgttgaccattttcatcctattatatattaccctccttgttttacatcctaattaatgttattaatcaaggactgatatttctccaatcttagaagtgttttgtactccggaatgcaaaaattaaagactactccgaccctcccccaacttttttttttgctgaattttattttttaactgtatacaaataaatttcttttttttactggcagcaccatatggtagcgcaccgaaaaatttcaacaacgaaccgctgaaattatgttccaaaatcattaacattttgcaccatatgatccgaccgacttacatcgctacaggtgtgtctaatttagatattgtagataattttaaaaacctctaaagagacaagtacatttatgtatttaattatgtatgcgcattgaccctagtatatttgtatcctgtcccctcaagaacagtacgaccacaaaaacatgatgtagtggagcaaactttgtagtcgtgcaaacaaccggtaaatatatgacaaaaatggtgcggagatggagcagaaatgggagggggttttatgcacggcacggaggaagcagccaccgatgacaggaaacgacgtgtacgtgtacaccattgcgtcttttcctcgctcgctatctacctcagctaagagaaagtttagaaagtttaatactattatatctaactaataactcaaaatcatctataatcaatttaatagtcaatacatataatagttacctataaaaaaatactatatggtctcacttgtcatacacattgcatcttagagtcacccatgggcgaagctataacgaaatgaagggggtgtcacttgtttaatttaatttactttatatcgagtttaagttgatacatgtttctaaatttatattgagagggtgcacacatgataaaaataggtaaggtttagttacaaattttttttcaccggctcatgggaagactctaactccgcctctggaatcacctgtcatacacctggtctcttcttttctttttatctcctcgatacatgttcatagttggctattgaacctactctaatcgtgcgacgacaatcgatggagcatggagctgacggagtaggccagtaccttggccgccgccaccgccgccgtgtagggtgtcgccacgtttcgccgccgcccgccacgcctgcactgcatgcactagctgctgctggttggcttcacacggcggcgacgaccgttcgccgtatcatcttactccaaggcttcaaagggtacggagaggctggtcgatcgatcggcaccctccgatcgttgcacggatcgatcggacgttcaggattcctcgagcagggctggatgacgtgtactgtagtgatgccatggacacgccggatcgatcccttcacgtcggcagggaggcagcacgtgagagaggcgtgcaaccgtaccggcgggtcgaccggccggagctagcggctctgcgacgcgtgcaccccggcgcacgtgcgccgtccgtgccggtcgtcgttgggggagaaggggaatctggtcaaaatatccatacatcgcacgagtagtaggactactcatcaccgggcaggtcgggggaagaagaagatggtgggcatcacgtggacatgcccatttttactggtttttcaattcagaatggcatgcaattcgctatggccccacggttgcgttacgtttcacattcgtgttcggttcaacggcgctgtcgatcgatcgatcggcgaaaaactgcgctgtgagtgccacgctgaaagtctgaactctgaactgaagagcggcttcattctgagttacaggtaaaagaattgctgggacgacaaaagtactcagtcagatgcggttggtagggaagtaagtacagtcaaattaatctacacacttgtttataacgatttgatttgatgagaagcgaggcacttcgccgaatagttttttgtctctgaacctccaacgctatgtcactctgaagaacagatctaaattcagttgtggcaatgaatcagacgattgcctaagaagttgacatatctaaccttagccatggtaaattgaagataacaaccaaacagtccttcggtccctgtgtcttattcaggaaagaattgtttttcatacatatgcaatacaactggagagatcgcagccagtaaccatagcgatgctactccatattgtctacaacccaacaacctaaacaatgtgtcctacggataaccacggatcctcttacccattgggacacgcagcacgtcatcaaagtgaaccaaacaggatagggacgacgacgaagaagaactaaagctaaggttagtacttaacacacatgctgccctacggccatctcattgcggtcgataatgaggttgttgatgatcgaattggttaattaagcagtacgcgagtgattctaaaggaaacacaccagacacctatagctcagctcagctcagcttgaattgatattagcttagctacctttctttgcttccggtgctaaccaagaggcttaaactaagcctgatttgccagaaagttcaacgtctgcacgtgcctggcacaactttttttctctccttggtgttctaggtgcaaaggctaagcttggttcgtaactccttacgtcgtctcaatcccctccagaaaagatgagacattttgtatacatctgctaggcaaattataatctatctgatgtatgttctgacgtgttcaatggtagtatatctgttcagatatggtccatatggacgtgtagatctgtcagtggaagcactgcactatttgtatatgtctacgtagaatatgccgtatctagtacagctgctgctgctgctactactactaccctttgcaaagttgggatcgtctgctagctctgacgaaacctgcagcgggaagagcaggttgtaatgcaagctgcttgcagctgatttccaagtttgcaactgctaaaacatgcagcatgttagcaagtaggaaggtgccatattttgcatgattagttggttggtcttcggcagaatcttgattaatactctaattgccactagcatgaagctgggagccaaatgaacatgaagtggccgttgtatctgaagacgtaagtacgtaggccgaccggccgagattgacagtcaaagatggtacagtgattttgttataaactgattgccgttgaccatataataatatgtgtgtgtgtgtgtgtgcgcatatcgtgcatgcccggcgattagtgtgcagcacgttaatttcctgcagctcggtgctaagcttcacatgtctgaagaaaagaaagacagaaagaagtgtgatgagaaggtggcacatgcagaggcgacgtggctgcttcttgtcacactcgccggccaaccggcgacagcatcgtcacctccatattgcagctaacttctcggagtgtcaccatgcatagtcagcaaatgctacattttcctatgcactaccaagtcactagccatagcaatgcatatttgttattatcaagagaaaaaaacgatgcattttgttttgatattgaagtgattgagacaaaggtgtccctatcaaatcgagactgactgtactatcctatctcaggacttgagttaggtcgtgtttggatccagggatttaactttagtctctatatttagacactaatttaaagtattaaatatagactacttacaaaactaattacataaatgaaaactaatttgcgagacaaattttttaagcctaattaatttataattagagaatgtttactgtagcatcacataggctaatcatggattaattaggctcaatagattcgtctcgcgaattagtctaagattatggatgagctttattaatagtctacgtttaatatttttacttagtatccaaacattcgatgtgatagggaattaaaagtttagtcccatctaaacagggtcttagttttgtggatttgtggagcagtagatccgatgcctcaccatcagagcatcatgactgtgttgtcggttgcagttattctgttcaattttctcagcattttgcagtgattttttcaaccaaatggacaagatctcagtgacggtgcgtgtgggtgacactgatcaagttggtggttttcgcgaaatctgatcggcgaaaacgaccaagctgctatgctatctctgacgaaaaatcacggagacaagtgggcatgtatgttttggccgtgctgacgtagacaagcacaaaggaaagaggcacaaattattgcgactaattatctacttgcttatagaaaataaatatttaaacaaataagctaaacaaagtggatcttagcaatatggtaggagaaagcttttaagaaaatataatttttgaagagtagagcaaataatccattccaataattcaggatggcaaaacaacagtggtagctacttaaagcatatgttttaattcataaaccagatgcaaaattggcttggtgttctttcaatgtatacacgatataatctgattgtctcatactgtatgatgtatccctcttactacaaactgaagggacagggccaactttcaggttctacaaatctacaacaggtacttattctttcaatcatccatataataataataaatatcggaaccatgttagatgtcaaagaattacaccgacttttaactccaattttctaagcaacggcacgcttcgttctgaaaaactcacgattggattggcatgcaccatggccttacaggcaaatccgactcttgacaccttcacttctacaaagctagagcgagctatttctgataattctgatggtgtcaccatacgtcacggaggtacctgccgtccatctgtaggctctttacatagctctcggttttggagctatccaaagatccctgaaacaaggtgcaaaatgtaagtgttaggagcaggaaaatacatgactaattcgacatctctcaatcgataaataataaagatattgatgagacaaagtgtctctctgtctacctgctcttgaacaattgtatgaagagctctgtgtacgtctcttgccatacccttggcatcaccgcacacatatatgtaaccaccttgtgagacgatgttccaaatttctgtggcctgatatcagcagaaaacctcattgagtatagccatgtgtggggaaattctgtatagaagttcaagaaaagcagcatagtgcggtagaaatgtggagcgtgtatcgaactaaccttctctgtcatcttatgctgcacgtattctttggctggtccttcacgagagaaggcaacaatcagctcagaaagtgcaccctcctgaatgaagttttgcaactcgtcttcatatatgtagtcctgcaggttggtcattcagatgaggtccagtaagagcaacatgatcataatatgtatctcatgaactatcttttgatgcataccatattacggttcctgcatccaaagaagagaactgaattgcccagttcaactccagattgttttagagctaatctttcctgagcaagcataaataacagataaagttactagggccatctcaaatccaaagtaaacagaaatgaagatttgggaaaacaaacctgca

SEQ ID NO: 9061 - DNA, 74838 bp, Oryza sativa
agcgtagctcggtgggtttttgtcgcgcgctggcctgaaccgcgggcgcatccgtgcgcggatataacacgaccgaccggcgggggagcagtagcgtgcgtgttttgcagcgagattttgcgttgggggtagctttgtcctggcatgcatgaaagcaaccactcgggtcgacgagacttgctactgttgggaggcttgcattgcatgcatgtgcgatgggacgcggcttttgtgtgtctctctgcgtgggctccatcgtcaccgcccccggccccagcagtggcagagaagggcgtacgtacgctgctgctgggtctgggtgtgtgtgcagggatggtttgccacgatcgtgcaaccccgcagccagcccagcgcagctacgtgcatgcatgcgtcgttgcatctcatgcgtcgtcgtctgcttcttccttggttcgatcgatagctccgatcctataattaattgcagcattttaattttgatgtatatatcagcgtccaatctacatatgtatggattgttaatttcctgtctacaacttaacgactagcaactatatatatatatatatatatatatatatatatatatatataacaaattgagacagtctcagcatgtgtgtacgtccacgtacatgcatttgattaagacgtcgacctcacataaaagtccatctcacagatatatatatgccgaggatctagctagttagtaactacgagcactacattattcatgatatttaagagccaatggcatgtcatatgtgtgtgtagctactatcttggtacacgacagctaaagatcttgacatttggtagctaaggtggtactacgcattcatgtccaattgtaagctgattcactcatcatctttgatccggcccatggatcccaatcaccaacgttttataacacttttttaagtactagaaaccgagaattatcaagaaaaaaaaacccctactggcctactccgcatatctaagatcatttgggagtcgactatttatgtttagtacattttgagttaattaattaagctcgttgaattgactcgactaaactttctattaattgtttatgcctgtatcccaaataaaagaagacaatctctatatgtttcatattatttatcatcctagcatttattttttttaatcaaaatatttttcattcttgcattccaagtttccaacataattttagaggtgaacttcccctctctacccttcacgaatgcagtcacaactcttattagcttatttgctttggaaaaactaatgggatgtacttataatgagagtaacaatgtaaactaccatatatcaattggtttgtgtgaggtttgctagaatgataagtactccgtccgtcactaaaagagcgtagttttagcgagtccactactgaaaaactgatctctgctcagtcgccctaaaaccacaatagtcccggttataaaaagaaccgggactaaagatgatttttagtcccagtttaaaaccccatagccattctacgatctttagttccgattggtaataccaaccggaactaaagatcatcccatgtcagtcccttattagaggggcagggatctttagttccggttggtgtcacaaaccgggactaaagatcaccactttagtcccggttggtattattaaccgggactaaagatctcctatatctcacgcgtagtatataatccctattccctattctctcccccacaaccggcctcaatctcctcaacaaccgacctctcctctcctcagatccatcgccctctcctcctcccctcctccccttcctcctcccatcccgaccctctcctccccctcctcccttcccatccgatctcctcctccccttgctcctcccatcccggccctctcctccccctcctcccttcccgcacgtgtcaggcggggccctgcccggcggggccgcacgcaggccgcgcacgggccgagtagcgagcggcagcaggcggcgctaccggcatccattctttttttctttttttataatttgtgattcactgagatgtataattttgtgatttgttgtatggatctgatatgtataatatgtgatgtatttggtttgtgtgtaatctttttaagatttgtgatgtatttgatttgtgtgtacaagtaacttaagatttgtgatgtgaatgttttgggatgttactttgatttggggtttgatttgggaatatgcatcccactcgatttgggagaaaatacagggattaactctggctaaaaaataacgaaaaaaaagaaagaaaaggagacctaatgggactgccgctacccgctctttagtccctgttggtaacaccaaccgggaataaagataggtatctttagtcccggttatttcacccgggactaaagatagcgatctttagtcccggattcgtagtcccggttggataaccgggactaaaggggggttacgaaccgggagtacaaagggtttctccactagtggtcaaaaaaagattaagcaagagatataaaagactactatgtcgtttattaatgctgagagaaaggccctgtttagatttcaacttttttctttaaacttctaatttttccgtcacatcgaacttttctacacaaacaaacttttaactttttcgtcatattgtttcaatttcttcaaactactaattttgatgtggaattaaacacagccaaagtaagaagggaaaaaacaaagaggaggagggagtaacgacaagaaaaaaaaataaagtactgaagtattaagaggtttactggacccactttaaagatatggacagagagtaaatgagtaggagtataattcagtagttttcatatatgggattatgggttgcctccaagtcgaacccaaataagatggactaattggataattacccatctgtagtaggaggctggtgattaattcacaacttatgtcttgttgacttgtggatcctccagctctagattgaagcttattgccatggcgcaatgaatgaaagggggtttgagcaccgagcccccagtaggtccggcactgttgttcatttctgatgaacatatgaatggattaattatgcgtacgctttctaaacttttgaacatatgatttttaagaaaattatatatatatatatatatatatttaaattcatttttttaattttataatagataattcattcattgttcatttaaataattatcacacattattcaccagccattcaacataaaagaacagggaagaagaagcaactatatggattgtgtccccctgatgataatagatactatgtactctctagcccgatatttaattataaagggggtgatctataggtgcaaatgaagatggtgacctggtatgatcaatgtggacaagtgggacataatcataaaaaggagtccagatactgaccaatgcaaatgctgcgtcagagattgtgatagatggagggccagatcgagtcatgaccgggctgtgcatgctactagctattactcaaggagtactgatccagtagtactacatgggaaggaattaggaataacaggcagcataaggcctcaatgacatgaaaatcttgtatgatgtattaatttgggtgtaagatcactgatcacaatgacctgttaaagttaaacacctatttctctgaaagtttctcgaaaacgtgtggggttgctgcatataaatccaccactgtctcgtcctgctctgctcactttcaggacgtgtccttggtgatcaaaatttcaacaatatatctacatattgcccatatcaccatctgcatgattgaaaccttggtaaattttaattttacttgtgttcagttgatcagttcacatgtgtctgtaccagtgaaatggagtaaaagagtgacagtacccggccgatcgatatgatatgatcgagccgctcgcggtcccctacatatcgatctatctatctatctatcgcacaaaagctgccgaaaattgaaacaattattgggatgataggaccagcaatgtaagctgcatcagaggcgagattgatcggttgatcagagggcgatatgtttgcgccgattgattcgagattttgtggacttcaagggggttttcctgtgctgtgctgccttttcgctcattcgaatcagagcagctgcaacgcatgcatgcgcttctgaaacctgcaaacgcctgaccctcaatgctcaatgcaactttgagtatattatcgtgcacgtggacggcacagcgatcccaatcaggttttggtggatagagtttgtctcattcgatccaatttatggctctgtaaatgctgtttttgcagagaaaaattcagttcattgttttccctgaatcacttaattaattaatctcgtagaggtatattggaaaaaaaacaaagaaaaaaaaggtaggagatcgatcaagaaggatgggcggcgaaaggtcagatttattcggatttaattcgttttgaaaattgtgcaagaccggcttgaaaaacaactctcagctacaaggaaaatcttcacgtcctttaacacttattgaaatcaatatgttttgacaagttatgtaagtgagaaatcgattaatcaatgcgatgttgtacatcatgtggaagaaattgccctttgttttcttgtttaattggtgcactacattactactggtaatgaattcttggctctctagttcattaattataggaaattactacattgtcgtggcaggctaaggattgttctttaacctttttaccgtggacgaaaagaaacacagagaattgaaggaaaggaaaaaaaaaaaggaggcaacaacgccacaagcaggaagatcgaatgtacagcaggctaccaaatagttgattaagaaaaggcactatttaatgtgactattcccctatttgccttggtactcatgccaaaaatagaagaattaacaagtgatggttatttaactgaccggtgggcccggcgctcttgtctgccctggtcagttactattaccagctgctttttaccctgagcaactctgttcaccccaaagtattgcatccgagcccaagccatggacaagcacacgtggtctttcatgccactgccactttgtacggcagtttgcggctacatcggatcgtctgcgtcgcctatgttatgctgccatattcatagtaagagtagtactagtgcggaattcgaattagaccgcgcatggagaaaagatccaaagcgtctgtttgggggagcttctagttgctgtagctactcctaaaatcagaagctccccaaaacagtctagcttttggtccagatttgagaagctgtaattgtagaatctagaaaatgaactagcagccagaagctgggaaacccagcttttccagattctcagaagctggctaccaatcaactgcttcttcgaattttaagctccctcaaacaggcccaaagtcttgtacatagacaaggaatatgaaatcttttgtttgaaaacttaagttaggtattagcacgtgacatgagcctacacgtctatatcagtttagcaaagcgtatagtgttaagattaattcaaaatgacaacgactcgtaaggttgagaatgggttctgacaatggtcggctatgtacctacaaaagatcacaaaacatatctcgatcaattcattgtgatatttaatgcccccaaagcatatatataagttttcacatttccgccgaattcatccagaaacacataatcgtggaaaaactaagcctattgggtaccgccgccaacgcgccggccacgcgagaccggaagcgcagaagatcctggctatccatggaccacacaaggcaggggcaggctcttccacaatcccgggtctggtgacatgagccacagttgtggcccgaacaaagtgacgtgtgtcgagtcgaacgccaggcctcgcgcacacatgcattgcactggcacccgctgcgcctgcgctgcatgcactgctgcgtcccagcattttctcccccttcttttgtaccggcctcccacacgcaccgcgcgtcctcctgctggccaaaaagccaaatgttgtgctccaaacggccggcggttccggcggctcgacctcgacgcgacgttgctttgcttcgtgctcgtgcatatacgggtcgttctttgcttttgcatatttatattgcaaacggtgcgtgtgtgatgtgtcgatcgaatcctggtcaaatatggcgtactttattctcgcagtttgagatcgatatgctattgcaccgaacgctgctcagagagggggctttctgaccagctggtaggcaggggtgcaaaaaaccagagtctaattttatatgtactctaatctaaattcattagcctgatgatagtatccagtagccacatagccaacaattagacaattttcttttttaatgaaaaatcaggttattttggaaaaatattaaaacctagataaatagacgtgtccagttaaaaatatcactgcacactgtgatataggaagtaacaacagcagcctatcgatgaattgaaccgatgacctaaggttgccgggtttttgggtgcacccatgctttggtactagatattgcaacaaaagagcttcacaaagtgttttcttttagttgtatgtgttgtaaaattgctctattgtagaaagagcgacactgcaataaaagaacttatcgaagtgtattatgtgaaattactctattgcagaaagaacgatcaacgtaacggtctacatatgtgtttgtacgagatttaacgacaacagtcaaagcacaatttttttttaaaaaaagaatttagtcaaatcctatctctctctctctctggaacgttgggtataggcgtgcataaaactgacaatttgatcacttatttctcttaaatggtatgactaaatgttgaaaaaaacctcatcagcgttttatatagttttctgtaaacttcttattaagaaactactatatgtcaaagttagtaatttagaaatttagaaaaaggagggactaatttctttccttgcaggaattaaactagctagctaccggaattcctacgaaaccgtggacttattatctactctccgtcaaaaaatacttatattttgggacggagcagtatcgatcttaaattaaggcctcgatcgagagtaagggacggtaataatcccttccggtacgaaaaacggagcagaccattagtacgtgattaattaagtattagctatttttatttcaaaaatagatcaatatgattttttaagtaacttttatatataaacttttttaaaaaacacaccgtttaatagtttgggaagcgtgcgagcgaaaaacgatctagtagcgggggcggttgcccgcgggaacgagcgcaccctaaatctgtcaaactgtcaaagcggcgtacacgtaccgtgcgtgctgctggtcctcctgggcctggccggcgcgcggctatgtgcacgatcacatcgacgacaaccacgacaacggccgtgcgcgtgtcctggcacacacacatactacaagatcagatataaaaataataataaccatttatctcctcacttaacttctagccatagaatcatgtcgttcgtcgcggccatgcagtgcgcgcggtacgtgcacgaacacacacacacacacacacactcgtactcgcatcgtcgtaacgtactacgctggctggcctggcatattatgcatggtacggcgcgcgatggcgtacgacgacgcacgggggcgggcgatcgaacggtcgcgcgtgcatgaatgcgtgcggatccaatgcgatgctactccagccggcgacgacgacgacgacgtacgacacgaggcctgatctctctctctctctctctctctctctctctctctctctctctgctagtgcttgtcgtggtctcgtgatgtctccagttaatcgcgactgtttcgacgacccccacacgcacgcacgcacacacgcgcatacacacgcacgggcgctggcctctgaccgtgcacgcagacgtcgtcgcagaggaggaggccccctgccctgcagctgcgagagtacgtggccgtgccggctgcctgctgcctgcccggctgcacgcagcaggaatgcatggcgcgcgcgcgcgctgcatcaaaaaaatccaccgatcgaaacaacaacggtctcaggttggtaggcaggatcgcagggttttgctttgctctcctaagctacagcgatccgcctgctcacccactgttgcgtacgtctaaatccctcatccatcagttttttcatcaggccgtacgtcgtcgtttcctcatcgatcgatcgatcgatcatctctcttcacccaacaatatatgcagcaaattaattaaagcgacgacgttacgttcagcaccctgcgctagctttccctgatgaattctgaatctctgatgatatcatacacaccgagatatggttaattatacatactggtatgtgttgtatacatggacacatatatgcatcactgtacctaaagctgatggagtctgagatgagatgactgccgagatacatacatgcattgcatgcatatgcatatgcatatgaatgctagctaccacagcagcatatactgcatatatgcacgcacgcatgcaatctagcgaagcaggattgttcaaatgtggagcgcagaagacatggatagcgacctgacagagccgatatgtatgcatgcagacaagctgattttggcctgtctttttaatgtgcactgctatgtgtgagatccttgcactgtgcatgagtcaatgcgagtgatgtcgccacagtgaagttggataggtggccggctgagatcagctgtgcatgcactgaaaaaaaaaacatatgcatgctagctgctgctagctagctttgcattggccttgccttgccttgccagccacactctctgttcgttcgagagccaggacgacagcttgagccatgaatatttttgtacgtgtatatactagcttgcttccttgacgtacacatacataaattacatgtacgtacaatatatacatggatgtgatacatgcatgcatgcatgctgccatgatagctggtatacatctagctagtcgtacgtacgtatagtagctagaaatctttatcacgacggtacgtttagtggggaatggatatttgtcttattgtcaaaagatatacagtagtagtatctgctaatttctataagaatcttaatttgatcaagtgatgagatcaataatccaatgtagtgtggggacagattcttacctagctagtggatgggatagctacgtaatgtgtataaatgttcggtggttcgatgactaaatctttaatctcatttgggacctttcgatccccttaattagggttcctagctatatatttgttcagttcattaactagctgaagagaattcctagtattgacatagggtcaaggcaatatatgccaatgctctgctgagagctacgcatgcaacatttcttacgatctctgcttttctgtgtacttgtagttgcctttcagaaagtaaaatctttcactgatcctgcaggtaggggcctcactctgtcatttgcatgccaaaagaaacaccctgctcaaactcaccgtgtagccggtcggccccaatgcaagggcaagctccgtgtagatcacttgaattttgtgagtttcagagtgtactcagctagttagttttttttataacttgtccacccaatttcaaatcgggtgcttaaatttttagctcttttttttttgcagttgtaggtaacgtatcacttaacatcaagacgacgagacgtctgcactgactttgtcaatctcaaaatatccctctaaactatcagaagtgctcatgaaaaatgaggtgtgtgtatatgagggggcctccatttttactatgtttcgcaacaaaaaattacatgggacatgttaccatgttattaccaatcaaatgtttttctttcaaatagtaataacgtttttgattgattaggatctattcaagattcgtacaacactttatatatctaaccactccctcttattgacccggccagtattgccgccactccctcaaaccagtgtgccattgccctccacctcaatggtgctgcaccgaccctagaaaggcccatgggccactcccagtctctccaccattgtccccttcctgaagtcctacatcaatttcctcgcctcgcctcgcctctcctccacaatctcaagcagtgtgaggcggtagatccgccgcctcctaaccactctgatagagtccccctatcgccgacatcggtgcactatcctcctctcaaaacattgaggcgacgcgcactacagtcccaactgcaactaccatctcgtgcgaaccgctgtcatccgaccatccctttatgaccggaaaaccctctcttccccctgtctcaaccacttttccatctcgaaccctaatatggcacaccgtcaccgtcatcagagaaggcctcactgctaaggacgatgggatcatgtgggaaactgttttaaacactcgggtggacgtccacccgtttcttgtatgtcatctaaatggttatgaaaaattttcgacatgataggttaatatgtaatatatcatctcacaaacatgctagttcaaattcgacttctacaaattgtaaaaaaaataacaaatttgaatgtgaatatatgtatactagttagagtttaatttgttatttttgttacaacttgtaaaagtcgaatttgaacttgcatgtttgtgagatgatatattatatattaacctatcttataaatatttttaaaattttttcataattatttaggcggcatgcaagaaacgggtggacgtccacccgagagattagaatccatctccgggatcatgtctcttttggaaagatagatggtgagcagattcgactgaaattgttatggatttttcaatagtttgacgaatagcaagggatgtaatacaacgtacaatttactatacgtggggggaaccggggcccgtttcttgcatgcaaaagctagggaccgccccctgatgatcaacaaatttctgttgtgatataacccggcctccaataatttccagtgaaaattattctttctcttgcattaattgtgtagcttgtttttccttctgccactagccaaacttcctgttgctataaatgagcgtatattaggtcacgcaggaccaccgttacttatagctaagccagagatcgtatatctcattatactgtaccactataccatatgcatgcttgcctgtttgtccatatggggtatatatcaggtagatctccatgactgcgaaacacgaatatatcgatttccatgactgcgaaattaacaattggaaaatatatatatacatgtgtgtgtgactgattaattcagccatgcatgtatagtgatacagatacagggtctcatcgtttaccctatggcttataagccaaaaccaaaaattaaattttaatacttgattttaaatttgattttgattccttttcaatatagtttttttttcaactttagcttttcaatcactaaaaacatatatacaaaagttttacttacatattattttttaatcgctactccctccgtcccaaaatgtagctatttctagcatagtgtcttgtcccaaaatgaagctatttcttcacctacctcctctcaaccaatcacaaccatttttcttcacctactttttcttttcaaccaatcacacacttcctccaatcattctcacttactttcttaatacccgtgccaacctcaaaaatggtttcattttgggacggaggaagtatgtattaagctgttatggtttataataaaactagaccagccgatgaggaccacagccaattaataaccgtttcgttgcttgctgatcatgtccgtgcacgcgagacgacgacggcggccggccgggcattccaccggccggccggcgcgtacgtacgtctcgagccgacgagaggcgacgaccgatcgatcgggcgcgcgactgcgcgtacacatgcctgcgcgcgcgcgtgcgtgtcgtctcccgtctccccaaccggccggcgtgtcgcgtcgcgcgcgcgcggcgacccgtccgggcgccggccggcgccgtgcagcgagtgagcaaacctcgccgccgagatcacgcgcgcgcgccgtgtcctcgccgccgcgcccgtacgcgttcgcgcacgccccgatcgaacgggaagcaaaaaataatataataatactgtaatacttggtcttttctcctcgtcgattttaatcggtcgtaagttaattgggtacgtacgatcttaagaattaattgcgacacgcatacatgtagttgacgggttagaatttaaggatgcggtacatatatatatgtgctgtacagggcagtgaggtaaaaagggagcagtacgtggtaattaaccaacttggccggaaaaattacttcgtgatgagggcctaattagagtaagtttgatagtatagcccactactagctccaatttatctatagccaatctaatagccaattcatatatacaataattgcttactgtactattagtatatggtctcacctgtcatacacatattatgtcttagagtccatactgtagctagctacagatctatagtccgctgctcttctctcttatcttttatctcattaaaatgtgtttgtagctagctaatagtctgctattgtatatgagtaggggcatggaatatgtgagccagcgagagtagccggtcgggaccagcaatgattccgtcgatcgagattgtaactgtttccaactcggcaagaaataatacggcacttatgaacaattcggtttttaaactccggtcaaaaagatgtaataaaaagaataaaaaacaaacgcccatgcatgggtacgccggaattcacttgactggatataatctatttttttctctttgtagaagttatatgttgagctgtaaatttgtagagccacagatagcgccgttatcaaagtttaaaatattttcaaattttattattgtttcatgagctttaaaatatcaatgtttaaatcaatcttaattaggtgcttctaacctaggtagagagagaaaattctaataaatgctagtaaggcataagttaatacatctatctacacccgaccaaattttagtggaaaaaacaacttatatagggaggagaaaaattagaaatactatcatggaataaataatattagtccagtgtaaaataagaaaaaaatagtttagggggttaaatgtattggtgaagtttaaaaatgtaaaatggacattttcttccaccaatttcattgggtcactcgttttaccttgggtgataggaggtgtaacatttaagctagtaattaagatatttgatatatctcgatcggtacctcttaattaagaccataaaatttttcatggctagaatgcttatttctccatggaatgcaattatgtattagtaatcttttttgaaaaacatagaaaaaaatatatgcttcatatttagtttacataaagtacaattataaacctagcttgagcttgcttaattaaatatgtaaatattgaagaactcgtggcaggttatcatgaagctagataaagcgcacacgccaatttctcctatttaaaatgaagtttgacttcattgtgaaattatagcgtctgcagatactctgtatatgttttttccctgttgtgtagtacaacttatgcaaaatgaaagacacgtgctgacgtgcatgtgagcacaccacaccgcttgcacaaactcacgtgttactagttaccacaaggtttttctctttactctgctgtctagttggggttgttttctctaagttaactgtgtctgttttttcaccttctatgtgtaaccccacgatcaggtcaactggttgtagttgtacaagtttttctttcttctgctaattaatatatcaatgtgtaaggtttcacacggtaataaaaaaacgtaacggccgatgttaaatttttaaccttactaaattttatcgtactaactatacggggttcactttatagggcccaagtatcaatgggtgatggcggtaaatctatcttaccgccaccaccataagaaacgtttaaaggtataaagattagaagagcacctatgcacgtaattgcaaccatgaagatttgattcttagtctatggatcattgaactcacctttgggcttcctttgttgtatgagaaattttatggtccttaaaaataatattttgaagtatttaaatttgaccttaaaaattttagtacctcgagatatctagtatctgaaggtatcaatttttatactagaaaatatgatgcctctcaatatcttcttagtgatagtaaaattctcagtaccttctcaataatagtaaaattacccttgttgtatattacagtttgatcataatttaaatatcattagattatttctagtctcttgaagaaagctataagaattataaaaaaacttaatcaaacaacacattaatatatgttagtttgaccaaatgacatgttaattggacaaggtttttgtgcttctttgggaagttgctctatccatcctaaaatataatagtctcaacctcttggtgtctgaagatacggtaaattattttttctgaaaaaaatacagtacatccaaagaaacaccaaaaaaaaaaacctcttgcgacagtgtttcctccaattttggtctgaattcagggcttaaaatccaattagccaagtcaattaattataacagaggtcgactagctagctagcatgtgaaggctgcacgcctaagcaattttggcagcactaaatgtttgcaagtgccttgacgcgcaaactttcgattaattgcccaaataatgacacgatatatactctctcatccatcgatcgatcgatcgatcgatcaactaattaattaatatttacagctagagatcgatcgagcaggaagcaaagacacacttaattgcatacccatctgtaaaaaggaattactagctagagccgtaatccgtagagccagcgcgagcgcgcatgacgggtaggcagtacacatgtacgtacacacgcgtccacctctttacgcaaatacagtagcagtcgctggatcatcatcaagattaattatcctttgtggaaatgggagggctcttgcgatgatctgggggacgatgtatcgatcgatgcgatgccacctcactccgatggagccaccaccagcaacagctgcagttagccatggatgatatgatccattggaagagtagctagctagctgctgctgctgctactcctagctgaggtgatgaggtcctccgttctgtacgtacctgtccatgagatcacatctcatgaatgggaaccgtccggcccggccggcgcccccggcgtcacggagcgtacgctccatcggcgcaagcgccatgtacgtacaccacacaacacccccccccccccccttctagctacaaccttcttcagttctccatcccccacatgctacaagctactacatgccactagttgcacatacctgcactgcatttgcgcgcgtgcgatcatatttatgatgtacatatgcgtcagatattttgtttaggttcgtactaataagatatgttatattcatattatgttgttttattttggaataaagcgagtatgctactaaggccttgtttaagttcccaaaacaaaaaatttttcacccatcacatcaaatgtttggatacatacatggagtactaaatgtggggaaaaaaccaattacacagtttgcgtgtaaattgcgagacgaatcttttaaatctaattgcgccatgatttgataatatggtgctacagtaaattttgctagtgacggattaattaggcttaataaattcatctcctagttttctggcagaatctataatttactttgttattagactgcgtttaatacttcaaatatgtatccgtatatccgatgtgataaccaaacccaaaaattttcccccaactaagcaaggcctaaccctggccggtcgatatccatatatcatggatcgatcagcctgttgcattgttcaaggcgcacacatgctatagtgacgtaccatacgttgaaacaaccactactactaccactacgcctaatatacggatggaagcaatggaaaaacggtggccaagcataaagcgggagcagcagaggccgcagcagcagcagcagctatcaccccctcaccaactccaattaagatagctcccggccaccccaacccaagcccttctcttctctctccctcttctggtttggtttgttgctggccctagcatcagcgagagaggccagaggcagacaggcagctgctgctagatatagctagccggcaacgcactccacatccagccgccctcctgctcgatccatccatccatccacccgaaccctagatagatgaaaaagggcaaaaccatggcatatgccgcgcgatccatctctgcgcgctgctgatataagagatccatcgagtagtagccctgttagctagagcgagctcgatcgatggagaggatgatggtggtgtccttgccgcgtcctctcttccattcctagtcctttccgtgtgtgtgcgactgcgtgagtagtgagggatagataaaggagggaggaggagacaggccgcgaggatgatgaacgttccatccgccgctgccgcgagctcctgcgatgatttcggctacaacgccaccccgccgccgccgccgtcgcttctcccaatcatggaccaggacggcggcggcggtagcatccagagggatcaccaccaccaccacaaccaccagcagctcggctacaacctggagccgagctccctagctctgcttcccccttccaacgccgccgccgccgcagcacaccacgccaccatcgcccacgcctccccacatgacctcctccagttctacccgacctcgcactacctcgccgctgccggcggcgccggtggcggaggcaacccctacagccacttcacggcggcggcggcggccgggagcaccttccagtcgtactaccagcagccgccgcaggccgcgccggagtactacttcccgacgctggtcagctccgccgaggagaacatggccagcttcgccgccacccagctcggcctcaacctcggctaccggacctacttcccgccgagaggcggctacacctacggccaccacccgccgcggtgccaggccgagggctgcaaggccgacctctccagcgccaagcgctaccaccgccgccacaaggtgtgcgagcaccactccaaggcgcccgtcgtcgtcaccgccggcggcctccaccagagattctgccagcagtgcagcaggtcagtgttcatcgtcgtgtttagtttgctgctcgaattcactattctccgatccactgttcatcgatttcccagaagaggatgctggcccgatttaatttgctttgtccgattgattggtttaattaatgagacacacatcttgttgcggcgtgtttaatttgattggagaatatgatttgtaggatcagagagttgcattaattaagtgatctggaagttccattctgctcactattgagatcatatcgaagggtgaaactttaataataaatctcctaatttaactacctaggatttaagcttttctttttttttcatacaagtaatttcagctcatcattagccgcctgtttgccctcaaagtaattacgttagttggaacagtcagatgaaattgaagacggcaattgctttgaactttaattggatgtgtggtaccatctttggcctcttttcctgagttcttccggttccttgcctcatgaacccatgagcagttcaatgcttgctctacatttgcccagatttccttgcctttacatttctttgaaagagagatttcttcctatacaattatctgattcttaactgcttaaactgatatttctagtattttttgatgaacaattccctaatctgttctcagaaatttgagctaaattggatgcatttagcaagctattgctgcatatttgatatatacgtttagccgatttcgcaattagctatggtgaggagaaaattttgcacccattttatattattgcctacactgcaggctaattaagataattcgtgtactatagttattaatctgttcggacacaatatataaattttgaattatcgctgttctgaacacataaacgttcattcgctttgcaaaacaaaattacaaatagtatgcgtgcatgtttctaggtttacccaggtgatgagctagagattcatatgccatctttttctttctttgtgtttcaaattaaagatctttctttggagaaaattgtgtttcaaaatattgatttctgtttaattaaattgaatcctgatcactatctatcacatgctgggacttgggggggaataaccaatatctgtacaaatacatattgatcttgtcctagatagagttgcttattttctcctcctttggttattgttccttgaaactagcccttcccatttatttttcttgacttctccttcgcatgtttgagtggttacttccaacagtattcgagacgtctgtacatgtattttggcctcacaaagtcagaaacaatgcgactttctttgcaagtatagcaaagactttgtacagcccgctcacgtacatatgtacgtaccagcacaagttgcatttgcaagcaacgtgttctttctctctctctcattctttttttaccctgaatgtgtggccggccgtcagtaacatttacctcactgagatgaacggctcggattgattgagaaactgaagaagaaactaccttcgatgcctcctaagcatgcacgtgttaagctcagcaatgcatttaagggaaaacaggaaccttttgcagtatggcacaccatatggaaacactccatatgagtcagctgcaaaactccaagctgtctctgggatggaacagtttaggtgtatgtgcttctcgtgctcaggatcatcattagcttacatattggtccccagaatgttcttttcatcagtagtttcttctgaactgaagtttgatctggcctgagcaacctgtcattttgtcttcgctaatgtgcacgtttatgtaggaaatatgcatgcaggatcatgcaacaagcttctcaatcgtagaagtagtacttcatcttccatatcctttatcgttgtaccgtagtatttcatgtgtattcgtcttcagctcttcgtagttgcatgcatccctctcatttctgtatgttaaccttttctaacctgttcaattattcagattccatcttcttgatgagttcgacgatgccaagaagagctgcaggaagcgactcgccgaccacaaccgccggcggaggaagtcgaagccgtccgacggcgagcattctggtgaaaagagaagggcgcaggcgaataaatcggcagctactaaagacagtgcgtgatatctctctctctctctctctctctctctctctctctctttattcagtattttcattcatgatctcaaccacctgaaaatgcatgaatataacatattctacaccatttcctagatagtcctaagatatgatgcatgaatgggttcttaatctgttcaattcctagataattaaccgatattctacaccatttccttcataattgacagaagcaggaagtagcagcaagaacgcaggcattggagacggtttcgagacacagctactggggggtgcacacatgtccaaagatcaagaccaagccatggatctgggagaggtggtgaaagaagctgtagatcccaaaggtaaggcatcgatgcagcagcagcagcagcaagcacatcatgggattcatcagcagagccaccagcagcatggcttccctttcccttcgtcgtctggctcgtgcttattccctcagagccaaggagctgtctcgagcactgacacatcaaatatagctcaagtgcaagaaccaagcttagccttccatcagcagcatcaccaacacagcaacatccttcagcttggacaggcgatgtttgatctcgacttcgatcactagtataattaatatttatcaatcatctcgatctctccttctctctctctctctctctctctctctctctctctctctctctctctctctctctctccctcgtacgtgtgtgtacgtccagacatctcttttcatcttgtctctattaattactgtaatttggatataataatgatagcttatgcgttattgtcatgtgtactggcagttttcctcgttggagaagctggttaattagccggtacatcaaatttagtgtaatttatagtttggtgccacaagaggctagttggtcaattaatttcatctaggaagaatgcaccacatgaaagttgtacgaatttctacataactacctgaatttttcgtgcaattgcacatggctagatattgtagttctttgactatatatatatagttttaatttattttctattgtttttgtatttatttccaaaataaaattgtatgtcttatacaattgaattacgcatcactctaacatatatatgtacaaaatgatctacatatctttgtaatatatggatataccctgatcaggaaataaatagacatttatatttttaatattatagtcgacatataactagatagggcgctctaaaacaactatccactaccttttttttcatcagcgagaaaattttagtatagtctaaatacatgacgaattgttaattttttgtttaccggaaaaacagtgggggaagcctccacggttaaatttcatatatattaaaaggaaagaaagctgtacatgtaagaatttgacaacttaatttgttaactttgcaaggttaacgcacaatttgcttaactttgctattttccgcgacatgattctctttgttatcttgaacatataatcgcattgtccatcatggtccataaaaattgtcttatatacccatatatctaatgtcaataattgaacgtagggcgcacatcaaggcacatacacatgtacgcaggggatgcgataaccgaaaggttcatggtcgtatataataaacaagttaggccagaagagatatttactatacatcatccatgatctgatgacgacaaatatcccattgtattttaattatattatcatttatcaaaagcattcactgaatttagttggacgcatggttacagtggaagccaaacatgatcaaatcacataatcgtatggccctgaattttattttgaaacaacccgtacaaaatagtgcgacgtttctattgatagagcaggaaaaaaatacaagtctatatccctggaagactatagccagaaaaaagaaaatacagccacaccacatgtctacgtctaatcctactgttagaacaaaacaaacacacagcacccctaagtaatgggtcttctgaacgacgcctccaaggagggaacgacgccaagtgtgccgccatcgcccgtcctgtatctccaggacgtgggttttcacctaaagaacccattgggagagggaaggaaatgcagcaacgccccaagggggaaagcggcacccataggcgtcaccattgccagtatggccctgaattttacaattaatcataacttgttccaaaggtgcattcaaaatgtttatatatagttgatgtgttgcatggatgcacacacggatcaagactataagatcttcagggtcatctctattaattatatactacatttttttagaactaattatatgcacactcactggagttatctttataggattctaagaatctgatgaaaatgtttagatctggccttatccggttatgcatatcaatttacgacaattgattattatcaacatatgtttccagtacatcccccaatggaaaaaaataaccacaagcaatataatagaaatagtccagttaaatttacaccaaaccatcggctaaagttcctagttctaactgctactatacgggaattaaattgaatttgttctttgttagaggaaattcgaatttctatttgaacttacttgtactcgaggattgactacgacatgtcctaaagctagccagttctgcacaaaactttccaatttagtatttacaacgacatgtaaaaggagtgaggttttaaaagccccacgttttatagtcaaaattgtaaaataccacaggtgttatgacttttggcatttaaccatagggttttgtggtttaaatgtttcataaacccgccgtcattcataatttgattaatttcagcatatttggattttctttttttaaaataaaagttgtgaagagtaaaactatcagctttagtaaaaacttaataactaaaaatttcatatgaagttatactgatagttttactcttcactactttttagaaattcaagtaattgagtttgtgctcaacatgtataggagtgaggttttgtgaaactttaaaaccatttacctagcgactggagttatgagccaccagtcataatatcaagggctttatgtaactttgactcttaaacatgagttttctgaaatttactcgataattaatgatattgtgtttcctttactttctctaaggtaaattgcacatgagttttaagtgcaatattgtctcccaacaattaaattgttgtttttatatcacgggttcaaaacaataaatcctttgatcaggattttttgatcatgtaactgctagcaaatcaattatcctcggctaaggtcgttcatatatgtacatagatggaaatattgatccagggtacatgcatgcatatgcccatgctctctttgacgtcatccatagctactatttatgatgatacatctatgtaaactaacgatagacctggtactgtaacttatcttaaaacttgatcattgacgcatcatgacttcatgaggtagcgtcagctacacagcgcatctagcactgcatatcctttgctcgttactatttaattgacattgtccggcatccattccaacattatttattaagttgcatgcaaccatttcatccaaaaacggaattataaaatgcaattagggtaggggggaaatggccctttttatttgtccttcgtacatagttactcgtacttgcttttagaaaacaactaattaagctgtactatatatttgttttgggtaacagaacaaatattatgttcggatataaatacaacgggattaaatcctaaatttaacagtggtgctcgtacttatggttaattatttttaagttgtaggcaatgtatgcatcgccaatgagacagctatagtgactttgtcaatgttaggatatgatgacttagtatttcaaggtgtttatacggatatggtatacgtgtgtgcatttaaaggggcaggcgtttgtgttttttaaaaaataattagtgaaattgatattctctagataaataattgccttttatcaaacgcattgatgtattttgtcaatttttgtgtgaatatgtacttaattattgagagtttggaagatagaatatacatccccgacatctacatctaagatgcacttaaaacttaagacccatctgcagctacaaatgcatataagcagctcgtgcggccggtttcttattcactctatataacttaccaactgcatctgtttctttttttaggaaaaggtagaacctacatattaattggctattgttttggctcatcaacctaaccgtggaacttacaaaggatcgatgacgaagctaatttggttacgggcacccggttgttgaaagttgacttatgcacacaactaaccccaggaggcttaatgcatgatcgatcagctagcttggcctcatttatgaagtagtgcaacgagagctaggcatatgaatgccagatcaacagtaagacccctattatgtatgttgtaccttatattctggtactagcagattcatttggcaccattaattattagaggagcgtacgtggtgttgcagttatttgtacaggtacgtacgtagcttgcgtttgcaatttagctagcatatgcagctctctgcaaggcactgtaatgcatggttggttcatgtgagagcttagctaggcaaggtttagcctcgatctgaagctatctatacttgaattgaaggacatgttgggtgctgtctggtcggtaattgtcatgctcatgcaaatatgcaatattttcacagaaagaggccgcccaacctgcggctgtttggtacacagctggcatgatcatgcatgtagtagctactctctccgtcccaaaaaaaaaagataaaccctgggttttcgtgtccaacatttgaccgtccgtcttatttaaaaaaaatattaaaaaaaattaaaaagacaagtcacacataaagtattaatcatgttttatcatctaacaacaattaaaatactaattataaaaaaatttatataagacggatagtcaaacgttgaacacggaaactcagggtttgtcttttttttttgggacggatggagtagctagctagctagaatccaatactagttcacgctttgcgaaggaaagaaatcaagaaagtcgatggccgtacgtacgcaagatcgatcggttaattgatcgattagccgatataaattaggccaattgattgcacattcatgcttcttaagaaacttaggccaggtgatcgaggagagtgagagtgtaagaatcagctgttctaacttctaagtaattaactagtgaaaatcagaaaaaagatggttccccatcttctatccttttattttctgaattctaaaactatatattctcacaatcctaagtggtgatctaaactatttgggggagagctggagattaatttgaaagaagcttcccatatcagaagctcagtagtgtacacggccttcagtactaactccgcccgccaccgaggcgccgatcgcctcctgcaggcggcgtcgcacgtacgtacatatgcgcggcgtatttctgccgatcggtatgcatgctgatgtggtgtgtttccgaaggacgcaaccgcgggcggccgcactccgcgcgcgcgggacgacgtcccctcgtcctcgtccgcgacccggccgcgtgagaatccgtatttccgcagccagaatccgttcttggcgagaagccaacgcgcgcgctgcgcggcggccgggtaggtggccgggcggagaggaggcggtacgtacgcgcgcagatacggacgttgcgtgggtgggtgggggcggatcgatcgggctcgccgccgtataatccgtggagggatttcgtgcatgggatcgtcacgtacagtaccatacacggacgtactcacgtcggtgattaattggtatctttactaaccgctcacgttttcatcattgttttgattgtgaacctcgcgctacctgcaacaacgccgttttctgggccgtagtgtggcctgccacacatggcctaagctcaaattgggccttttgagagttacattgcaccgtccgttttcccgcggcccaaacagcctgtagacgagaacctccacggcccacggtctcggcatgtgagctgtgaatttttgcgataggtgcgggtgggaataagttcacctcgtgaccctcaaaagtgatcgaaatataatccgtgaccctaaaccacaaaactagatatcttgaccctcaaactcttaaaactggtgcaatttgactacctgaacggttttggatggcggttttgctgacatggcatctacgtggcggtattgaccgggtatcctttacacgtgacgttgacgtggcacttaggtggcattagaatttaaaaaaataattcatttatcattcacacagaggatgacatgcggggctcactgacatggggacccactgacatgtggatcccacatgtcatcctctctcatccccttcctcctccctctatctcccttctctcattctctcccctagcctctcttcaccaccggagcggcaatggggatggcggcggcatcgtcgggtgggagctagagcggcagcggagacgacaagggcggtagatgcagcggccatcgacgtgctcatgctggacggcggcggcgaccatcggcgagcaggcgggtgaggaccggcgagggtggtagatgtggcgaccatcggcgagcgggcgggcgaggactggcgagggcggtagatgcggcggccatcgacgacgacgggctggagctggagtggcggcagctgcgcctaccgctgccatcgccgccgcctgccgaaggggaagagaaatcgtcgggaactcgtcgctcgatgccgccgtcgccggggtggaaggggccgagcctgcctctgccgctctccgtccatctccggtccttcccttctctctctctcttcctctcccccttcctctccccctttgctgcgctggagtggcgggcgaggccggtgaggcggcggcaacgacggacaagggctggagcggcgttggtggcgggcgagggccggagcggcgacggcggcgagcgagggccggaagagagggaggagaggcggcgcctcccgagatttcgcccgcccaccgcccctcgtacgcccgtaaagccgacgactaccgcaatgccgacgacattgtcaccagggtcccctcctacgcctgcacccgccttgccctcccgccgccaccgttggcggatcccgcgcaccactgccgccgccactggcccccgtcagccgtcacacggccgccgctcgccgaagggaagagaaatagagagggggaggatgattttatgtgggcctcacgtgttagtgggtcccacctacacttttggtggatgacaaatgggtcccacacttttttttttatttctaatgccaactgagcgccacgtcaatgccatgtggaaagaagaccgagtcaataccaccacatagacgtcacgtcagcaaaaccgccatccaaaaaccgcccagggagtcaaattgctccggttttaagagtttgggggtcgagatatccagttttatggtttagagtcacggattagattttgatcacttttgaggttcacgaagtgaacttattccgtgcgggtgtatctgatgtcgtgtcatgtttcgatgcaatcccaacccatggacatggcacgttcccgtacctttcgcatgtgacatgtaacatgttcgacccgtcggcacgggcctgttttgtactgttgcattgcatatgcctttcgtctactagtgtgttccatctcccatcacgacatctcgcagaagaatccatcgatctagcgtgagcatatgcagcatggctatacgtacgttgatccattgataattccaaattctctccatcggtgaataccactcacatcacatgtaacgttctttttcggtggtattcgcgtacaatagaacgatgtcaacaacttctgcaactgccaaaagaccaaaaccaaaccctcagatgtcacgagtgcttttctggtcgatcaccgtgtaccacaccaagctggaacaccaagactaggaggcaaggacataacaatgcatcacccatcagcaccattctatcatccattccgtctcagctcaaagaatcggctacaaaatcccaccacaaaacatataaacaacaaaaagaaaccaaaaataaaaagaaaagaaaaaaaacaccctgcatctgcggccgaaattaattaatcgtagtactactactacgtgtttttctttcaccatcctacccagctaagtactccactttttaagtagcagaagatgatatgcaagtactacgtaaacaagctagttgacggcggtgcagacgcggcggatctcgccgtcggagccggtcttgacgccgatcctgccgagcttggccatggcggcgacgaaggcgtcgaagaaggcggtggagttggcggcgaagaggttgacggtggggcgggagcggcggtcggtgaagaggatctggtcggaggcgaggaggcccttgttgtagcggaggttgttgaagtaggcgttgtcgaacgcccgcggcgtcgacacgtccagcatcgcgaacgccgtcgggctgtagttgatcgggcacacccgccgcatcgaccgcaggaagtccaggttcatcggcgggttgtaccccagccgctgcttgaacgtgtagatccgccgcacgaacttgtcgcagtgcgtcaccccgatcgtgtgcgcccctgcagtgcgtgtgcaccgtcaatatcagaatcatttcagtgagaaaaaaaactactccctccgttacacaatataagactttctagcattaaccacatacatatagatattaataaatctaaacatatatatatatatatatttagattcattaatatctaaataaatatgagtaatgctagaaagttttatatcgtgaaacagagtaagtagaggaagtattgtttgttccggtctgtgcctgtacagttgttttaacctttttactgtactactatatgcagagtcaggagtggctctggttcggtcaaaagttaccgctagtggttgtggtggtttcggttttgtcacaagggtagggcctcttgtgtccaaatctagacacaaagattgtttaaactaagcttaggatctgacaggaccaaaaacattcagacaaaatcgccccagttctcatgtagtactaagatcttttttattcttcccttgccccaacccagcaagggtatttaagattaatcaaatatgcctactactacttaaaaaaaaataagaggtgcttccattgtctgtcaaaaaaccgcccaaaaaaaccgaacgagtgagaaaaaaccggacgaaaaaaccgtaactatccgataaaaaaaggcgaaaagaaacaatctgcgacaaaaaaaccggaaaaaaaccagacgagtgagaaaaaaaccgtagttgtccgataaaaaaagggggcgaaaaaataatccgattccatgcaaaaaaaaaaaggctgaaaaaattctccgtgaaaaagaagagcgacaaaaaaacgaaaaaaataatccgattccgtgccaaaaaaaagggcgaaaaaaaatctctatctctacaacttaaaaaaaagatatgtttccttcgtgcgtcaaaacaaaaaaaattagcgaaaaattaaaaaaaatccaactcctatctgattccctctcagaaacgaaaaaaaaagtccgactatagatccgatccccctgaaaaataaaagtcaccactccttttaagtccgagataccagccaccactcctctcggtttcaatttataccgtgatatctctcacatcttggtgaaacaaaatgatgtgacggattgaagatctgtttacaaaaacggaatctacaggtcgagagcattccatttttatattattttaatttttggtttgtacttttgcatttgagtccctataatttttatatttacatttgagtccctataatcttacaataaggtatttgaggtcgtttttgttaaaaataataataaaagagagataacaaaagcagaaagttgcataaaaagaaaaacaacaaaagttctgtttcccataagtggcgaaaaaaaccatagatccgaacgaaaaaaaaatctgattcctataaaaggcaaaaaaaaaaagtggtgaaaaaacactagattcgatttctttaaaaagggaaaaaaagtttgattcctataaaggcgaaaaaaccgaaaaaacatctgacaagtccgttcgttcgatcccctaagaaagtggcaaaaaaaatagttcataaaaaataaaaagttggttcgtataaaataaaaaaatgcacactagaaataaaatggaaatgacgaaacaaagtccgatttctaatcaatatatatctcttctctatctctaatataatctaactatttaaaaagagaaaatgcacgagaaaataaaaacggttcaaaaacacgcgtgagaaaaaagtaagaaaaaagcgcaaaaaaatacgctaaaaaggttttccatcttccataaaaaataaaaaaacacgcgagaaaaattatttccatcattggtaattttttaaaaaaaacatgcgaggaaaaaactgtcagaaaaacgcgacatttctaaaaaatggttttagaaaaccgcgcaagaaaaaaaacagcgtctattaaaaaaatcactctaagaaaattatcagaaaaaacgttaaatcgatggacgcttgagtcggataggatccatcgatttttttttgccacctactacatggcttttattccgtaatatattctcatgtattggaaaaaagcaaaaaaaagaacatttgaagaaaaaacaagcaaaaaacgcgcgagaaaataattgtcaaaaaaaaggcaaaaaacacacgagaaaagaaaatgaaaaaaagggagaaaaatatggtttttgttgtaaataaaaagcaaaaaaatgctaaaaaaacttttagaaagaagtgcgtcatttctgaatggtttgagaaaatcgcgcaagaaaaaaacaccgtttataaaagaacaaaccgctcattaaaatacaaacattgtcattgacatgattattaatgaaaaacttatattatcattagaattttttcacccattggaacgcacaaaaggaacagaaaaatcttttaaaaatcctctacaatgtactacttcaatctatcctaaaatataagtatttttgaatcttgacatagtctttgatatgctactttaactaataatatctataaaagtaagatgatctaaataaaaagacttacatattacgatagtttgtttaatgataaatctaataacatcaattttatatgatttatcattttattttatttttgctattaatggtcaaaatagaaaatgtttaacttagcactattatgaaaatgcttataatttagaatggaggaaatactccgtagtacactttgttcttttttctgaaagaaacatgcgtgtgttttaaaaacagcttcggttttatagtagctacaaagaatatttcatcgctttctgccggtcttttttacatctaaatgtgaaattccctgcaaagcaagtactactactccacgcttgtgtttttttgtctactttgcattataatcaaacaaaaacaaacgagcctcttttcgttttcgaaaagaacagatgaaaccagtataaaacagcgaactgctttgtcttctgttgcaaacagaggatatgtcactcacgtgaagtgcagaggccacgaaaaaaagatgcttgcactgcgatcaacctgctactaatacttgtaataaaaaaaatgcaaccctaacgaggaattgttaatttctgtgggtaaccggcaaccatgctattgtcgcctcaacgttcacaaaacagtaacctgatgctttttcagaacggctagtatcaaccatgtaaaatttctccacgtcaatggaaattttgaggcaggaaggaagaagcttaccggaaagcgcaatcatgtcggtctgcgttaggccattgctggcgaacaaggagttgagctgatccagattgaagccagggccgggcaggacgtgcttgacaatggctctgttgaacgtcttgccgtccagccgtccgagctccacggagtagctcggcccgccggtctacaacaacacaaagcaacatatcatgcaatgtcagtaagtgaacaaattagcgaatgcaacgcactaacatctctgcttcaacggcaatcgttacttcattattagcagtttcagaatgcaggtagatatgcatggcttgtgattattcagcaaccttttcttggctctccgagagaactgttaatacaacgtcatgtctagatgtctacccggtggaaattttgtctgcctgcttgctgagaacgaggaaaatttccagccttgctctggcagcgcccacgagcccagccacgggactgtttttaggcaagggtaatacggcaagcgtcacgggcaacacggacaggagcagcgtactacagttcaggagaagtatttacccagttggaccgaggttacaatttagaaaccactcctacgggctacgagacgtcgctttcgcagaaatccatgccgcagaaaaagcaatactcgttcaatagagtcatcgtacgctcaaagcaatactgtgcaggcagtagccgcagtacgctcaaagctgttgccatctcaaaagatagcggatagccggagacacaggaggagaatacccgcctcgtacgctcgtatgctcgggcgccccgcgccccgccactacgcgatatcgcctatcaaacccggcgaatgcgccacagtgcgcgagccagcaaaccacgaccgtgcgcatgcgcaatcgcaagcgccgcgcggcggtttcctcgcgcggaagccgaggccgacacggctcacatgtctccgtaagcgactttccccttttctttctttttttcgtaggagggggccaaactgcgaaaggccagccagccagagcgaccgaactaaaccgaacccagcacagcgcctgcggctactgcctgcagccactgtgcgggtcaggctgtggagacgtggagcaccggaaccaaccggggagacatggaccatgcgtggctcgtgtctgcggtgtctcatggccggagtcagccatgactcatggccatgggctcacggctggatagatcgatcgatcgatggtccagtttgtcaaaaaaaaggggttactggcgcgctggatgcaacagtagctccgtcggccccacctgtcatcgcaccggcgtggtgggcccccggctgccctctctgcttaaaagcgttagcacttgcaattgcaacgtactaggagtactccacacacaggatgatggggagtatgaacgctagtactactacgccgatgcttgagcttgccaatcagggtgggtccgtgcttgctggcgactgacaagggcgtgccctacactacagtcgagccggcggtacaccgcattgtagtactagtattgttgaacgcacactaggacgtgacgagtcgcgacaggacggggatttgtgtgtacagtagtgtttattgttaccagggagacgacgtcgcgggcggccatggcgaggatgtccgcgcaggagaccttgccggcgcagccggggagcgcctcgaccgccgccttggccttgttgatcgcctccaccgcgtccggcgacagcgtggcgtccgcgccgctgtggctctcgtcgtcgccgttcggcgccatcagcatcaccgacgcgtcacacccctgcaaacgcaaacgccgagaagatgaacacccaaaacgccgagagaccgagaccgagagagaggacgtaccctgacgaagcagtcgtggaagaagaggcggagggtgccggggccgacggcgaagctctgctggaggtgctgcgagatgacggaccggacggtggactccgcgttggggcacgtgctgccgtagtagttctgccgcagctgggccctcgcgccgccgccgacgcccacaagcgccacgaatgccacgagcgccgcccgcgcgagaagccccatgccgccgccgccgtgcgccgccctggccatcgccgaacaagctcaggctcagctcggcccggtgtgtgtgtgacagcgacacagtgtgtggtctgctttgagggtggtggtgggacgcgggagcgaggagaaaaatgcgggagttcgggtggcaatatatagcaggggtttagcttgagaaaacaaaggaaaaaacgggcgatgtgggggaggaggagccggaaacattacggcgggaatcgagatagagactgtgtttagatttcggttaaaagtttaggtgtatcacatcaggtatagggatatacatttacatttgaagtattgaatatagattaatataaaataaattataaattccgtctataaaatgtgagatgagtttattaagcataattagtttattattagtaaatgattactgtagcaccatattatcaaatcatgaagcaattaagatttcatctcacaatttacatacaatctatataattagttttttttatatttgatactttatacatgtgtcaagtatttgatacgagcggatctaaacagtccggaatcatagaagtggttacgatctttgcgcagatgggacggaatatctttttcccttttccggttatcgatgaactgaaacatttttctagcgctttttttttgtgcggcgtctgatcagctttggtgcggggctgactcagccaacctagctagattgggggattactacgtgcatttgccactgacaccgtgtgatgtactgcaacaactttacttgtaagattcagcaacgaaaactaaagaccagatagcagcacaaagccacagaactagggtacatctactgtagactatagcactgtataagtgtacatctgaagaaaaaaatacattgtactccgtataattgtacattgtatacgagcagcgagaaaaaagaggtcgcgtgcgtgcaccaggtctaaggtatggctactggggcagcagctagcatcgtctcctctgcagtgagctgaagaaccctctcggcttgcacgcatattcagagtagctaccatccaaagctttctcacatggtctcgttgcgtccagcttgtggccagcatgcacctcacctccctccacctccatggcatggcagcaatgccgtctccctttccctgtctccgctacccaaggcgcaccccggagaaaaatacaagattcacggacatgttgcacagaaacacgcccgctttccctgcctatacatttagctagtagtatacaataagcaacactccagcatcgtcttcggctgtgaccaacttgtagcagcagcagtgtactagctagtgtctgatggataatggactaatggtgcaagcgtttcttccgcaagtttcgatgagattgaaaccatccatccttggaatgatggcagcaattagccattactggggacaggtttcatttcgtttgagaaacatattcagatgaagcaaatagacatcggtttatctgacagaacaaaatatagggcctccatgaacctcttgcttaatttgttgcaaattgagcaagatgtagtacttgttaatttgaccctctcagaaaacaactatggaagcacacaacagttaacactagttaacaggatagaaaaaactacaacgccttcgacccataccttgggtgcagaaaacaaatcccacatctgagtgtttcagaagaccaacatgcaatgcgagtggtgcagtgcaggggagttgttttcttgggggaaatgggtggatcagtggatgtactcaaacattggagaatggagaagcaaaccttactattagtatgttatttaccatggaagcaacttgacagtgtagattaatgctatataagaccttctctggaccctctacactctagtgcattggacgtgttgttttgtagtgtctcgaacgggtgcatctgcggtctgcatcctcgatctatcacaaggaaaaagcaaaaatatatgctttgtttatttcaccaagcagaatacgagggattctggacatttctgccggaatcgtctcgcctcttgtgatagctggtgtccatgtcttgtgttaaactactgcacctccgtgtgttctctctcggtaacgtttcctgatactgccaatgccaaactgtttagcctttactcgatttacactacgtatgaggctttgagaaactctccaattcaggccctctctgtcactgtaaaatgcaaactgactgactaagcttttcttcacataacttgtgcacttgtgcttgaagtatgggacacactcagaatatgaggaacaactgccatatcttccactaacggctggctggccattccatattgaacttgaagctggcgaaggtatgtcctgccgatccttcaatcacggacaaaatcctgtcaatttcggcgagccagttcccaagttgccttaaagatgacaggaaatatttcccttcaatcacggagggaaatgttagcaccatgcacgatcagaaggatatgatagtgcacatgtgcacaatgcatacagctagcccatgcatcagaaatacggaactgaccatttgaacaagagaaaattaggaaacaagtcatccggaacccaagcatcatctttacctgattttttcgcgaatgcacaaaaaatttacacgataatatattagaaaaaaccagaattcaaaatacacaacgcaatggcgaaaagagaacacacaatcaagtaatatatagttcgccgtctcaagctcttgagcatagaaggggcaaaccaaatggtcgtcgattccgcgctttaacagaaggtcaatcgtccatcaatgccgctgaactgctaattagaggaagagcttgtgtttagctaggcctttagcttcccacatgtcggcgcaagcaaaaatatggagatccagaaagaagacctggtttaagaagtttccaatggatatggctaattcatagcctgatattattaactcctgaggatctttttaaaaagatagtagtatacctcatggcgtgtgaaaggtctcaatcttttttatgtaatcagcaggccaataaaattgcgaatagtcttgagtgttaactactacttttctttcgatgaatttctgcaggtagaatttcaggattagtggattacacatcccccttcttcccatagctgtactgaaatacgaatgcaagatacctctgtttacataaaaaagattagtgccttttcacgttcatttctcagaaagagacgaggactagcatgcagtacctctgtttgattgcaatagcctgtacaagcatccagaagtacggagtacttgtgattttcattgacaacttcagtctgcaacaaagagccagacggtagatgtcaccgaagtctctgaaaactaatttgaccagtgttgtcaccttttcctacagctttgggttcagcaatgcatgatagtatgtaccaaaactgtactccctctctttcaaaatataaggccatgtttagatgggactaaaactttaagtccctatcacatcgaatgtttgaacactaattataaatattaaacgtagactattaataaaacccatccataattttggactaattcgccagacgaatctattgagtctaattaatccataattagcctatgtgatgctacagtaaacattctctaattatagattaattaggcttaaaaaatttgtctcgcgaattagcttttatttatgtaattagttttataagtagtctatatttaatactctaaattagtgtctaaatatagagactaaagttaagtccctggatccaaacactacctaagtatttttagctataaataaaaataattgtatgtctagattcatagctaaaagttattatattttgggatggatgtagtatggcaaaagcaacatcttgcaatacgttagccacctagagccacagaaaataaaaggtgaacatttcgagtgtgcaacgaataaagatactgcatgtagaattgtgtttcacaactaaagttatctgagtaaagattttttttttctaaaacgaattcatgtcggttgtgtaacataaactcttttcttctaatatactgacgtacaatatttttacacattcgtgaaaaaaattaaaagtattcatgcagcaactgatgataggtactataaatttaaggattaggattcagagtatgactctgattgagccaacttcagtttaggtcccagcgtcttaaagaagcttccagtgcctggttcatcatatatcaaaaattttctggacttcagcatacccccgtgttgctacgtactattcaaaatagcaacaaatattacgctcttgttgaaaaaagagtaaaatccatcaccggtctctaaacttgtatcgatgtttcctcccggtccctaaactcgcaaatcgaccgtttagatcctcaaacttgttcgaccgtgtcatcccgatccctaaacttgcagatcactcgtttagatcctccaacttgttcagttgtgtcaccccgatctctaaacttggatttgaatatcatctgggttaaatagaacggtctaaagactttatatttaaaaataattcataactttttcatgtgaactctaatgaagataaactttatatcaaacttgtagccctcgacgcgatctacaactttgtagttaatttttttattttaagtcattttttgtcccaaaatgtaattttaaaattaaaatttcaaaatctataaacatacaataatattttggggccctaaacagttttaattcaaaaacttttcaactacaaagttgtaggtcgcgtctagggctacaattttgatataaagtttgtcttcattagagtttacatgaaaaagttatgaattattttttgatataaagtttttagaccgtcttatttagggaccggggtgacacaactgaacaagttggaggacctaaacgagtgatctgtaagtttagggaccgggatgacacaatcgaacaagtttgaggacctgaacggtcgatttgcgagtttagggaccgggatgacacagcggtacaagtttagggaccgatgatggactttactcttgaaaaaatattggcttattcgacttaaaaaaaagtaaaatatcatattagttttcagtacagactgatgactccaatcgtgataacaagatgccttttgatgtgattataaaatatgtaatcgtcaataaagtgttttgcctatctcattttaaattacaataaaaccctaaaaagtttgtgagttttttaagtcaagatagcaagaagcaaatcaatagagaattaaagaactgtgtcctatagagtaatgcaagactagcaaaagagtaagactacgtacagctactccacaaaaatacagaaaaaactagccaaacactttttcacgaacgcacaaaaagaattcacgtcaatatattagaagaaaagagttttgttacacaacgcaatcagccagactagcttatgcctagaggtggaagaaaacaaagacaaaaagcaaggaagaaaaagaaaaacacgtacgacgggtaatgctacttcaatcagtgggaggggacagagtcacgctacactcccaacaaatccccaaaggaagcaacgcccgctaacgaccatagccggccttccgaaaggatggactctaaaaccactgagaccgaagagagtgcagagtcaaaaaccctagagttccgttccttccacagttgccaagagaccaggtggatcagggagtcgaagccggtacggaggcgttcaggtaaacaggccctagaagatggccaccagtcctggagccagtgccaccagggggggcggggagagggcagcccagccaggaggggacaacacccataaccagacctaacaagcgaacacacaatcgaagaggatgtggttcgccgtctcaagctcctgagcgcaaaaggggcaagccgagtggctatcgatgccacgcttatggaggagatcagccgtccgacagcgctgctgaatcgatgccacgcttctggaggtgatcagccgtccaacaacgctgctgaaatgcaaaccagagaaataatttgcatttaacaggacccttcgcgtgccagagaagatcagcacatgcaaaagagtgctggccatagaagagcgcctggtacgccgaacgcaccgagtagcattggtcactcgtccagcgctaaacaagacgatcaccgacacccggcgaaagctgaatgtgaagcaccgcatcctaaacaaggagaaactgggagatgattgggacattgagggcgccgcggatgtcagaaatccaggaattgttcgcaggccagaagcaattgtgcgcgaacctctaagccgcaggggcacagcgaagacatgtcaaacactcataacttatacttataccatggcccacatgtcagtcgcagttctgccaatcaccaccaccattatagattttaggttccattaatagagcgtatttaggggaaaaaaacatgctccatctgaaactgaaaatggataggtatgctctgctgaagaacatcaggacttcactgccagaaaatttgatctctcgtgtgtgaattaagtcaactaggaaggtggcccgcgcgcatgcgtgggcacttatattattgaaagataagattattgttgttcaaaaattttgtctcatagattaagggcaaactaaagctcggataatgtcattttatgattatttaagggttctatttttcttaatgtatcttaaaaaaccattcacaaactttgagtaggagatgaattaagtacttacgacttttgaatcatttttttctcgagtaaataataaactattgctagttaaatatcatacaggccattcatatacatatcgtgttgtatggccacaaatgaaaaatacgagagcaagatactcaaaattcttgtgataaattgtctcatgaaggcgcatgatatagtaggaaaggggggaggggagtgtatgcatagaaagaaaaagaaagggaaaaatgaaaaaagggatggaaagcgtacgtacccatgtacgtaggtgcgtacctatgccaggggatgagaggtgggaccttgcagtatttagtttgctctaagatcaatttaatataacggtttataatattgggcgtaccgatttaaccgaaaatcaagtaatggatactttgcttttctttccatagaatttctaatatttcctctaatttattagagcaccacgtgacagcttgagagcactttaagaaattttaaaggacttaacacatgtaattagaatattaaccgcttaatatatatgtatggggcatatggtaatatttgttctagcttcgtgcatgtttatatacatgtcgagagaaattaattatgtggctagcaagccattagatgtctaattagtagcaattaattttgacaccaatttacagatgttgatagtagtttgtacatattcatcttacgactttgattatccgttgatccctaatttaatgatcaccatgactcgcatgaaaaaaatatatactacttagggtttaggacagctgaaattgatgaattatcttatttatgtgatagctatttgagggtatacatgaatgaattgacttctaaaaagttaaaatgttgtttaaaaatgacaccgtttagaaacttggaaagcgtgcaaacgaaaatccaactatagaatcaaggaaaaaaagagggtcttaaacttccttatagcactcttgtctttgtaagagttctattgatattcgttaatattttgctcatattataacataatgatttcttttacgtataccaacaaatagtacaaaatccaaatatgacataacacaatacattataattattatgtaattaactttcgattccaacttaaatagagctacaaatagtacaaaatccaaacacgacataacacaatacattataattattctgtaattaactctcgatttcaacttaaatagagctaagtgttagaaaaaacgcaacccatattgcttaattctgctcttgctgcatcacacctctaattttcttttcatgttattaataaattaatcttctccatgtatgaatttatatgtggcaaaacgttagtgctgcggcagtcataatcaccttagatgcctcagacacgatgctttgtcacgcgtgcaaaaggtaaaggtgcagacgtgcattgtgtagcgggccaaaaagagaacttcggacgctttatttattagcaaataatatatcagatgatttaaatgatgagtccaccggttctttataagtgtacattagttattatagattttaaatttttaatttaatgggtacacaatataatgatgtagactttagtgcattatttgagaataatagtccaatgtaataaaaaatagttccgatgatttaaataatgggtccatcggtttaagtgcacatataaattagttaatatagattaaaattgtttatttgataggtacacaatataattgtgtaaactttattttaaaatagtgtattatgtgaaaataatagtacaaaataatgagtacacatgtttatgtagaaaatatataacattattaatttaatggtaacatataatggtgtaaattttattttcaaaaattgtagagctaatttagttacctgtgagcattctttgttggtgaaattatgattttatatatatatatatatatatatatatctattatataaatggggaaaataagaaaaaaggaaaaaaaagaagggaaggaagcatacataccatggtacatacgtatacccacacatgtgcgggagaaggaggagaggtgggaccctatagtacttggtttgttttaagatcaatttcatctaacggtgtgtaatataggacccaccaatttaagtgtaaaatcaaggggtagatgtttttcttttttcttagaatttttatgattttctctaatatatcagagcgccacgtgatggtttgagagtgtttatagaaagtttaatggacttttagtatataatagatagatagattatataatgtatattattcatttatttagatattttatgaatatttcgatgacgtgcgtatagtacaatacgaactcaaaataacttatatttgtacaactatgggttgaaattattaacgtggtttttatctcatgtgagtgaaaaaaaggaaaaagacaagaaaagtggggacgtgaggccctacatgcaagtacatactccgaaccatatgggctggaatatgaattttgttttttctcatgtgttagtgaaaaagaaaaaagaaaagggggagtggggcccacgtacaaaatatgtaacgtacatgcacgtacacgtacagggcatgtgtggatttttaaagataataataaatctaattgatattttttatgctatatctaacgtttaaaaatagtgggtccaccagattaaatgaaaaccaacggctagatgctttgcttaattcttctaatttattagagtgccacgtggcggcgtaggagcgtttgtaggggggcacgtggcggtttaggagcgtttgtaggaagtttaatggacttttagtatataatagatagattcgcatgatattgcaattggtatggatgaaaaagaagggaacaaaattactgaaaagtgactgtgagcagatgatttgagcatggctaccccccagtctaaacaccatacaagaagatgcaagggaccaaataaatcatctactgtaatcctgattccatatttcaacagcagataactatcgatctctgctagcccttgatttagaaacagggaattgtgtgaaaaattgctgtgactatcaggcatcactcaaaagatttttcttcagacattgtttagtgttatctctcaaagcaatgtaatttaaatctatttgtctctgtaatacctgtctgaagctttgagcaaatacccaaattccgccatcgctgcttctcagcaaatctccaattatctttccctccctgtaataaaatgtagataaacaaatttttctcagagaaatttgtgcttgaagtgtgagataatcccagaataagaggaataaatcgctgtcctgttgcttctacattccaggtacaccgtcgaatgcgatggtgcgtctcatcacttgataaaatcgccattcaacaaaaacacactgctgcagtgcaggtttcagacatcagcgataaacagatgaggtgatggtgtgttctgaattctgatgcgatcatggcattcgtacggagatgggtacagttcttacctggctttggcttgctacggtgctgtacttccgggtgctaggcgacgcaagggcggagcggcggatgtgctcgaagagagaatccatggcgcttttgggcttcggctgcggctggccatctcctatcccagtgaacgagaaagctggcaaaggtatgatctgctgatccttccgtctcggagaaaatccagtttaaattcatcgagaaaatatggcgaatccgatttaagtctcggagaaaatccccgtgttactaaggctgtgtttagatccaggggtaaaaagttttagcgggtcacataggatatacggacacacatttgaagtattacacgtagactaacaaattacagattctgtctgtaaactgcgagacgaatttattaagactaattaatccgtcattagcaaaagtttactatagcaccacattgtcagatcatggagcaattagacttaaaagattcgtctcgcaaattagtcgcaatctgtgcaattagttattttttaagcctatatttaatacttcatacaggtgttcaaacgtttaagggtgggatctaaacatggcctaaggatatgtgattggattcatgtgcacaaatcattgctgctagaccattcgtaaatattgatcaattggatccgaccaatcgtactagagaaatgtaagaagcaaagtcattgggaacccaagcattgtattgatctttttttcctttaatctgatttacgaatgttgcaatgaatatggccgttggtaacttgaaactccctccgtttttaaatgtatgtgacacccattgattttttttgcttaaactcaaacgaattaaaaagtaacatcgtcatacgtttgaaaccggagatagtgttattataacttatggggagatagatttcgatcatttttaaatgttaccataagctcatacaggtcataattgttataacttattaactacttcttcctttgatgaattttcttcagaaatgatatcaggatctcccgtgctgcatgatccttctgagcttcgatagaggtgaccaggtggttgtagcatcgacgttcgaactcggagaagatatcctggggaggacagaactcacagtcagccaaatcaatggcccatatctacattactacagcaagcaatgtgaaatgagctaaagaaaaggtaacatcacgggcatactttcaaatcaagcgccgcgtaagtcctctttacttcggaaacagaacttgaatccttcttgccatagttcctctgtgaattgcgcaggaggttattatttctgttcatgtccatactttttcagatagaacaagatggtaacttacatgtagtacttctatttgattgttgtcagcatgaccaagagcctgtactattaaccaggaacacttatgatcttcgatgtcagttccaatcttcaatgtagaataatgtcagctgtcagttgttctcttagttgctgaaaactattttgatctttgtccttaccttgcctatggtgttagggtcagcaaaacagtccaagtagtcatcctgaaaaggcaaagtaaaggtaaaattgactttaaggtttcattaaagaaaaaaaagcatgccatatacctgtatctgaaaatatatgcccatttcaataagtatatcctttagaccactgaagtcttcaagttttgcgccagataagagcaaagcattggccacctatagttgtagaggaaaatgtgaacatcataatgcactaattgaagatacatagattaccaaccaatgtactgcacgccacaattatcatctgaagaacgtaatttctgtctgaaaaagattcatgtagcaactgaggacaggtatgatcagaatttaggatagcctacttcattcttcctcaacatgtttttcctgcaccttttttcaagagtttgccgcaaagaaacccctctatttatctgattcatatgatatcgtgaacttgaagaacttgtacagttctacagcctatattcagatacatgacgttatgacaagtgaaaagtaggactgcatctgagtttcggtcttccagacttacaggaaggtaaaaggagtagtacgctgtcttgtacttaacaatgcgacggtagctacatgacaagagaaaagatagttattgaatacgagcaacatcccaatattatcataagcaaatcaaatattaaataaaagagagggagaggtagatggatctagattatgtacccttcaatactgtattttgcaagatcatctgctccagtatgtgtgctaataagatcaagcatctgccccagagaagtctgcagagctatctgaacaaaatatccattctaaacagtatcaaccaccatcagaaattatgataattgatgtttcagtagtaattcagatgtttgctgacctcgctccatatttctaagatatcaagaaagtaaggcttttctctgaaatacttttttatcattatcaagatgtgacattttagtatgataccatcgtttatacccctgaggccaacctgtaacagaaatataggtggaagaactaagtggcctgttttgttacagcttattaagagaatcagagtatcatgtgaagatgggttgaagaacctcaggtcgccggtaccagcaaatctgatctctcctggtatgtgaatcgtccatgatgtcatcaagtagtagtgcacatgcttgaaactacatgcatttttgatagaaccaaagataattgaaacctgttagtatcggcatgagcagattcaggaataaaaggatgatgagcagatggattgagcaacattacccattctacacaccaaccaagcacacaagcaaggaagaagtcatcttcagtaacctcacttccttgtttcaacagcaggtaactgtctatcactgacagccctcggttcaactttcctttagagaaacagaagattgcattgaaaattttgtgacttgagagttgagacacttgtaaaaggttttttctctttttttttttttcaaaaccgaaactcagctagattcacttgcactctctgaatgtaaagtgtgcactatatttttttaacacttgtccaattttcagatcagagatgttcagacttgcaatgctttagaagatgcctcctcacctccaggtacattgtagtcgatcatctgcccaaagaaaataaagataagaaggaatcaaaacttttagcactgaaactatatagaagattaacttcactttcttcaacaatgaaattatataaaatattagcttcagtttccccgttacaagtgaataatgtatatacagtatacctgagcaagccagcgcctggcttcgtcggtgagctcgcacgagtcgtcgccgacgagatcgtccctgaggcggccgtacgcctgcacgaacctctcgcgggcgtcgacgatgccatgatcagaccgccaccgctgctcctgcctggtgcatttcgccggtgaggcatcgccgcgcaacctcagcttctccttgagctcgcgttccagagcatcgctccggccgtcgtcgtctccaatgcggagcatctcctgcatggacatggttagttcttcttccctttttcacgttgatgtcagtagctgtctcgatcgatctgtggtgatgttgcttgtgatttgcgaggtaagtgaagtctatggaggagctgtatttgtagaggcccccgaagctggatcggttgcttgttgactgcacaagtgcagaacgtggcgggagaagatcgaaccagaaggtaggccttttgctgagctcatgcgagtgttcaattttctgccaaacaggtggttcgggcggtggtagctagctattgctgctcgtggaactggttactgaaatactgaaataccaatgtatttcctacttcgtagctccattggcgtcatcatagcgaaaagaacagcaagctacgttgccgaccccttctgccaccatgagcacgtgatgcatgatgcatcaatcatcaaagtctgcgtgacgcatgttgcaggcctgcctgtgaagaggtacttagaatatcgttatgttgtttcaaaatataaggattttcaagtatttaaattaacagcagttactaaaaggaaatattattttgacttaaccttagtatttactaaacagaaccaaaggatcttcgagcacaaggaaacggcggcccccaatcttatagcaaaaataaaggaagaggcaagaacctggataatggcaggcgcaaggcgacttggagaattcctaccaacttaatcatagcgcttatgtaattttgtacagctcttttttttttgcccctaggggttgtatttttttacgcctatatctaatgaaatagcacaatctcgtgctgattcctttcaaaaaagtatttactaaacaacctaaaatttttcatattttagagtggatgaagtactaagttataatcaatcaagttctgaagtctgaacaagttgcatttatttctcagcttgttattgcctttatcgctcttatcctctgattacagaagaagagaagctaaacacaggttcgatcgatccagcgtttcaggccgtcaggtacgtacgtcggccgaccaggtattatctcatcatcgccaactaaactctacagcacgtacgtaggctcaattctagagaatttttttcatttttattttttaatatttacagaaatattgtaccgcgaaaatatttacagaagtagggcggcagggtgacgtgagggacagacaagttgaaaaaaaactagaaaaatgcatttttagtacggcaaaaattgcatttgtgtaaatattttagatggtataatatttctgtaaatattaaaaaaataaaattgaaaatgaaaaaaaatccaattctagacgccatttgggccaactttcgcgtgcttggctcgatctaaggccgctgcttcacgtgacgcctaacatgcgagcacgctgcgtctctaactacgcgtactgttgcggcaacggcagctgtggttgcctgttgctgcaacagtggcaggtgcggaaaccgctgagattatgagccggttgatcgccggaacatgcatgttcgtccatgaactttgctggatttagcgtagtgtcagtaaagccgggacgtggggttgttgggcctgaatgggagcgaattgaaatgatttgctggatgatttttttttagggaagccatttggcgcgttttattgatatgaaaacacaattacatctttcactagaacgtttagcaagaagctagtggattacaagaactaattgagatgaaagcatatctagctggatgtttgctgtgttagctttaatctgggactgtcactctgaagatgcgcatcagctaattagtagttgatcatgaatgaatgcatgggccggttaggcaggtcgtccagtcctccttccaattagcatggcccaatttggatcggttctctaatttatgatgggcctaatttggctctgaataatattcacaatcaaattgctacggcccagacaagatctaaggaaagacctaatttggtgggagtgtgacattttgaatttaggatctctcattagagttggctatcctaattttggaataagttcactttagatccctctatttgtcgcccagtctgattttcgtccctgaaccgcaaaaccggatacgacccgtcccccaacttacgaaaaccgggcaaacgaggtccctcggcggttttgatatcggttttggctgacgtggcacctacatggctaatttgactcggtgtacatctgacgtggcgcttacgtgacaattcgatcccaaaaataataaaaactggacgtccacgtgtcagttaaaagaaactaaagatggtgggacccacgtgggtcctgcatgtcattctcaccctcctatcttccttctctctccccgcctcccggtacgacacggacacctcggcggcggcggcggtgccgccaacctgcacggctgcacctccaggtacgccactacgcctccagccaggctccagcacggccaccgtgtcctccagcaccttcacctggtccactgccgcctccacgatctcctccctgcccgctgcatccaaccattgacaagatcaaacgacgatctccctcgcagccattcgccaagaaacccgaggaagacgacgaggcgaccatcgcctccggttggcaagaaaccaacgaataagacaatgcgaccggccatcgccgccgttggccaagaagccagaggaagaaggcgacgacgatgacgagacattccctatcactgtcatgtttggcatgtgttctatgtttgtcttcatggcggcaatcctgcagagacggctaatggttgtttatgacctacacaaatcatcgataagtatgtatctttcttcattattactccacatatgagaactaaaatcgctttgccattcaatttctttgattcctaactgttggggttaacatttgctgcagaagcacaagagatggttgatgaagatgagccactgaatccttacggattgataggatcatacaaacaaatcgaatatcctccgcgtacttctcgcccagggagacactcaccgccgagccgtcgccaccgccgccaagggctgccgcctgctgcccgtggccgcacaagacgtgcgtgactcgcgtgtccggaggggcggctggcgggcgccggaccgcgccgggcttcctcgcatcctgctgctgctgcgtgtcagagaggagcatgacggtggcgacgggttgcggtcgcggcggtcctcaagcaccttggtggccttgcgcagcgcgtcgctaatgcagacggcctgcggctgttcctggccctgggcggcggaggcggtcgacaatctggcgcgtcatccggcgcagcggcaggaggcgcttggcggcgccagagaaggcgacgatggcgaggcggtcggtcgggccgtgagaggcgatgacggggcacatccctctcttgagcatctgaagcttgtcgctcatcatcgactcgctgggcaaggtggagccgcggtgaggtccgtcgcgacgcccgatgccactccgccccgcccgtttctgccggccgccgctcgccccgctccatcgaccggatagagagaagggatagagagaagaggggagagagaggatagagagaacagggaggagtgaggatgacgtatggggcccacgtgggtcccaccattttttattattttgtgtaaaactgacatgtgggtcccatgggttttattatttttttgattggattgccacgtcagatgaagaccgagtcaaattagttacgtaggcgccacgtcaaccaaaaccgccgagggacctcgtttgtccggttttcataagttgggggacgagtcgtacccggttttacatctcagggatgaaaatcagactgggcgataaatagagggacctaagtgaacttactcccctaattttacatgtgttttggttcaacgagggtggatgaacgcaatgctaattggcgcagagggttttataactttgactatcaataacttaaaagttatgggactatctatctatatgacgccatatttttcatgaaaaaatagtcagaatatatttacattgtaagtccctaaaattacatatgtaatttcaatgtatttacactgtaagtctcaaaattacatatgtaagttctaaaattacatatgtaaatagtatgtaattatagtgtaattaggaagtaattatataacactaactattttatccctctctcgttacgtgttctcattcgtccggtctcttactttgaccaatgtgcaactgtgtacgagcatgtagcagtacccaacgtaacacatctgctcggtgaagttatcgtatttctggtggttatgtacaagagcacgaatctcggcgtcaatcgtgtgggtcaaagaatcgactgaaatcaaggtaaaattgtggcgccacaaatttagcagaacggaaagttatttagttttaaggcattagaacaacatatgcatatttgccatataaagtactacaataaaagtaaaaaaatattaatttattgcgtatattttaataacaaaatatagacaaagatatattttagaagatatattttaaagaccatgtcattatccaaaacattaagaattattaaaccggagggagtaactattattgattagaataagattaagaataattagtatatgttttattaaaaaaaaaagattggctcatctcatgcttaaaaaaataaaacgtcccatccacccaactaaaacacttcatggattgccatgtccggtccaacaatgctctcaacatggatgaatttatacatctacaaccatacataccattgtactaaaaattttattaccaaattaacattaaaaaacatactcttttcacatactacggaagaccattctattgcatattattagtgtcacatagcaacacaatacatatgtcttcttttacttagccacatgtgtgcatggcggtatcctctcccagttccagaagttacaattttttttgtgaacagtatcagagggcatatgcatgtcattcaatgtagcgcatcgcatcctccaactgtccaacttgccaagcggttgtgtccgaactcaagcagccactgtggaaaggtgtttctacttcttcctcctgtaaatcttcttcagaaacgacttcaaaatatcccgaattgcacggtcagtctcggcgtcgatggtcgaaaccaggtgcttgtaaactcttgactcgtactccaaaaatatgtcctacataagtaataaaggagcaagaaaaacgttcacagttagatgtctcgtttttctgtggttggaaaattcacctttcgagtaacaatcagggtggctaatacagaaccagatgaacttgttaaaagggtcatggcattgcatatcttattatgctttctaactagtctggttagaaagagttgtagtacctgaagatcaagctccctgtaaacgctcttcacttctgctacgcattttgggtcagacttcccgtagttctcctgagaaatcaacaaatttacacgcaaatatatgtgcagttagtacttggaaaaaatctgtggttgctttctccgaagagatcatagcatagaagaaaaaaattgtggtttttcttacatatagtattttcatctcattctcattggcgagttccatagcctgtactattagccaggaacacttgtagtcttcaatgtctgttccaacctgtaccacattgagctcagtaaagcagagcattttaccagcagaaacaaaatgtaaagacaagtttttatgtaagtaccttgccaatcacttctgggtcaccaaagcaatccaagtagtcatcctgagaagtgcatttatgtcagaattaatcatgaagttgaggacaatacaaccatttaggaagtataaacggacctgtatctgaaagtatacgcccatttcgataagtacatttttcagctcaacatagtcactcaatctcgcgccattcaagagtaatgcacatgcaacctgatgaaaaggaaacaaattcagaactactggtctactacaacaaacagttgtcttttcagaactagaggaatttcatcattcatttaactgttcagtttgaagctcagactcaccggcaggtagaacgaatagtatgatgtcttgtacttgacaatgcgacggtacctggcagaatcaatttgggagcaaattaagagaaatcactaatgctattttaacttgagtagagttacttatacactgcatgcatacccctgaattctgtatctggcgagatccttggcgccggtatgagtggtgatgagatccagcatctgccccatggcagtctgcaagcctatctgtcccaaaaaacaagatcaaaactgagcaatatatgccaattaaagatgaaatcctaacaagttttgtgtttgttcaggccctccaattacctcgttccatagctccatgaggtccaggaagtagaacttctccttgaagtatctcttgatgattgcctggacatggcacttgagcagcacaccatcgtttatagcagacatgccaacctgacaaaattgtcaattacacgaacatttttcagttaatcaatcattctcaggacagagattcagatctaccacaaagagaacacagcaagaaatggatcgcaccgttggtagcttgtaccagcagaggttatctcgcctcgtgtaggcgttgtccgtgatgtcatcgagcacaagggctgacgcttgcagctgcagaattcaggcaccaaaattcatgatgaatagtaccaagatctgacagactgacacaacagagttttgtttcgctagtgattgggcagggatgacggtgttgtttacccattcgacgcaccaaccgagcacgcaggcgaggtagaaatcctcgtcgtcaacctcggttccttgtctcagcagcatgtagctgtccaccaccgagagcccacggttcagtttcccttcagaaaaacgtcacgagacatgtcagcttagctttcagggcagcagggccagatcaattctgcatgggcatggatgctagcttgctcacctcctggcacgttgtagtccatcatctgcaacagcaaagaaaacaacagaggacgcattacatttccattttcgtcagaaacaacggagataacaccatataaaagtattttaccaaacaaaccatcaaggttaaaatatttctgcaggtttgattagattgaagtattgaacatagaagttacaaacaaaagaaccattttttcagtggtactagtaccaagaacagttaaagaactcatcttgacaggcataaccatcaatgtgaatttgatgcgtatagagaagccatatgaattaagcaaccaaaaatattttataatgtccccgtctcaaagtataagcatgttcataatagtgctaagtcaatcatttttaactttgactatttaatagcaaaaaaaataaaaaagatcaataatataaaattgatgttactagatttatcattaaacaaactatcataatatacaactctttttatttaaagcatcttacttttatagatgttattggtcaaagtatgtattatttatagttaaaaaactaatgctaaaaaatatacttggggtgaaaaaccccatcatggagtttaaagttaggtttgaaattttgacatttgtccgtgacagaactatgtatgcacagtgtttgggagaaattaagatggagataaagtcagagcacacaaaacgaaaaaaaatcaattaattgagctttagttattttaaacttaaaataaatttatttgatattttaaagcaatttttatataaaaagttttaaaaaaacacactgtttaacagtttgaaaaaaaaatgcaaatgaaaaccgagttaaatctgcatctaaaccttaacgatccatggatcaagcatgatttaatccaaaccacatgtatgttgtacagtaataaacttgcaattaatcgtgttcattaggtatagagagagtaagacgtaccttggcgacccactgcctggtctcctcagtgaagtcgaagttgaaggctcggtcgttgagcagctcactcttgagccgctcgtacgcgcgcacgaacctgtccctcgtctgctcgccctgcccctgctccgccgccgcgccgccccgcccgcgcccgccgccgttcagccggagaagctcccggagctcgtcctccagccccgccgccctcctcaccacctcccccgggctcgccgccagcgccgccaccgccgccgacacccccgacggcaggtgcgacgcgatcgacgccgccagcgcccccatcaaattataccaacagttttccggaaactctgatgcgatcttgttccaactggtgattaactgacgagtttgatcaatctctgcgtggagatgacggaggctgctgctgatgtgtttgggggttttaaccgctggtgatcagtacgtggatagatcgatcgcggcgagcgagtggcgttggctgcaggtgagctagccaacaaaagaaaaattcagctcgcggcgcgcgagaagcatctgcgaccgagtggtgcagcacgcaagaacgagtgttcgttcgtgtcagtgtcagtgatcatagcaaatctgaagtgtatgcggaggatgcatctgtcgtctccgtggacgcagcatatcccggtggcttttagcctcagattttgatgcggccgatcgctacatcagccataaaaaaaaatgcagctcttttttttctgaatattgagaagagactacttcaggttttgatcaggcttcagatttcagagttcaggtgaacgaacgtgtcatcctttctcattctcggctccaatcaatccatgccatgaatttatatttttcaaaattgaattcagttataattctgatcagctagtattttatttcactgtttccatcaaatttcccccttttgtagtatagaacatctctgaataatcctgaacgtttgtagtatataggacttctgaatactgaaccttcaaacatatatgggtgctatatatgactcatagcagcgaagcatctaggtagcgttatccttttcgggcattcgctacatcacataatcaaagcaacaaagttccaaaagcatataataattcaagtacgagcacggcgccaatctttctacgcttggcaaccacttcaaaagtagttagtgtcaccaatctgaatcagaattattcgaatcgtttcatacaaaactactcgagtcaattttgcaatcgttttcagtcattgtaaatgcccggcattgacccgtttttgagcttatactgcgaggtttttttactgttctttaggttgtgcagtaccaaattctaactgttgatctggcatcattcaacggtcagaaatcatccgtacctcatggtactgcacctccccattgaagcggtaccatgggcgggagggtatttctgtccttttgtttgtttcacgagagaaaaaaactcctcaggagagcagcagcgtgacggcaggctcgagggggacggcggtggcgcctggatgagcgacggcggcggtgggcggctggatgcgcgacaacagcggcggggtcgatgtgtgacggcggcggcggggtcgatgcgtgacggcggcggccggctggatgcacgacggcggcggcggcctcgatgggcgacgatggcaacgggctggatgcgcggcggcggcggcggcctcgatgcgcaacgacgtggctacctcgatgcgtgacgtccctggccggcacggatgatgaagagagaccttatttttgttagtccgatcgtaccgtgctaaatcaacggttagattacattggtacctcatgatatctcgtacctcatgataccttctcaaggataggaaagatgctcgtatattgcaagatgaaagtaatagcactacaactgtacaccggatagctcgatcggttatcctgaatcttggaacaaaaacaagtgactatctcactgccacaaaaaactagtctacagtaaaccacaaacaaattgtcgcaagatatccatcgaacatacgagaagagatgctccagagccaatgaaatatgtgaacatttttttttcagatttcagagatcttctaatcagtcatggctactcatccgaaaaaatgttacagtccacagctttattttgtgaacgccatttaatttattttactcggcctgcatagcggagaggtagcgagaatgctagatagatatctggagtcgtcgtcgtcgtcgtcgtcgacttgtcatccatagccattgacgacgacgagctctactagcaatcgatcgatcgagttctcgccgccatgagcaagctcgactactgcttcagcaatgactacatggtgctgcgccctgacagggccggcgcgtacgagctcctgcacctcctcttctcccccaaggtcggccggaacaaggccgtcgactgcttcaccagcaccgagctccacagcttccggcgccgcctctccatcttcctcaacctcctcctgcagctcttcctcctctcgctagtcggccccctcgtcgccgtcctcggcggcgcgctcgagttcgccctcaacctcgccagcaacgtcctccatggtcagtggtgacactagcttgcatggatgtctcggatagttaaccctaattgtgtgttggtgcagggagaatggagtatcctgatcggaagtcggcgtcgtaccgatcaatcaccgggctcatcgacccgagggttgatctggagaggagcatcacgccggcggacagccggtaccacgccgcgctctgcgtcatggcgtccaaggtggcgtacgagaacgaggcgttcatccgcgacgtcgtcacccgccgctggcagatggagttcgtccagttcttcaactgctggaacggtaagcacagcatcaaggacaggttctgtacagctccatgcgcgcaccggcgcacgcacgcaacgtgtttgatgttatgcgtgtggtgtttgttgtattgtgcagagttcgagaacgcgtacacggcgcaggcgttcgtgttctgcgacaaggcggcggacgcggagctggtggtggtggcgttccggggcacgccggcgctggacgtggcgcggtggtgcgccgacgtggacccgtcgtggtacaagatcccgcggctggggcgcgcgcacgcggcgtacacgcacgcgctgggcgcgcagcggaacatcgggtggcccaagtgggtggagcacgtgaagggcaagccgcagcgggtgcacgcctactacgccatccgcgacgccgtgaagcggctgctggaggcgaacggcagggcgagggtgctggtcgccgggcatggctccggcggcgcgctggcggtgctgttcgcgacggtgctggcgtaccacaaggagaaggcggcgctggaccggctcgccggcgtgtacaccttcgggcagccgcgggtcggcgacgccatgctcgccatgttcgccgagaggaacctggacaggccgaggaagaggcacttccggatcacctacggcgacgacccgctgccgcgccttccgcacgagagctccgccgcgcacttcctccacttcggcatccgcctccacttcgacagcttatacaacctcaaggtgaacatccatgcctctcttctctagcttgatcactgtctggttatatttccttcagaaaaacgttcatttttttttctccttctgatcatatattgatcaatgcatgcttttacaagcacgtatataccagcttctgatacattggtactcgaggtattatattcaggcttaaacaggttaattttaacccaatgtagtatagaaaaaaccgatctgttggatcaaaggcaatagatgttcgttttttggtgtaggatacggtaataaaattctaggttagttgatactcatggaagaggattttgatccctcgaggggatattcgctcgttgtttgcatgtcactcaaatggttatgaaaaaatttgaaaaaatttaagaagatgtattaatatgtgatatatcactccacaaacatgcaagtaaaaattcaacttctacatctcgcaacgaaaaaacaaatttgactctgaatatacgttaactagctgcggttcaatttgtttttttcgttacgagatgtagaaattgcatgtttgtggagtgttatatcacatgttaatacaccttcccaattttttccaaatttttttataaccatttaagtgacatgcaaagaacgaggggatatcccctcgagggattaaaacagtttcccgatactcatctataacatatactccttccattttttaatatatatatatatatatatatatatatgacaccgttaacttttatcgtgacatttaactattcattctattaaaaaatatataaatgttatttattttattgtgtcttgttttatcatcaaagaaactctaacattaatttatatttttataaatttacactaaatttttatataagacgaatggtttagacagacaaatcagaaacgggtgatgtactgatgttgaccggttggccccaaagaatgcttggtaaatttagctatacggtaaagaaatttctttcagattttgtgttcattttgagtggtacagcaagcacatcgtatgaacaatccagacagagaatccagtgaaagtgagcttttgttcggttcttatgacactagtacatgcaggcaggcagtcttgatggtggcctgaataatctcattgctgatgtaaggacacaaatttctggttgtatgcttcagatgtagtgatgagtagataaatgaagtgtggtggatagtgattgatgtagggaaattcaacgagaaccactgagccagagttgtacctgaattcagccccaagattcgttatcatcgtctgaatgaaaccaaatgaaaattaaacggaatacaatcttcttctgttctgcagttatctgcaatgtcctgtctgaaggttgtacatttggttgctgttcttcatgaaagatcttgttgctgcatgcatgtccccttccatgacacgatctctgaatattgctcatcaatcgtgctgtacgtgtaacttatgcaggtggtgaaggagttgccgggagatgggagctcgtcgtcgtcggcggcggagttcgcgacgagccgcatcaacgcggcgtgggagctggcccggagcgcgtacctggggtactggaggagcgcctactgccgggaagggtggctgctgatggcggcgagggcggcggcggtggcgctgcctggcctgccgttccacagggtgcaggactacgtcaatgccgtcacgctcgccggctcgaacattcccaaggacatgtgacgatgtatcgagtttctgaatgcaatgctgcagagactgcagctgcaggcatcaaacttggatgagagattgcaactgcaatataatggcagatgacgactgcatcgagcaggctatgggacttgtcacttgtgtaactgtaatgtgacgtacgtactggtagtaattaattacgggtgcaactgtatgttgtcgcgactaattctgcttctactgaataaacatgtagtgataagtgatatgcttgtgagttgtgacttgtaagcatttgatgtactgggacaagtactactagtataactatgagaagataaataattgaagttcttgttttcgtttctcactcattccaacattttttgggtagagccgtagtggtgttgaagttgtgggtatataacttccctcgctagagtttaaatcgtagttttcttgaattttatatgcatcatttatagacgggcttttagcatgattttattaaggttgagacaacatgtgcacacaagtcttctcgtgagcgcaattaattacaatactactatcactactagagaaatgatcttcaatcacggtttctaacccactttcaatcacggttcataacccactataatcccggttatgagagagagacgtgggagagagatatttatttccaatatcaaccgggattaaagatatgatctttagtcccagttggtatcaccaatggagactatagttcgctcgatgcctgacatggcctgacagttattgaaccgggactaaaaatgatttttagttcttgttggtgttaccaaccaggattaaaaataaaaaaaatacctctaaacttataaactgggactaaaagtgctttttagccccggttttttaaagaaccggggctactgtaagaaagcatcgacgagttgttctcatacctctcataaacagcaattctcatatgtagacatgtttgcaaatatgagaaaaaaaaaaccactatgagttcaatagtatcttctctttactgtctcttactataatcttccgtacatataattaattatcctataattattgtaaattagtactaaaatcgacccatatactatagtctaccttctccgatccccaaaactttcttgcttcttcctgctgcccaactttataggaccaaatactcgtattagaggtgatcttctcgatgctatattgcgagtgtgactttggtataaatgctggttcgccatcacgaataacaaggtcaacatgaatggtcttaggccactcatacaacctcgggaggaaaaccttgttctgcatcgacttaagcttggtttttctcatcattgtcgtgtatgttccggtgaacaatgcccgtccatccaaggattccatcttctcccactccattgtctcctcattgagtttgaggacatggacaggcgtaccagtgtagccgacgaggacagccatgagctcaccttgatcagactcgaacaggtagctgtcaacgcgatcatgctcaatcccaaatcccttaagcttatcaacaaccttgaaattatcatcgtggttgcacggatcatacaccgccagcttcccgtcttcaccaagaacgtacagcaggccaccatggagcaccgggttgctgatcggcgaggcctgaagctgtgctccttcctcgacgttgaactccgtcaggtcccatggcccccactcgccgtcctcgtcttgaatcgcgcgggcgagccgcaccacgaagatcgtgttgacgcagtacatcctccggtcggcgtcgtcgtagacgatgaagttgaaccagtagaacggcatctccggtagctcgtcgacggcgccggtgacgagatcggtttgcaggaccagcttaggcaggcacagcgtgaggcgtcgtccgttggagcagcagagattggcttcgggcggcacgttgagcgtgcagccgtcgacctcgaagctcctgtggaagtacgggctgtagtagctggcgttggcgacgccgacgtcggcggagctgaggaggagcggggtgatccacgccgggtagaacggcgacacggcggagcgccagtggcggcacgtcagggcgaagctcgggtggttggaccagccgagccggtcgacgacgagcacgagcatgtcgaacgggagggacgaccagcgatcgtcccgtcgtcgtccctgcgccgccgtcgtcgcatccgcctccatcttttgctttctcgatcgatcgttcaacaccagcgcactttacggcgtgcaggatcggtcgagaattcgagggagagagctctctctctctgttttttttctctctgttatatatgtgttgcatgccgcgtattattatgctgctttcttttcgtgttttcttcggactcttggtcatgagtcatgaacgtgatccactcatccacatcgatcgtgcatacgctagctcccgtcccatcgtatacgtatttcccgtttttgattcgtctgatgcacatggtgatgggtgtagctatatttatggcgtcatatttttcatcaaaaaatagtcggcatatatttacattgtaagtccctaaattatatatgtaattttagtgtatttacaatgtaagtcccaaaattacatatgtatcgatttggtgctaacgtgccacccaaattaagtcatctcgtgttcgcaccctgtccgcgagcagctggtgtcccatacagatttactactcaaagacatgttcaatacacaagacttaaacagctagctatttccagtttttttcatgcgacttctatatatgatgttacaaaaaaaaatatccgtgcattgcaataggtaaaggtatttttttccagtgataccacgctattttttttaagataatggaatgaaacatcctgacatttgctcaaaagagctacagccaattattacaatctagcactctaaaagaagcactctaaaagagtgtagtctaaaataaagcgaaacacaccaaacctgtagcgcccgttccgtcgtggcgcctagcgggaaaattatctcctaaaaaccctaattgcgaaatttgtttctttgcttgttgtctagtgtccgtgccatctcaagatctcaatccccgatctatcgtcgagttcaattccgaatccaaatccctccaaatcaaattcctccgcaaaagtctattttgcctcccccggggttgatgggccgaaattctctcggcccatcttctcctctcccccggccctctcctctccccggcgcgctctctctctctctctctctcgctctctctcccccggcgcgctccctctctccctctctccctcccctcatcacaaacaaccgcccggtgtgctcgctttcgcccgtatcgccgtggttcgctctgccgctcgccgccgccgcacgccgtccattcgcggctgggtcgtcgtctacctcccgccagcccacgtggcagccacgtaggcgccacgtcggcgccagctcagccgaggtcgggacgggccgaccccggtcagtccctccccgtgcgcgcgttccaccgcgagccgtgaggttgcgcgtgggcccgccgcacctgcgtccaccgcgaaccgcgtgcgtgcaccacgtccatcctccaccctagcgccgcgccgcgtgctcccgccgcacggtgagccgagccgctgacaagcgggtcccacccgggaccgcgcgtggtgagcccggtccaccggactctctctccttcctccgcgcgcgcgcgtcttgggccgctctgggccgcctttttgggccggccggcccgttaagctcggccgagctgccctttctctcgggccgcgccctagccgcccgagggaagtttatattccctccctctccctttttcttctctttatctcttccaaaaaggatttaattaaatcattttcctttagaccaaaaatccaataatcttagaaattcaatatcttccccaccgtaaatccgtttgactccgttcaacttccaaaactccccaaatctcgagatctacctaatggcacgcttagaggtcagtaatagggctttattttcgccgtttgttgagttgtcccgtttcgcgtgtagttccggagcccgaagacccgcagtgcgaggatttcgaggatcaagctccagatctcgagcaaggcaagccacctttgaacatcttgagcctatatttgaatttaattatgttgcttgaaaaatattatgcattgataggatcgcacttaatctgttgtcccgtctgcaaggcagattggcggacctacctagtttgttgcatttgatccttcctttgataattgttataccatgtccccttgtaaccatccagttgcgtctcgatattcgtgcacccagtgcgagtatcgacggacgccttcaaacttaaaatctgaaaaacaacttgggtaaaacttgggttttacaagagacttggaaaacccgacacctgggtcggtgcttgcgaactaaatgaatttccaaaaccgcggaccggggaacgtaccgggtgtacggtttcccgctcttgcacttaaggaccgtttccttggaatttcatccaaacataagacaagtacgaccacatgggtggaatgggacacccctggctgagtaactagcttatcaggggagccttgatgccgagagacatgtggattcgccggggtggtgtcggggaggacccctgggcttcctggcacagtatggtctgggacctaacctgctgttggtctgggacccctctcgtcggcatatggtaaacctgtgtcggctttggaaatgccttgtcatgaaagcttggaggtctcccgacgtggctgatccccacgggctgggtgatccgggttagtaatgtcgtgtgggtaaagtgtaccccctctgcagaggttaacaaactgttcgaacagccgtgcccacggtcatgggcggatgtgaggtgattcctagcgtagttttgtttgactactgcttgtgaaattgctgttgtggaaaggggttcgatgtttgaaagattcagcagctgatgggatcagctaggcccgggtggccgtttgaaaagttgttggcccgggtggccgtttgaaaagctgttggccgggtgccaaccttgtttcaattctaaagactgatacatttgcacatactccgaccggacgagacgctctgtctcatccgagtcgtttgagaagcactcacttagttgttttcagaaaagagttcaaataaaatcaattgcaaaaacaacagccttcccttgaagcctgcattaaacacttaattcccttggcttgctgagtactcccgtactcacccttgctctatataaataatcccccccagttgctgaagaagatgaagcggatccggctgatgaggagttcttccaggagcaagccggctacgatgagttttagggtttcggcctagttcccaagtcgcgcctgtaatgattggtccaagtcctggcttccgctttccttttgtaatgcagttgtgagctcgggatctgtccgcagcccaacatgactgtacttctactctataataaagagacttctgttgctgtgatattctgtctccctgtgataccagcactatttcctgggactggtatcgattaacaggttaatttggagcgtcacgggctagttccggtcggtactagttcggggcgtgacaagagatggtatcagagcacaagcttggccctaggacgaaacccgacgcctaggacgaccctaaggatactaagttcaaaactacttgcgaaaagctaaggtttcttttgttttctttattttcaatagtttgtttctaaaaatggttactgatcctttctccctttttcaaaattgtagatggcagtgaacgccagcttcagctcccacggttttggtgagggtcaccacgtcgctcagcttcgtgacctcgcccgtttccttggcttctcgtgtcccgagtacacggggtactccgtggaccgtgttccccctcactgtgagctctctgtgtacctttacccccgtggaggtatacacggagctggccttcgtccacaccacttcaccgtggccaggcccactctccagatcgcgtaccaggacctctcctggactgcgcttcgtcgcctggcccacgactacagccaccgtctcgggggctccgccttccggcagcttccacgccttccttctggccactcagacgccaggtacccttgtccgtacagcgagtctcagccagtgctgactcgcatggttgagctttcggaggctcaggccactcagcacgacctactcctggaggcttaccgctcccttgcccgccgctacgccgccctggaggcccgtctggccgaggagggtgtcacttcagttgacactgtctcttgggactcaggccgcctctgccacgccagccacctgtcctcccacagctcccgcggctctgcccgcactcccagtggcccgcgctcccccagctcgcgtgcgccgtactcaccagtgtactccccctacccacacccagttagcccttcctacacccccggacacaccccagttgcttcctcccgccgtggcccacgctttatccgcaccgcgcggaagcgtgttgttggttcttccaccgtgttccgttttcactacccagctcccccaccgccagcggcccgtgctgctgccggccctcgacaggttccgccggtcccttcgcgtcagccgatcgacgtttcttcgactgaggagccgaccacagggggcagccaggccgacgaggagtagaggaggcagtcttcagcagccgtccgtgtgttaggcccttttgttccaccgccaactcttttggagtcgtggcgaggtagtgcgtgcgtgtgtttgttgtgggtgttgtttggtagtctggttctcctaggtggtgtgcgcgcagtcaagctcggcgtagctctgtgacttgtccacacccgttgtatcaggtgtctttatgatttgaaaaatccagtttatgcctagtgtgtgctatctgagttgctaattactttgctccttgccctcctaagtgctatctgactcttaccccgccctcttctgggagtttagatggctagccgtccccgccgtgcagctcgtgcaccagcccgctttggttttgaaaatggtagagttgagccagaagaaaatcatgagtcagctaatgagcagtctcaccacagcaaccgttcgcaccgtactgcttcccgcaacgcagaagttgagcaaccccgccgcagcagccgctcgcatcgcacagtttcccgtaatgcagagatggaacagtctcaccgctctcaccgcactgccagtcacaattctggagaagaacgcctcccttccccacctcatgtggaaaacaacatgcaacacttaatggcagttcagacacaaatcttgcaaggattagccgcagccgtagccggttttcagcataatgcgcatggaaatggccaccctcacatgagcaacaatagatccaagctgacagattttctgaggtcacgtccgccagagttctctcagaccgtcgagcccgttgaggctgacgattggctgaaagatgttgatagaaaactcaacttagtgcagtgtactccggtcgagaagacgctctacgcctctcaccagctaagaggacctgctgcagattggtgggagaattactgcaatgcacaccctgaacccactaacattgcttgggatgagtttgctacggctttccgtgcagctcatgtgcctgaaagcactattgacatgaagaaagaagaattcaacagacttaagcaaggcaacagcagtgtcaatgagtacctaagtatgttcaacaagttggctcggtacgcccctgaggaagtgggcacagacaagaagaagatcaggaaattcttgaaaggaatcgcagttggaatgagactccagttgcttgctcatgatttccccacttttcaacatatgatcaacaaggcgcttctacttgaggatgccagaaaagaggctaccgaagaatacaagaaacgcaagtctaaccatcagggaaattcttcccgaggcgcaccttgccctcgctacggtcaacccatgcaataccaccagtcggtcactcaggctaaccgccagccaggctacgcccctcgtcctcagatgaaccgtccggcacctcagccacagcagcgtgcccctagtggcaatactgcgccaaacagtgttacctctttcaagtcaccacagggaccgtcagcagttcagtgtttccggtgcaaccagatgggtcactatgccagacagtgccctcagaatcctaccaacaccagcttaggtcatgctaatggcagcactgccagaactcctactccagcggcagctcagtctcgtcctagctctcaggcaagtggacaaggttctcgtgcatccaacaactttggtcgaggccgggtgaaccacattcaagctgagaccgctcaggatgctccagacgttgtgatgggtatgttctctgtcaactccatacccgcaatagttctgtttgattcgggagcttcccattctttcatatcacaagcttttgtgaaaagaaatggttggaaaacccaaaatttacgtgtaccaatgatagtacattcccctgggaggaatataagggcaactcaagtatgcccggaagttaaccttagaattgaggaagttgacttcctagccaaaccgatagtcctagactcgcaaagcttggacatcatcctagggatggattggttggctaagcacaaaggacagatagattgtgccgaaaagaccatcaccttgcaaggacctggaggaaagcaagtccgctttacctctaacacccctaccgcaagtcggtctatcctaacctgtttacaagtcacctccttggagtcggtgcccatagtctgtgaatatcccgacgtattcccagaaaaattaacaagtatgccaccagaccgagagattgagttcgccatagaactagcgccaagcaccgcaccaattgcaaaaaggccctaccgaatggcagctaatgagttagcagaagttaaaagacaaatcgaagaattagagagtaaaggttatgtgcgacctagctcatccccttggggagccccagtgcttctggttaagaaaaaggatggctctgagagaatggtaatcgactatagagccctgaatgaagtaactataaagaacaagtacccgttgccacggattgacgatttgttcgatcaacttaaaggagcaagagttttctcaaaaattgacttaagatcaggttaccaccaatttaaaatcagatctgaagatattccgaagaccgctttctcaacgcgttatggtctatacgagttcacagtaatgtccttcggactcactaatgctccagcgttcttcatgaacttaatgaacaaaatctttatggaatacctggaccagtttgtcgtggtgttcatcgatgacatcctgatatactccaagaatgaggaagaacatgctgaacacctgcggctgataatggaaaagctcagagatcatcaactattcgctaaattctcgaaatgcaaattctggttagaccgagtagcatttctcggacacgtgatctcctccaatggtgtcgaagtagatcccagcaaggttgaagctgtacttgcttggaacccgcccaagaatgtgtcagagatccgcagcttccttggcttagctggatattatcgaagattcattgaaggattctctaagctagccagacctatgtccgagctgttaaagaagggcaagaaatttcaatggtctgcagcctgtgaacacagctttcaagaaatgaagaaaaggttgaccactgccccagttctcaccttgccagatatccgaaaagatttcgagatcttctgtgatgcatcaagacaaggcgtaggatgtgtcttaatgcaagaacgaaaggttgtggcctatgcatccaggcagctcaggcctcatgaagtcaattatcccacccatgatctcgagttggcagccgtggttcatgctcttaagatctggaggcactatttaatcgggaacagatgcgaagtatacaccgaccacaaaagtcttaagtatatcttcacacagaccgagttaaatatgagacagagaagatggttggaactaatcgaagattacgatcttggaatccattatcatcccggtaaagctaatgtggtcgctgatgcgctaagtcgcaaggcctattgcaatgtagctcaaatacggcctgaccaagatcgcctgtgcagagaattggagaagttgaggctgaccatggtacagtcaggtgtccctgccagcttgacagtatagcctaccctagagtcgcaaatccgggaggctcagaaagacgacgaagggatacaagagttaataaaaagaatacaggagaagaaagacaccaatttctccatggacgaccaaggcacagtttgatgcggtccacgcatctgtgtaccggccaggaaggaattaagagatctcatcctaaaggaagctcatgagtccgcctactccattcatccaggaagtacgaagatgtaccaagatatcaaggcatacttctggtgggctggaatgaagcgagatgtcgcagaatacgtagccttgtgtgacatttgccaaagagtcaaggcagagcaccagaggccagctggtatgctacagcccctaccaattcccgagtggaaatgggaagaaatcggaatggatttcatcaccgggttgccaagaacccctagcgggtacgactccatctgggtaatcgtggaccgactcacgaaatcggctcatttcgtgccagtgaaaaccacctatgatggaaagaaactagcagaactctacatgacccatgtcgtatgtagatttggctgtcccaagaagattgtgtcagaccgaggcactcagttcacctcaaggttctggaagcagttgcatgaagctctcggaaccgatctaaattttagtacggcctaccatccgcagaccgatggtcagacagaaagggtaaaccaaatcctagaagacatgctacgtgcgtgtgccctggatttcgaaggcacttgggatcgttgtttgccgtatgctgagttctcatacaacaacagttatcaggccagcattcagatgtcgccgaatgaggctatgttcggaagaaagtgccgcactcccttgtgctggaatgaggcgggcgaagcactagtattcggtcctgacatactcaagacagcagaagaacaagttaagctaatccgagaacgtttaaagacagcgcagaaccgtcagaaaaatttggctgacaatcggagacgtgaccttgagttcgaaaaaggagatcatgtgtacctgcgggtatcacccctccgtggtatgaagaggtttgggatgtccggcaagttagcaccccgctacatcggcccctacctcataaccgccagacgtggcgaagtggcttatcagcttgagctacctgaaggtctcgcagatgtgcacaacgtgttccacgtatcccagctaaagaaatgtcttcgagttccagaagagcaagttcccctgggtaatatcgtactggaaaagaatctgacctacaaggaaagaccgatcaaggttcttgaagaggcagaacgtcagactcgaaggaagaccatcaagttctacaaagtccaatggagcaatcattctgaagatgaggcaacctgggagcgagaagatcttctccgcgccgagtttccggagctgctcccttaggtgctgaatctcggggtcgagattcttgttaggggggttggtctgtagcgcccgttccgtcgtggcgcctagcgggaaaattatctcctaaaaaccctaattgcgaaatttgtttctttgcttgttgtctagtgtctgtgccatctcaagatctcaatccccgatctatcgtcgagttcaattccgaatccaaatccctccaaatcaaattcctccgcaaaagtctattttgcctcccccgtggttgatgggccgaaattctctcggcccatcttctcctctcccccggccctgtcctctccccggcgctctctctctctctctctctctctctctctctctctcgctctctctcccccggcgcgctccctctctccctccgctccgccccgcgccgcgcgcgcgagcgcgcgtcgccgcgccgagtgcccctccctcgcgcgccgcgcgcaagcgcgagagccgcgccctgcgcctctccgctctgcccgcgtgcgtgcgcgtgagccgcccgcgccgagccgaatcttccctctccgctccctcgctgccgctccccgcgctcgttcgcgcgcgcgcccgcgtggttgccgcccgtgtcgcgtcgcgtctgcgccacccggtcccgctgccctgccgcctgcagccgcgcaaccgcgtggccccgcgagccagcgcgcgtgcccgagccgcgccactccatccgccgcgcctcccgttgcaagccgcgcgcacgtgccgtggtggccgaccgcccggtcgccgccgtcgtcagcctctgcacgcgcctgtcgccagtgtcgccgctctgctccaaaccgccccgccgtcatcgccgtcgtcaccgcctcggccccgccactcccgcgctagcctccaagggacggaggcagagcctccctcctccctctgccgcgtcgcccccgctcacctcctcctttttcccgaatcggcaaaggggcaagccccctttctccccctccttttcccctttttcctcctcgccggcgtcatcttccctgtcgccgctttggccgcgaccgccgagcgccagctcgcgcccttgaccgcgcaagtcggttcccaaaccgacattgccgcccatttaaaccccagcctcccctttccctccctcttccattcgcctccgtgccattgccgccgcccccgtgctctgtctcgcctccgccgtccttcgccgagcgccgggagaaccggtgcgttcgaggacgcggaaggggacttcggccgcgccctcttcttcctcttccccggcccgaggccggagagattactcccgcgccgtcggcctctcgtcacagcgccccgacccgcacggtagtgcctctctccgttcttcctcctcgctccatctccccccttagttttcggtagtagctcgagtagcccccccgtagctagccggcaccgccccgacccttgccgtcgctcgccgagtgctcgccgccatcgccgctcgagctccgtagcacccgctcgtcgccgacctggctcggcgtagctccgcccaatccgacgctagcatcggattcccgtggccgcgtagatgctctcgccgccgggaattggcccctcgtgacctcgtcgccgttttccccttttcccgccaccggttgccgccgccacgattcgccgccgtcaagctccctccggcgaatccgagccgttggctcgtctcccctcatcacgaacaaccgcccggtgtgctcgctttcgcccgtatcgccgtggttcgctctgccgctcgcc

SEQ ID NO: 9062 - DNA, 70157 bp, Oryza sativa
  unsure (1)..(70157): unsure at all n locations
gcactacctccacagacggcgccgacgccaacagtaccgcctcctggattggtgagccgcttccgtccacgggagctatccatgccatcggcgcagttaaacacgacgaacgccacgatcgctacggtcgccacgaagaccagcgcaatgccgacaacactcctgctcatgtcgggcggggagccgccgccgcctccgccggagaagcctcggccaaggccggcgtccacggcgagcctaaccattgtgatatatcgatcgatcgagctgccgcttgttggctgtgatatatcgatcgagcccccggctgcttgttggcgagatcgttcgggtggtaattatagggttggagagagcgagatacctggctacactagcttattttctgtgacacggtgcatcgcatctggccggttgcaatgtcttccatagagtggtgagagctactccctccgtctcacaatattcccactatatgcataatataccttttatacactagatgtgatgcattcgaccctgtccagattcgttgtcataagatgcgtcacatataggacagaatgacttacattgtagaacggagagagtacgaaatcgctgtgttgcacctgtagcatgtaggtgcgccgcaggcagggttaaacctttcggtttagccgatttgatcggactcaccggaatgccaaaattttagaaatttccaaaattttgaataaaatttagttgaacttgaataaatatcaccaaaattcacggaaaaaattaaaaaaaaataaaaatttcaaccaaaataatatagtatcggaggggtctgaaatgaccgcggaaatttcgttccggaatttccaaccctatgtgctctctctctctctccataaaaaaccaaattctattaatgtatctagataatgtgtctagatttatctttaggatttagtttttttatggttcagaatggatacactacgttatcttcttcttcttctttttcgacaacaatatatgcgttacgtgtattagagataggttgatcgatcggttttcatatatatctaaaccaatcgaaggatgactgattcgatcgttgtccatgtagaattaactaaggcaattgttcccacggcggctagttttatatcagcttaaatgcttaatcatgtgtagtgcgcgtccttgactgtacgccaagtcgccaacgtcatgaccactgtggagattatgggtaccccatacccacacggcatggttatccgactagttataggggataacttatatctatgtaatatgtaacagatcatggcttgggtgttacgtttccttgtatattacggaacagcctaaagtccagatttaggaaaccgataccgtattggttaaggtttctatcttgtaatcctgccccccatcctatataaggtgggcaggaggccctctagggggcagatgagacaacctgatcgtcagatcaatacacactcggcggattcaaatccccaaacaggagtagggtattacctctcattgagagggcctgaacctgtctaaatcctttgtctccgcatccatccacttttagttctcgtgcgctacccccttttattattgccgaaatcatgtttcgacagttggcgcgccaggtaggggttgcgtcgagtttcttatcaacaagcgcgatggaatcaatttcatgagtcgccgacttcgttttcgctttgggagttttcacttcctttccgtcgaccacttcttcaagctcctcttctctgacttgatccaaatcagtcagggggaaactcaatctgatttttatcattatttatcgtactgatttttaatcccagattaatctcttgctattttttgttgttgttcgcatataattacgcggcactattgaggcgattgatgctggtcatggactcgaggcgtctcagctttccggtcgatcggccgcgagtccactctgccggcttgtcttcgccaccgccattgctgataacaacaacgacttcaccgccggcctgcctccgtcgccgccgattggtgcctccgcctacacggctggcctattatgccgccgctgttgggcgtctacgacttcaccgccggcctgcctccgtcgccgccgattggtgcctccgcctacacggctggcctattatgccgccgctgttgggcgtctacgacttcaccgccggcctgcctccgtcgccgccgagtggtgcctccgcctacacggctggcctattatgctgctgctgttgggcgtctacgacttcaccgccggcctgcctccgttgccgccgattggtgcctccgcctacacggccggcctattatgccgccgctgttgggcgtctacgacttcaccgccggcttgcctccgtcgccgccgagtggtgcctccgcctacacggctggcctattatgccgccgctgttgggcgtctacgacttcaccaccggcctgcctccgtcgccgccgactggtgtccccgcctatacggtcggttggtcacaccaccgttgatgggcatcgtcatcttcaccgccggcctgcctccgtcgccgccgactggtgcctccgcctacacggctggcctattatgccgccgctgttgggcgtcttcgctttcaccgtcgaccgccttcgtcgccgccgactggtgtcttcattgttattgatggacaactttgttcccacattggccacttctgccatcaccaaggggaatattacaaagctaagtcatcatttattttattctttatatgatatttttccttttcctctgcctcactacaccaattggtcttccattgagtagtgagtcgggggctacagatgttatatcatattttttataatatttatcttgattgcttgcgacataatctgagtacaaaagtacctatcgagttatggagttctatcttcctatgctttccgtttggtttgccaatggatggctgcctttgggccgattcctagcacccgggggctcgttggatggaccgagtaacgcaaggtgctaagtattattcggaataaatcaaaagcatagagataagataaattcattttctgctcttaataattgcaaaagtacccgagtagtaaattctgattcgtgaaactttgttccattaatggcgaactcatgtcactcatatgcatgtctgggaagtgcctaggccgactcccggtgcttgggggctatgactagtcggacagagcgtttaaacgtaatgaatcatctgctcggggaaatcaaaattgacaagaggagaaatacatatttataaatattttaaaatacttgattttttctcgagtattatatttatatcagatactactcatcctatatgtttgttctgcaggatccagatccagatatgcataaaagggattcatggctttaagcttacctcttacgctccaggaatggatcagtcagaacatcaccaccggctcgcctcgaccgccgctgactggtgtttccgcctgcacggctggcctattatgccgccgttgttgggcgtctacgtcttcaccgaccggcttgccttcgccgccgccgactggtgtttccgcctgcacggctggcctattatgccgccgctgttgggcgcctacgtcttcaccgaccggctcgcctttgccgccgccgactggtgtttccgcctgcacggctggcctttatgccgccgttgttgggcgtctacgtcttcaccgaccggcttgccttcgccgctgccgattggtgcttccgcctgcacagctggcctttatgccgccgttgttgggcgtctacgtcttcaccgaccggccgcctcgtccgccgccgactggtgcttccgcctgcacggctggcctttatgccgccgttgttgggcgtctacgtcttcaccgaccggccgcctcgtccgccgccgactggtgcttccgcctgcacggctggcctattatgccgccgttgttgggcgcctacgtcttcaccgaccggcttgccttcgtcgccgccgaccgatgtcctcgcctgcacggctggcctttatgccgccgttgttggacgtctacgtcttcaccgaccggcttgccttcgtcgccgccgaccgatgtcctcgcctgcacggctggcctttatgccgccgttgttgggcgtctacgtcttcaccgaccggcttgcctttgtcgccgccgaccgatgtcctcgcctgcacggctggcctttatgccgccgttgttgggcgtctacgtcttcaccgaccggcttgccttcgccgccgccgactggtgtttccgcctgcacggctggcctttatgccgccgttgttgggcgtctacgtcttcaccgaccggccgccgcatccgccgctgactggtgtcaccgcctgcacggctggcctgttataacgccaactgatgctatcttcttcacggctggctacatcgctgtcactactaataggcatcagtatcttcaacacaagctgcctacgtttgccatggctgccgactggtttcttcacttccatggctgcatgattctgccagtgttgattggccttaccatcttcatcgccggtcatctcgtctgctgctgactagtgccctcgcctctacatctggtttatacagctaccactactgatggacatcatcgtcttccgccgccgactcgtgttatgccgccgccgaccggtgcttttatcttcacaactgcgtcttcactaccggttcacttcatcacggcaacacaactttgtcatcatggtggagcgacttcatctttattatcttcggaaccagcaaactctattgctgctacttcacaagttttgctacatcaccaaccatgacgttgttgtgaatctcgacatctcggcatgcgatgccgtgttattttactacaacaagtggctctccaatattcaggatttctacttggacatcttcaacacatatcttcaatcaagcaatgactactcgacgacaagaagctataattctcgactctatgttcagttgtttcccaactaaccaaagagtcgggggctacacaaatataaggctcaaaatttgacaaattttatataagccaatgagtcaactccaggagtcattatcttcatctttgcttcggaacagacattctacttcaacaacttcaaatatttcggtttagacgagttgggcaacaacatcaactctcctccaagtgaagcatctacaacagctataacattaatttgatggattattgtcactgacatcatcaccagcacctctgcttcatcgaccctgacatctctgctgttgctaatggatgattatgttttcgctgacttattatttcaccttcacggttgacctactatgcaaatgctgatgagcgtctttgtcattatcattggttgctacactgctattggctggatcaccgacatcgtcatcttcatcatgtcggttgcgtttgttgtcgtcaactacacaactttatcgctgagcgccttcatattcattgctggctgacctgactgccgccgactggtttcttcgcctccatggctatgcgacttcagtacttttgattggtatcactatcttcactaccaccaatatttttgccacctctggtgggcaatgttctctctatattggttgtcttgtctctatgccaactgcgtcagctaccatcaatgaacaattgtgactacgtgctcaggggcttactagctcaaatacaagtattatatcttcaatttggacttgctccggatacatgcaacatgaattcatgatcatgggtctattttatatgctcaaagactggactatttattattccccgtaagggttatcaactgaatacttgcgccagtcgggattcaattgttacatctattttggagtatcccataagggataaccactcagatcagaagctattcatatgagctacgcttggtctatattacccggaagatttattactcgggagcatgttacatgcgtcatcctttaaagggtgtcgaaggcatattttttggcctaggcctaatatgtctgcagcccatattttcaggtgtggcctgtcacgttcttttagggacttaggcactttttgcttaggccaaagtgcgcgtgatcaagtgcccaataccttaaaatccttttataccgcagttacttaactttttaggagttggtacaatgcatcttaaaaggtgtcaaacagtaaagctttatatagctgtcccgctgacttttttatatataagtcaaggtgctgtttgggtttttaagcaattgattggatacaatatcattgcttttcgccacgtaagtgtgcatttttattgaccaatattatggcttaggctgattatatattgtggtcattttctaggcggttggtaaatcctttatgagtttatttactcggattttacaccacatatgccatatatttccaggtgtggtgaaaccatgtgtcttctagggactaaagcacatctgttaaagcagtgtgcgcatggcgtatgcccaatactttggaaatttctttattcacaatatacaagcttctttatagctattttgctatatcactcatcatattttacaaagcagttggtatatcactcggatcatgttatttggaggattcacaccgcatatgctatatattgatatcaagtcacttggttgattacgattatcaaaaccactcggttggttggattatttattccttgactatatgcttggtttgttcaattaaccacattgtcgggggctacacctattaggtgcatctagtcggtgcacctgactttattttccagccctccacagtcttcagatttggtaaaagtactcgggagaccatgacgaagatgattgaagcactcggccttggagtaatctagttcgagagaaggttatctttccgactgtgaaggtctcaggggctactgtggagattatgggtaccccatacccacacggcatggttatccgactagttataggggataacttatatctatgtaatatgtaacagatcatggcttgggtgttacgtttccttgtatattacggaacagcctaaagtccagatttaggaaaccgataccgtattggttaaggtttctatcttgtaatcctgccccccatcctatataaggtgggcaggaggccctctagggggcagatgagacaacctgatcgtcagatcaatacacacacggcggattcaaatccccaaacaggagtagggtattacctctcattgagagggcctccctagtattttaatatatgacgccgttgactttttgataaacgtttgactttccgtcttatttaaaaaaattatgtaattataatttattttattgtgatttgatttatcatcaaatgttctttaagcatgacataagtatttttatatttgcataaaaattttgaataagacgcgttatcaaacgttgattaaaaagtcaacggcgtcatacattaaaatacggagggaatacttcctccatttcacagtgtaacttattatagtatttctcatatttatattaatattaatgaaattagatatatattgtgaaacgggggagtagctcgatatctagtgaaattatgcttcgttggccgatcgggacaaagtacatccaaaacatgatatgcacttaatttgttaaatatatactattaattatacactgtgttcatagaaattggcttgaccacagtgttaattaaccggccatcgccggcggcgagacgtctggatcattacggccaaaagcacggagccacgcacacccatccgctgatgattcgccaggacggagtcgttaggcggttaggcccagccgcccagccggctgtgtttaggccatgtttagttccacccaaaatcctaaccttctgttacgtcacatcacatcgaaaactttcctacacatataaactatcaactttttctctaaactactaactttctcacagcttcataacttctccaccatctaaacacacccttaattagttcacataaaaaattgaaagtttggttgaaattgaaatgatgtgatggaaaagttggtagtttagaaaaaaactttgaagtaaacacggtgcaaattaaaatgctcgatcatatcgccgcttgattctcaccacttgcttgtacgccaatccatgattgacaacgttgctgtttaacattgaccttgtctcggtcacttttgaaaattaacctgacaaagtacctttacccaataaataatttgcaactctgttcttacattgtccacgtactccctccgtcccataagggattttgtagcgcccgttccgtcgtggcgcctagcggaaaaattatctcctaaaaatcctaattgcgaaatttgtttcttcgcttgtcgtctagtgtccgtgccgtctcaagatctcaaatccccgatctatcgtcgagttcaattccgaatccaaatccttccaaatcaaattcctccgcaaaagtctagtttgcctcccccagggtcgatgggccgaatctcgctcggcccatctctccctccctccccggctctctctctctctctctctctctcgctccccctccgctccgcgccgcccgcgcgccgcgcgcgtgcgcgtgagccgctcgcgccgagcgccccctttcccctcgctctccttctccccatccctggcaagctccccgcccgcgaagccggctcccgcgcgccgttgttcgcgcgcgcgcccacgtggttccccgcccgcgccgagtcgagccctcgctgctgctccccgcgcgtcgttcgcgcgcgcgcccgcgtggtcctcacccgcgtcgcgtctgcgccgcccggccccgctgccctgccgcgcttgctgccgcgtagccgctcggccccgcagccagtgcgcgtgcccgagccacgccactccatccgccgcgcctcccgttgcgacccgcgcgcgcgtgccgtggtggccgaccgcccggtcgcctccgccgtcagcccatgcacgcacctgtcgcccgtgtcgtcgcgccgctccaaaccgccccgccgtcatcgccgtcgtcatcgcctcggccccgtcactcccgcgcaagccgccaagggacggaggcagagcctccctcctccctctgccgcgacgccccgctccctcctccttttcccgaagaggcaaggggacaagcccctttctccccctccttttcccccttttcctcccgccggcgtcatcctccctccctcctgtcgccgttttggccgctagccggagcgccagctcgcgccttgaccgccaaagtcggtttccaaaccgacattgccgccccctataaacccgagctccctccctttttcctttcctctcccattcgcctccgcgccattgccgccgcctcccgtgctctgttcgccgtcgccgttcgtcgttgcgcgtgtcggaagagccggcacgagcaaggacgcggaaggggactctgggcgcaccctcttcttcctcttcctcggcccgaggccggagagatcactcccgcgccgtcggcctctcgtcactgcgcccctcctcatctcggtagtgcctctctccgttctccctcctcgctccatcttccccccttagttttcggtggtagcatgagtagcctccccgtagctagccggcgccgccccgaccgttgccgtcgctcgccgtgtgctcgccgccgtcgccgctcgagctccgtagcacccgctcgtcgccagcctcgctcggcgtagctccgcccaatccgacgctagcatcggattcccatggccgcgtggatgctctcaccgccgggaatcgacccctcgtgacctcgtcgccgtttccctcttccctccccgccagttgccgccgccgcgattcgccgccgtcaagctccctccggcgaatccgagccgttggctcgtctcccctcgtcacgtgcaaccacccggtgtgctcgcttttgcctgtatcgccgtgggttgctccgtcgctcgccgctgtcgaccgccgtccgttccggccggcgtcgtcgtctacctcccgccggcccgcgtggcagccacgtaggcgccacgtcggcgccagcacagccaaggccgggtcgagtcgaccccggtcagtcccttcccgtgcgcgcgttccaccgcgagccgtgaggctgcgcgtgggcccgccgcatccgcgtccaccgcgaaccgcgcgcgtgcaccgcgtccctcccccaccctagcgccgcgccgcgtgctccctccgcacggtgagccgagccgctgacaagcgggtcccacccgggactgcgcgtggtgagcccggtccaccggccctctctctcctcccctcccgcgcgcgcgcttgggccatcttgggccggccggcccatttagctcggccggaccgccccatctctctcgggccgcgccctagccgcccgaggaaaagtctaatttccatccctcttttctttcttttcttttctttttcaaaaaggatttaattaaatccttttcctttagaccaaaaatccaataatcttagaaattcaatatcttcccaaccgtaaatccgttcgactccgttcaacttccaaaattcctcaaatctcgagatctatctaatggcacgcttagaggtcattaatagggctttattttcgccgtttgttgagttgtcccgtttcgcgtgtagtctcggagcccgaagacccgcagtgcgaggattgcgaggatcaagctccagatctcgagcaaggcaagccacctttgaacatcttgagcctatatttgaaatttaattatgttgcttgaaaaatattatgcattgataggatcgcactttttctgtcgtcccgtctgcaaggcagattggcggacccacctagtttgttgcatttgatccttcctttgttaattgttataccttgtccccttgtaaccatctagttgcgtctcgatattcgtgcaccctgtgcgagtatcgacggacgccttcaaacttaaaaatctgaataacaacttgggtaaaacttgggttttacaaaagatttggaaaacccgacacctgggtcggtgcttgcgaactaaatgaatttccaaaaccgcgggccggggaacgtaccgggtgtacggtttcccgctctcgcacttaaggaccgatttccttggaatttcatccaaacataagacaagtacgaccacatgggtggaatgggacacccctggctgagtaactagcttatcaggggagccttgatgccgagagacatgtggattcgccggggtggtgtcggggaggacccctgggcttcctggcacagtatggtctgggacctaacctgttgttggtctgggacccctctcgtcggcatatggtaaacctgtgtcggctttggaaatgccttgtcatgaaagcttggaggtctcccgacgtggctgatccccacgggctgggtgatccgggttagtaatgtcgtgtgggtaaagtgtaccccctctgcagaggttaacaaactgttcgaacagccgtgcccacggtcatgggcggatgtgaggtgattcctagcgtagttttgtttgactactgcttgtgaaattgctgttgtggataggggttcgatgtttgaaaaatctgcagctgatgggatcagctaggcccgggtggccgtttgaaagttgttggcccgggtggccgtttgaaaagctgttggccgggtgccaaccttgattcaattctaaagactgatacattgcacaaactccgaccggacgagacgcactgtctcaaccgtgtcgtttgagaagcactcacctagttgtttttagaaaagagttcaaataaaatcaattgcaaaaacaacagcctttcttcgaagcctgcattaaacacttatttcccatggcttgctgagtactcccgtactcacccttgctctatataaatatccccccctcagttgctgaagaagatgaagcggattctgttgatgaggagttcttccaggagcaagccggctacgatgagttttagggtttcggcctagttcctaagtcacgcctgtgttgattggtccaagtcctggcttccgtttcccttttgtaatgcagttgtgagctcgggatctgtccgcagcccaacatgactgtacctctactctataataaagagacctctgttgctgtgatattctgtcttcctgtgataccagcactatttcctgggactggtatcgattaacaggttaatttagagcgtcacgggctagttccggtcggtactagttcggggcgtgacagattttaagtttttgattgcaaaatttgaccactcgtcttattcaaattttttttacaaatataaaagacgaaaagttgtgtttaaagtattatagataataaagtaagtcacaaaaaaataaataataattttaaaaatttttgaataaaatgagtagtcaaacgttgcagacaaaaatatcttttttaattaaggctgtgtttagttcatgaaaaaaaattaaaagtttggagaaaaagttaaaagtttatgtgtgtaggaaaattttggatgtgatatgatggaaagttgaaaattgagggtaaactaaacacggcctaacagtaaaaaatgcatccaataattaaactgatcatatatacataaatacaactgagacaagaagtaatactcaactggacaacctcaaggagctctgattttttcacaatctatctcatattataatgtacataatggcaacatattagtagcaagcaacacgtacagtggccgagttaactcccgtgacgtcagaacccaccaccaccacccccgccgccgccgccgccgccgcagccgccaccgctgaatccgctgcttgccccatggtcaccggagtagtggtgcccgccgccgccgccatggtctccgccatggtggtgccagcctcctccaccatggtctccgccatgcccgtggtgatggtggtgcccgccgccgccgtggtccccgccatgcccgtggccatggtggtggtgtccgccgccattgtctccgccatgtccgtggccatggtggtgatgcccgccgtgagcatccgagctagcagcgaaaatgcacaaatcacaacaagagagatggaattaagcactgatagcacacgtgttaactcgttcttacctaggctggtcgccgccgccgccatcaccgccatcgccgccgccgtccggcccgtcgccaccaccatcgcctccgtcgccgccgccaccatccccgtcttccctgcggcggcggcgcttatctttcttccttcttgggctgtctttaggcccgtcggcacagccgaacaccgcgatcgccacgacggctaaggccgcggcaaagccgaagccgatgaggatccaaccggcagcaggagcagtagggacggcgccgaagccattgcccgcagtaacagctaacgccctcaccattgttaccgagcaagaagtgtctagctagctagcactgtgttcttgcagcagcagcagcaagcgagaatggaagatggataagtagcacacaagcttaaagtgcttctgttaattaggtgcaggaaaaattaagcacgcatcttatgaagtctcgacgcgttgtttctaaaaggatagcgaatggattttccaaactttgctgagaaattgtgttcgatcagtagtgccccagaggatatcgtcaaaaaagtgtgaaatgagctaaggtcaagccttcaatgttgacgaagagtttgcgatgataaaaacggaaagtccgcagctagacgacttctaattcagagtgtgtttagttcacattaaaattgaaagtttggttgaaattggaacgatgtgatgaaaaaattgaaaatttgtgtatgtaagaaagtttcgatgtgatggaaaagttggaagtttgttaaaaaaaattggatcggtctgaggctgcatacgcgttcagaagttgcacagaaactggctcatcttgacccatgggcacagttatcgccgccggcggcgagctatccgtgtgattacgccgaaactcacccgccaccgaccacgcccacagatgataattcaccgaggagattggacggtgagtcatcgcgatgaggcccaggccaaatgacccagggggatccacggcctggcaagtttttcctcgatatatgggccgaaataggcccactctatcggcctactccatcacataaagcccaccaaatgagacggcgatatgtttgaaaaaaattgcaccgaatgtctctcaacttgtcatcgagttaaaaaatcgttccccaaccgcaaagccagatatatgatatccttcaactttcaaaaccatttactttagatccttaggtggttttgaccccggtttgtccgacgtggcggctgagttagcgtaaggatccacgtgggtcccacatattagggtgaccacgtcaccacccaatctttttttcccctcttctctcctatcctcctctctctctctctctctccgacctctctgcgtaggttggccgtcgggtggggaggaggttggcggggctaggcgggagaggagggcgtcgacgacagtggtgacagcgacgatgctggagaagagaggaggccggcggggtgaggagggagagaaggtccggcggcggtggcaacgatgcaggagcaggccattgcgccgggtggggaaccggctggccgatctcctctccgtcgcccttccccgcgcgcatcggtgacttcgctaccgccaccgtatcatccctcggccctcctctccaccgcgctcctcccttgccagctgccgaccgcggtgggtagggagccggccagtcgatctcctctccgctgctcctttcccgttggccgtgccgaccctcttccccgtcgccggccctccaatccgccgctccgcctgtgccaccgtgcatcaccgcctcaccccgacgacgacgtgtgaccacagcaatggcgccgcacggcacgtagagggggaggaggagggcaggcagacgaccgccgcataataaagaaaaagaatgaaatgaatatcaggccagtccaacaatatttttataatgagtgtctaggttgattatttttctatattatggtatttataagggtagaatggtcatttgattattgttcttgcatgtgaggatgaaatggcatacccacgtgacgttttttttttgtttaaaggactaatgttatgctagatgataaattttaaacatttgtttgtgtgtttcttatcttggtcttatcacttttataatgtttgggtgtgtttaattctatttgaactacactttttgttcgagtgttagattgtaataattggttgtaactctgttgagtaaagaccgggatgttaactattctattattaaaaaaaattattgaaacgtcaagcactaaactaatcctgaaacttcatggattggctattcaccctaacaaaaataaatgagctgccgcacacaaagtacagactaatggtcatgtcgtgatgtatgccacctatatatcccaagttttaagtgagcgtgcaggtcagaagaaaatattagatatgggagaaaccctaaataatctaatgtattatgttgtattgacactgtaatgataggtatatatagagagagtacatatgaggtagatacaagttagaatatacttatctttaggactcccttttatcagtacaattcgtatttaaactctttatctccacctgtacacaactatagctactacggccacggcaatggcgccgcacggcacgcagagaaggagaaggagggtaggcagacaaccgatccgtgcaacggtagccatcggcggcgccacccgtcgcatcggctatcctgtccactgcgctcctcccctgccagccgccaaccacgctggccctcctccctgccgcgtcgaggacgccgccgccatcaacgcctagggggaaaatgagagaggaagggagagaagagggaaaaaagagagagggtggtgatgtggtcaccctgacatgtagagtctacttgggtcccacgctgattcagccgttatgtcagataaaaccggagtcaaaaccacctaaggacctaaagtgaatggttttataagctgagggatgtcatatccctggttttgtggttggggacgattttgtaactcgatgacaagttgagggaccttcggtgtactctaatgataggtatatatagagaaagtgcatatgaatatatgatgtagatacaagttagaatatacttatctttaggactcccttttatcagtacaattcgtatttaaactctttatctccacctgtacacaactatagctactaacacccacctccgccgccgcagccaccgccgccgccacaaccgccaccgcccccatggtcaccggagaagtggtgcccaccgccgccatggtctccaccatggtggtgccagcctccaccatgatctccgccgtgctcgtggtgcccgccgccgtcaccaccaccatcgcccccgtctggaccgtcgtcaccgccgccgtcatcgtcccggcggcggcggcgcttgtccttcttcctttttggtttctgtttaggtcgatcggcacagccgaacacggcgatcgccacgacggctacggccgcggcgaagccgaaggcgacgaggacccagccggcggctggagcagtagtaggcacggcggcgaagccattgcccgcagtaacagctaacgctctcaccattgctacgtgagcaggaataatcggctaataaccttttcttcttgcagctgcagataattaacgtactctcaccattgttaagtacagcacaagctcttgtgttacgtgcagaattggagagagagagacattgtaagattcaacgcggttttctgagtcgtagagaggaattggaggagttgtacagactcttccttgaggaaatgtcgtaagcgtgtgaaatgagatcatatcagcctgaattgctgacgagtttgctactatatataaacagtggaatagtcaataagtacatctggcagctatacgacttttcattcaaccccccagatcagatcatcaaatgtctgttcacagaagttgcacagaaactgggtcgagctcatcttgaccggcggcgagctttctgtgccattacggcgaaacgcaccggcgccaccgaccacgccaacagatgattcaccgaggaggctagtcccagaacggcgaggccgtgccatgcggcccagcccaaataacccatggcaatcacgtccgcaactgaaggaatctgtaatagcaggtgatccattaaatctgagccacacagcctgatcgaacggctgatagagatcctgggggttgggagttttagactccgaccccctcgaacacccaaaatcaccgctctgtccaatttaccagccgctgacagttcgcgaggagcagctgatcaattaatctgagccgtacagttcgatcgagcggctggtagagacccatgggggttcggagttttgaaccccgcgcgacccccattcgcagccggaaatccaccactgcgcgtctgcgcctcatcgtagctctgccgagatcttggctgcgtcttctcccttctcctgcctcatcgagctccatatggccgcactccatccgtccagcgcctgcaattctgaatttcagatttagaaaccgtgcttcacatcgctctgcaaaggagacttaattcctgaagccgattaagaaaccgatgattcagaaagagaagaagacacagcaatgcttgggagtttcaccattgtttttcagacgaaccgaacgagatgaaaatgaagtatcatcttgttgcttgctgatctttttacagcgagatgatacgtggagtttcagtaaaatattcctggtctgtccctgatagtcagataagagcttaacaaccaaatctttaatatgaagatgctccttgggtatttgcatgctagctgtttgcagcacgcaggagaggaggaccagcgtagcaagactatgcgctattgcatccatcgtctacggcataacaattgtctggacattgctgctggatacctctttgtacctcttaaactgtaaaatttctttggaagacttagcgcgaaagtctattctgatcactagatacaaacaaattaacttgaaaaaaaaatatgttggcgtacaacaattgcatgctcgtaggagcttagcgccgtaaataatcattgtttttcaactagaaattacgtaaaagagatactgtaagctgcttaagccaagatgaaaatggaagaggcgaatttgatcgtgagtcaattaaactgtactgttattactcactatcactgccatagtagtgccatgcataatgaataatccataccacgaatcttgtcttgatcaactggatccgtcaattaacctccgtctactctccacctcctcctccgtctgcgcctccaccgccgtctgcgccgcccccgcaaccgtctgcgccgccaccatcgccaccgtcatcgccgccgccgccgccaccgccgccatcaccacctccatccccgccggcgccccagcaacaacaacaggtggacctccgggatctgttcttgcggtcggcgtatccacaaaggagaatgaccacaatcgctagcacgaacacgacaatgcctgcagccgaagcagcagcagcattggacgtcgcgttgggcacgagaagatgttgctcgctagccatttgtatgatctcttcgatcttcttcgtctaattggttgatgattagggataaaattaaattaagctgcaagctagctcgatcgagtggtaattatatagagaggccttccggcgcattaattatgttttctccgactttgcactctagactggtgctagcgtgtagcgccttgcagatgtgtgctggatcgatcgatcactggagacgacgtctacgactttgccaatcgatcccaatggaaaattggaatgcattggtaggatagaacatgggccagtgtggatgctgctgaccttgacttaatttaatcaagctcagcctgtatttgtatactgtctacgttgaccatgagaggggcagagatcagcttcacatgtatacgcccgacggcctgacattgtttcagcccaactttaacgggccggacgttccttgccttttcagcccaactatacgggccgcatggcccatatgagaatatactggactattatgcgtacgtcgccttcctgcggcccagttttagtggtttgatgattaagatccggaataagttcactttgtaaccctgaaaaagtaatcgaaatctaatccgtgaccctaaaccacaaaaccggatatctagacccccaactcttaaaatcggtgcaatttgactccctcaacagttttgaagggtggttttgctaacgtgacgcctacgtgacaatattgactcggtcttctttgcacatggcattgacgtggcacttaggtggcattagaaataaaaaaatatgtgtgggacccatttatcattcaccaaaaatatgggtgggacccactgacatgtgggcccacataaatcatcctctcttcatcctccccccccccccccccccccggcgcgtcttctctctatctctcttcatcgcttaatttagctgtagctccgcttgttgatccgtagctggcggatctgcttcctctatcctccccatcggaattgttcgtaccgtcgcggaggcgctgttgcattctactgataccaagattacaactacagcaagatcggatgagagagctagctgctgcctaattagtttcgagatcaatgagagttgctagctggacagggtggttacgtacgtaattatatatagggttagatcgtacgtggtgtgtacgtgcagaactgaagagtatgttataatgtcaaattccatttgctatcacagagagtataaattttatccgtcaggtttgtgcttcgcgcttacggaaccagccggccgtaattaaagtactgttagcttctctctttttttttctttacacgaaactttatcatgtactagagaatagatagattcactgtacaatgctgcaaaagtatacagtaatactccgtattttaattagatcgctggagacgatttcgcaattcacggattgatccaagtcgacggatggggaaaatgtcaggaaagtggttcgcgctttgcttgtcacaccatttcggcccaaccaggcaaccacgcgcgtgggccgtgccaccaggggagcgaacgtacgggccggcccgcgcgtggccgctgggctgacgaagcgcatcgatataggaaagatcgagttcctccctttaatagcaaaaccgggtataacgtatctcttatcatttaaaatcagtgtattgaaagcagttttggcttacgtggtactaaagttttcatctaaaaatgttcagattggagaccacatagccttgcaaaaacattataaagcaagaaattgtgtactacttctacttgattaggacttttgcctctactgaccaaggtttttgtttcttcgcgaggaggcgcagtagaataactggagaagcatcacaaatctgtatatacagcttgctcttttttgttcttttgcaaaatcttgatttacattatctacacttagatcatggttaaagctggactactggagttgagaacaaaggtaatcttgtcatggatatttatattttgcattagaacagaggcaatcttaccatttgggtgaaaaaaaagtgaatatacattttctaaatttatatttatatacatgtttgtggggggaattatgaaaatatacatgtttataaatgcagacgtgaaaatattacgcggcataatattgaacagattgaatccggttttaacaattgaggaattctctatatttgattttgcggttgaagaatacgaattaaaatgtgtctatatatgaggcatgtaaaatgaactttttttctggaaacaaatactgtcgttggacaaaacaaaggttgccgcacgtggatggcaatcacgtccacaccgcaagagccgtgggaaatcgtttcaaatgaagagctgtcatagatagacaatcatctgtgagactgtgatggctcttgatcctaatatatctcttacggtagatttaagcacccgtcacagatataattatttgtaacaactctctaagagagccatcattgataactctttttttttcatttttgttacatcaaataagttgatcatgcataatatccaaagacaaacccgttatgaaatgatcttacctcatcattttttatgcagtttgcaggcataaatggcatcctctactatactcctgaaatacttgagcaagttggtgttggaggttttttctcgaagtttgatcttaattagttcttctacatctatacttttaagtgccatcgcaaccttagtgatgattccttgtattggtgttgctgtgccgttcgtagatacgaaaggaagaaatttagtattctaatatttataattactttctccgtttcacaatgtaagttattctagcatttcccatctagacattcattaacatcaatatgaatgtgggaaatgctaaaatgacttacattgtgaaacggagagagtactacttattgtcattatttaattaaaaagttaaagaaagtacaaaatggtaatttttctccctcgcttcatgcatgcaggcatattctccttggcacgatacccattctgctattatccctagctattatgcttgttgctaatattatgaatatgagcactgatttacatgctatcacctcagcattatgcgtaatcgtttatcaatgtgtttttgttatgggatttggccctattccaaatattttgtgtgctgaaattttccgtatagtccctcctcattcacaagatccatggatacccccggagcaccctcttcaatttttttcaccatgaatgataaactaaaggtccctaaatagttggaggttgaagaaactgtataattgagcccccccccccccccaaaaaaaaaaattctgttcatggatccgaccatgatgcttggtaatatgtagcctagcattttggatttgtgataccatcgtcacatacacttttcctgtgttgatgaatgcgattggtcttgcgggtgtttttgggatctttgctactgtttgtgcactagctaactatttgtatatttcaaggtgccagaaactaaaggtatatacctcttgaggttctgtcggagtgttttgcttctaccaacatctcatccaaagatgattcgaaagaagataagtaatactccctccgtatttaatgtatgacgccgttgacttttcgaccaacgtttaaccattcgttttattcaaaatttgtgtgcaaatatgaaaatatttatgtcatgcttaaagaatatttggtgacgaatcaagtcataataaaataatgataattagataaattttttaaataagacgaatggtcaaacgttggacaaaaagtcaacggcgtcatacattaaaatatgaaggtaataatgaattggttggctccatgtaggacggattttattgcaatgccatatattgatgtattttttgctatattattatgtattaaatttgtgaaactgtcatatgttttgtgtggtggcatctgtacatgtatctgtacttgcctgtacatatatgtacctgtgttgtctactatgttctaatctactttacatacaaccctttgcatgctgtccaaattattggtatacatctgaattacattatttatacccagttagtacagttttttttcctgttttgccatgtgttaactaattcaatcatatggtaacctttcgtatcgtgcattagaaactactccatccgtttaaaaaaacgaatctaggattgaattattttactacaacgaatctggacatatatttgtctagattcatattattaggatatgtcaaatccaattctagattcgttttttatgggacgacaagaataattaactatttgtcactcttacgagtggtgctaaattatttgccactggacccacatatcatagacacatgagggtccacatgttatatacagcgagtggtaaatagttaaatgtcccagactctactactaattagcatgcatctagagagcattggcagcctgagtcgagcagctcactgactttgcttccaccatgtaccgagagctgaacacgcaaaatcacataaaccacatacaggcatggtttagtttccaactttttcttcaaacttttaactttttcattatatcaaaactttctacacacacaaacttctaactttttcgtcacatcgttccaattttaacgtgaactagacacagccataatcagggtgcaattgataatgcttatgttagctgtgaacactttttttttaacgcaaactggtctcaaagctatttttagataatggaataaatatcccggcctttactcattaaagctatagctaattattacaaggaatcgcataaacaacgagtgaagttcaaataaaattaaatacacccaacgataaaaaaacaaaaccaagaaaaggagcacacatttattcaagtctatttttgaatttccatccatggttcgcaaatatttacataaccgtcgtctccaaattacggcatgcaacctttataaactctccatcatcttcacacttttgcaactttgcccaaaaccggagccaatatgttgccttgaatattacctgcatatatgagatagatggtgatttgtcagaaactatatcattcctactcaaccacagagcctaacaaatggcagatgctccaacaagtatgagtttactcatcttcttgtgaacccctaaaagccaaccatcaaacatattagatatggaactagagaggtttaaaccaataaaaaactgtactactctccaaacaaattttgcaaaatgacagtcaagaaaagatgttatacggtttgcaatttgccatggcttggagccttggagctgactgacgaacggttgacatgtcacgctcaaagcctctccccccataattgtcccatccgatgcgaacacactcacacaaacagggagagccgcttgctgcattcattggcgtgcggacagatcgccgcccagcaatcagcggcaggccaccaaatagacagccacaacacctatcaacttatgggagaattcagccgtggaagaagccggcagcagcagcagtagtagtaggtcgatttggtttgaagagccaaacaatgcccacgagatatggctatgctgatgagctgctgaggcagtgatgtgtagactgtagatcctatttaatatagtttaagattgtaaaaacagttggttagtagtcattttctgaaaaatctgatttctattttttttccattttgtaactatagctattaaaatccaaaaaaaaactagactaatttaaaagaatttttaattttgatagaagttgtagaagctcccaaacagtcgaagtagctatggtgataatactctcttctcccattttaagtggtagttgtaaatttctgtgtttaactttaatcggctatcttatttaatttttttttatgattagtatttttgttgttgctagataataaaacatagtagtactttatatataacttatttcttaattttttttataaaatttttaaataaaataaatgatcaaatgaattatgaaaactcgtgactgcatttaaattaggacgcgcgaacaaagcattggcgtttgcttccgttggcggctgggacccaactgtcccgcgccgggagcacacgcgtataaaggacggtaggagtggaggcctcgccgggctcgcagttcgcatcgcgctgttccctcctcggctcctcgcgcaggagcactggcacggacagtgacatcgtcttcccttcacctcctcgtccttccctctcgtggcatcgcatcgcatcgtgtcctctgcgactgcgagagtgcgtgtgtgcagcgcgcgctcgtcgagacagacagcagcagcagttgctctttaatgccggtgccttgctgaacagagcaaggtctctccaatggccttgaggcattcaatgcgcccgtaatccatctcttgaacggccgtgtgtgtgttcttggcgtgttggtgtgcgtggattgggtgggtgaggaggatgaactatctcaggagccggagcctcaagcggctcctgtctctcggtcgccggagcaacaattccgatgagtccaatgacgagtgcgtcttcgtcgtcgaccagccgccgccgtcgaacaagcctacttggaggtgcttctcgtatgaggaggtcaacaaggccaccaatggcttccaccgaggtacagtagatatatattcttgttggtttctttggggatttggcattgagaacatggcgccatgacagacaatatggtggggagaggcgggtacggcgaggtgtaccgcggcgtgctggaggacgggagcgccgtcgcggtgaagcggctgtcgccggcggcggcggcggacgagaagaaggagaaggacttcttgacggagctcggcacggtggggcatgtccggcaccccaacgtcacggcgctgctcggctgctgcgtcgaccggggactccacctcatcttcgagttctccgcccgcggctccgtctccgccaacctccacgacgagaggctgccggtgatgccgtggcggcggcgccacgggatcgccgtcggcaccgcgagggggctccggtacctccacaagggttgcgcgcgccggatcatacaccgcgacatcaaggcgtccaacgtcctcctcaccgccgactacgagccccaggttcttcctcctcctctacctctcctctgctcgctatctgttcgtccggttgctcaccgagaaagaattgaattcgcctcagatttcggacttcggcctcgcccggtggctgccgtcggagtggacgcaccacgccatcgcgcccatcgagggcaccttcgggtgagcacacatacgttctccatggaccatggccatggcagtaaaaacagggagacgagacgacgctgagccgacgacattgatgtgcaggtgcttggcgccggagtacttcacgcacggcatcgtggacgagaagacggacgtgttcgccttcggcgtcttcctcctcgagctcatctccgggaggaagccggtggacggctcccacaagagcctcctcgcctgggtacgtacgtagcacattcatacgccatcgccgccgtcgcgtcgcgcatcgcacaacacgcgcacggcggcgcgcttgtggcggccaggtgttcggccagggacattgacattggtgccgtggcgcgtgcatatgcaggcgaagccgtacctgaacgactgcgtggcgcaggggctcgtggacccgcgcctcggcgacggcggctacgacggcgcgcagctcaggcggctcatgttcgtcgcgtcgctctgcgtccggcccgccgcggcgtggcggcctaccatgacacaggtaagaagaaaaggaaaaagaaagcaaacatttttttttctgcaactgcacttgctgttccatctaggagtagactaaattgacaacaatttagaatccataaataaatgtgagagaaaaagcatccggattgaactgtccatgttaacaagtacagtaaaattgacactgaacaataattgaatttcattattttcctaccaaggtactccactctagtactagtactacaagaaatggaccattcatcattgtgaagggtttctttgctgacatcagctccgaaatggcatggtagcttgggattagttggcgacctaatcgttctagagtgtgcaaaacacttagcttaggaatgttagagtaggtctgactctgatctgacagtctgtgtagcattgcaatgcatgggccaccaaacaaaatctctcaacatcacccaaagaggacaagagctaggaaagctttaattcctttgtggtgtggtgtgctaattgggttgctgcttgacccagcaactcaaataaatatggcattgcaatttgcaaccactgcaatcttcttcagtagattgttaattacataggggaaacttgatggtttcttatggtggcagagtctagttgattttcgttggagtttgcgtatccacatacacattggttgtcaatcttgttcaggtaggttgttaattatatagaggaaacttgataatttcttttggagcatagtctggttgattttcgttggagtttgcatatccacatacacattcgctataaacggtttgtatatggcattatggtaggttcaacagctctatcaaaccatacaacgacatgaaaaatctcaacagaaatcaggagaaccggtatacaggaataattgttaacggctggtggataaattgatgaggggatctagtctaagggacatcattgtattatatggattatcaagcaagttctctaataacactggtctaaaagaagttcactaatagtactcaagtcatactctgtagatgacctcattacttttttcatggctggtgctaggtagctatctcactcaagtataattctcctatctgaagttatattttatacagcataatctgtatatgcttggtctaatcagacatccgggtgccctaatgcaatggcaatgtatgatgctaatgtgattgtcctactgctactagtctaatccatatcatccacttgcctcctatggttgttaaatactgccacattgtgttgtgtcagttgtgacagccactcctttggtttttattttatcttgctagcatctagcaagccagttggcgagtaacattgcaccaaacttgattgcgtataccttgtcttggtctgtcatagtgtggtgagatcccatttttaatgtgaaactaattgaatctctttcagtaggattccacagtgtgtgggatgataatgtttgtttatgtactacaatacagaaacagaggtatcagttatgtatgaggatatcatacatgaaagaataagttgaacctaaggaaggtagcttgaacacatcaatgcatatcatcaatattgacttctttgttttttccccccaaacagaccctaaagcttgatttactcttcaccttttcgtttcgtttttactacgtaaggcccacatattgttgtgttccaatacttgaaagtttcaataattcttgggtattttccaaaaggtacacactataaaataatttcaaaaactcaagcaacaaaaccgaatttttagacagtaaataaaagatggtaagtatcttgtagttctcaagttcttagtattcaaagtgcaattttactttttccagaccaaaggatagtctgatgaagcaaggggaaaaagaactctaaatattgttttttagatggaaaatataacagcattatcatttcaaagaatgtataacttcttttatggacatattgtattcgcaatctttcgtaatagatggtatttacaagtcaccaacagttgcaaccagaattactcttttagtttagaccttcaagacttaaagcaaacaaggggaaagcttacccattcttactagaccaagtagttgcacaaagccacagagtaatcttacaattttacttgacttgagaagaagacaagagtttggcctcatctaaaatgtggccggtttcttgattttagaagggacattggatgctctgtagcctcctaccttctccattatccttttcttccccccattgattcacgagaagcccagagccaggtgaagtgggggacacaggacagctcaagaacataaatcttgggacaaacgtacaaaacatgccaccccaatgtgcacatagaaaacttggtcacctctaatcaagatttaatcatgcactactttattagtattgcattgcaccatactaccattggcacacaagctacctactgtgaacagttactttggttttaacttccaaatgccttggaaggtggacatatacatacattcagacattagtgtcaataccatgttttcagaaatcacaactaaatttagcactttcagcaaataggttagcaagcagggttatgcagtttgttaacaagctattgcttacaactgaccgacgatatctagttgaatttgttatgagaacaatcttgattttctgagcaacaaacttgatttttcaatgcattgcgtttggctttcttgtttctctaattgcaaaattcagtgcattttgtcatcgtgtatctggtatcttgtcaaaaaaaaaaatccaactactgggaacatccctggaaagtttagaatcatttatccagtagttactagtaccaacaaccggtcaattgtagagcgtactgcagctcaactgtgtttcgtactgccacttaataaatttgcaactgtgttgtacttaactgactcggttcacatggggaaatggcaggtcctggagttattggagtccggcgagatatctcaagatcaatggctgatgcccgaggaggaggaggaagacgagttttgggatttcgacgatctcgacgacttcgaggacgacgacgacgacgatgatgacaactatgataacgacgatgaatcggattctccctcgatatcgtcgtcagcgtgcagcatccacgccaatgattagccccaaaatatttgagtctgtcagtcttgacagagtgccccaattggttttggtttttaggggatactatgatcgatgggattatattagtgtacataaaccacctagacaatagtaaattcagaaaagaaaaaaaaactgttcaggcccatggttttgatcatcatttcatgtctccattagcaagaatctccttgttaaaacccatactactaactccatcagctgatctgttcatctgacagtgatggttcagacggtttctgtcaaaccgtgctagatgaacagactgacacaagtttgtcatgatgccatgcccttggcttagctttctcccaaccaactggaactgttgttggtttacagtttcctgtggatggattggattggattggagacgagctgattagggacatgatagtcctttcagttaattgtttagctagcaaccagcacatgccaggcaccggcaggtgggcttcggtttggaatccgttggttagctcgatcaggtctcaagtgcagttgggcgaccctgcttagctgctgctgctttatttgttcgtccttcctgttcagctagatgtcgatcgatcaatgaagtaaccaagaagtcattgagcaaagttcagattggatcatgcagttctgtcaacgcaagaagtcagtcacgtttcattggactcactaaaaatggctaaaaatcaaaataaaaatatggaatgttagtctgaatgtctggagctcaaattggaaaaggagttgaagaattgaactgtatcatctactgccgattaagctgaatcactgtgcttggcagagatcaacagtatacgcattgacattcatggacctgaagaaatgtcgccgatccatcgatcgatcgatctaccagtggccgtatttgtacgtgaccaccaccggtccatgcaagatgcaccacaatgatagatgcaaacctctgaccaccactcatcgacatatggttggttcgttgtcatctcctgcttgccagatctacaaattgctgctacaactcgtcctagtttggaactgtagctacgagcctacgaggatggacgagatgcttggtgcccattggctcactcactcacacaggtccaagctagctactagagctgtagttaagctcaatggcccaatgtcattagtgctactgacagtgtgagctgcaacatctgtaattagcaggaccagcttatcccaaacagtagcaatgcagtgtcatacagtattgattcctgtgagcactgtgtaccattcatagggcttgtggtacacttgtgctagctagtatgcactgacaaatcctgatgatttccatgcgagttgaacccagcacatggagctttttgttcaggttaccgattgatcgagcagctaagacctcgagcattatgagatcgataagcatagcaatcgatcccgtgatcatacatgcagatgatgcagtggcgtgcgtgacactataggtacgttgttgctgaagccgaacatgcgatgctgcgtgcccgtggcgcaatgatccaaaagattacaggcttgcacgatcgaccaactgtttttcatgcaagatgttcagagagacagatagtgatatgtgtgttgttgtgtagatgcatgggcctcggctagaaatgctatttcataccgctacctcgtagctaccacggagagctatcgatcgaatgctagtttgtagtaggggtttgagaaatgatttgtcaattgcaatttggtaggggacaggtgccagatcagtgatggttgttgatcagtagtgtccgtcagaaaagatatgtgggtttcgatcttcagtttttttaatgaattaacgactaatagaacttttctacgagactacaaattaaatatgttcttatagttcttctggataccaaagcaaacaatattatcagggatagggaagaaattagcacgttctgttcgtttttttatctgaacctgaatgcatggcgacgaactgaacaattaagctcaaagtgaccgaccgatcatgttaactgttaagcagtcaaggtccagtgctgataaaccacatgagagagagagattctcagatcccatgtcaacacatccattcacagcagatcgaagctagattctttgcaagcgtgctgctcgtcaagcatgcagcgaatcaggggagagattaaacaagttgggtgcagataaccttcactgcagaacgacaaaaaggcccggattgaccatacaatgtaccatatcaagttatgcgattctgtcggtaattagcatgcatcaaagattcttcagataagccaattcgggttaatcaatccgaccgatggtcggtatatacaaacattgctcctcactactaggtgcagtccaggaattgctgtaaacacatgggcacttaacacacccagcgaagcagaatgcataaaaccaagtgttgttgtttttttattttgaaaaaggccaacggcccggcttatattgaaagcccaggggtataaccaagtgttgtaactgagaaaatgcacattttctcaacaatgcaggttattaagtcttttgtttcatggtcacattttaccacgccacattttattagacgtgtattagtttactatcacaattgtgcattgctacactttttcaacaacatattctgcatgtcataggcttaattttttttgtcaacttttgtcacgctttgtggctaccaatttattcattattttctttttgtctatcaaaatttgctaaaccttagttgtagtaaagtgtggctgacaacctaatacatcgtaagatgctagccaaaaagttcaaagatgcaaatgataaagatgaagtactgaactgggctaaacacaagttcagataaggcccgatttgtggtacttaccaagtgggccaactacacaagaaattgggccgtcctccccggcccaatcgacccaataggtaggtactgcttccatgtattgggggaagcagagagatccccgaaatcaaacccctcctcttctcttccccttcctcctgcgttctagggttttgcctcccagcggcgactcggcgagcgagaccaccggcaagctcgtcggcgatggagcccacctcgtcggcggcgatggcgaggcagacgtgggagctggagaacaacatcccggcggcggcctccgacccggacgccctggacgcgatctaccgctacgacgaggcggcgcaggcgcgggtgcagcaggagaagccctgggcgaacgacccccaccccttccgccgcgccaagatctccgccctcgcgctcctcaagatggtcgtccacgcccgcgccggcggcactatcgaggtcatgggcctcatgcagggcaagtgcgagggcgacgccatcgtcgtcatggacgccttcgcgctccccgtcgagggcaccgagaccagggtcaacgcccaggccgacgcctacgagtatatggtcgagtactccaccatcaacaagcaggtcaggccccccaatccttccctcctcgctgtttattttggacctcatgatctgaccacgctttagtgttgctccaatctaggtcgttatctgctttccctgcctgaaattgtatagctaggaacactaaatcataataataattagtagtgccacggcgccgtctgctcaaaagttgtgcgggaggaagtatttgtggttaaatattgttagtgccacggtgctgtctgctcaaatgttgtacgcgagaaagtatttgtggtaaaattttgcagtgctgctaatttggtgttcattgtgtcacccttagattggttcgcaccatgctattgatcataatgtttctgaggtctcagtttttgctaacacattgatgactgatttggtatgtttgttgtgatatttgatcctagggataaaaactacagggtataatatttggaagttttagttgatattttagcactttgaactggtggtatttactgtttgtgcacatactgcattgtataatctgtttcatagcatttgttgtaggatttggtagtccccatactgtgtatcacagccatcttcttctaggatttagtcatcttagaattgttttgtgtccatctgatcatacataatctttggggtggctgaaatgctaagggggatcttgattttttttccttattctatactttcatgttctattcaaaattcattacctcgtgatcattgagctccgaaaatgagaataaatcgatgcaatttgctatataaagttacctaacatgcatatattcatttggataggctggaaggttggagaatgtggttggctggtatcactcacaccctggttatggatgctggttatcaggcattgatgtgtctactcagatgcttaatcagcaatttcaagagccattcttggctgttgtgatagaccctacaaggactgtttctgctggtaaagtggaaattggagcttttaggacatatccaaaagattacaagccaccagatgaacctgtgtcagagtatcagacgataccactcaacaagatagaagattttggtgtccactgcaaacaggtaactaacttatacgtctatttttttcctcccttgcccaacaaatgatctaattctgttctaattgtgttttgtgcagtactatgctctggatataacttatttcaaatcatccctggattctcatctccttgatctactttggaataagtactgggtcaatacgttatcttcatcacctctcctgggcaacagggattatgttgctggccagatatttgatttaggtaagaaatttcttttatgaatatttacccaaaaagaagtacacatctatttttgttttaccatgagaccagataaagttataaaccaatttgtgctatgcagctgataaactagagcaagctgagggtcaactggcacacagtcgatatggcatgcttatgccatcgcaacgaaagaaagaggtcatattctttaccatctgctgttcttcgtcactttcaataatttgtggtggtattgtatgcttgcaacttgcaacctatgagataaatgccaactatatttgaaaaattccatctgctgttctttgtcactttcaataatttgtggtggtattgtatgcttgcaacttgcaacctatgagataaatgccaactagatttgaaaaattgaacataaagacatttagttatgtaaatattgaattagtgacatcatgcatgggtcagtttgttatgtgctagggctttctctcatgagaaatttgggaggaagctatagctgtcatacttccattaggaccattacttctgttatatttggagtactgcaattgtgttgctctgtacttgtgttgataggagatttcaagctgagtacgcagattgatgatagtaaagtaaaatacaagatattaatatgaaagccatctgagtgagactgggaaagtatgatccagattatgttctgttcagagttgcaacttgcaacaaatgggttaaatctatattcgggataatagactaggattgaactagtcaaacagttctctttcttgcaaatatataaatcaatttgttctttgttattgtatatatttgtattatgtgtcctcaacattgtgatgtttgacccatatgtctataacacacatatttttggatttcttaagaattattgcctattctgctctctccaacctattttgtgcaaattacttaattagtgttatagtgtgtcaattgtttatggctatctttgagatctaaatgaaacttcctcttttttgttcctttttatgttttactcagcaagaggagtctccactggctaaggtaactcgggatagctcaaaaattactgctgaacaggtccatggtctcatgtcacaggtaatccataagcaagcctgactgttgacgaggtttgattctcctggtatatatatttgcttgcattatgctaacttttgcaacatgatgtttcaaggtcattaaggatatcctcttcaactctgtgcacccgtcaaacaaggcaagcacaagcgcaccagattcatccgggcctgagcctatggttgaagcatgagtgttctacagaattccttcattagttagccttttgttgatgctggattcacatacactgggtgcctagttgtttcatgactaaaagctgtgtccagcataactacccgattcaaaatgcgttagctgcgttttatcgtcaaatcataactgatatgtaattatgagttgccttctgaatctttcggctgccattgtgaaggtgcgtggtctacgttaagataaccaattaccttggcccaacttaccatgttctctcaacaatgaatggtcccaacgtcgctaggcacagtgtatgttgatttggatgatctttctggtatttatcctccgattttggtttctatatttccagttcatttcactgtgtcaggtgctacgggtacagccgtacagcattgttgctttcaattaacgtcagaatttgtcttatgattattgtagggcctcgttaacttggtcggtcaaataattcgttcccacttcgaagaagaaaccaaagaccttatcaattaaggacaagtatattactttcaactcacgacttcgtgggatcttccactttgacatgaatatcttcaagtggagaaatataaacatttcattttgacacgttagcagcagtacccagagatgctactttactttgtttaacaatatagtaaaatatagtaatacgttttaaataaaaagagttacatattatgatagtttgtttaatgataaattctagtaacatcaatatgggtgggtctagtcgtcaaacgtttgcattccacgaacgtttaataggtttcgtcgttattcgttctaatgactcgtttaagctcgtatatggtagttagagaccaaccaatcacttttccctactatcaaatcgattttatttcttgaaaaaaaaatccggtgatgcttagattttttatttgtactgaaatttatacatgcaaaatataattcataatatgaagttccattaaaaaagctataaaaatgactataaagaaaaaaaaaagtaatttgaaaaaaacagaatgcaaaaacaaaaaaatgatacatatcgcttcgggagaatcaacgtaaaaaaataacgggaaattgaaaagattcacgtaaaaaggagaaaaaaggaaattaagaacagaaaaacgtagcgacacaacctctcacgcatcgccacgtatcttcgatcctccccagcctgacccgttcacgaggatgagcggaagcgaacgttcgctcattagtcatccttcatcaattttacataattaatcttttttaattttttttactattaatagtcaaagttgaaaatgtttgacttccaaaaaaaaagaaaatgcttatattttgggacggagggagtaatcattagacacaaaggaaattattttaaaaaagttaaacgtaatattaaaaatccttcgaaactcactctaagaaatttcaaaagaatttaagagactcatcccttctttccaaaggaacacatgaattctttccatatagtaatctaatcattcaatattcccccaaaatttggtactttcaaagaagctctacatgcataaaatttggtacttttaaagaagctctacatgcatagccttactggtggctatagccttgaacgatcaatacggtgctatgtatcatcaacatacaataagacctaacatagcattattgtgagttttagacgggttccactgaagtgtattagcttgcccaatatgtatatggctagaggggtattacggtagaccatgaacctcataggattagctactgggagagagagagagtaccaccatcatggaaaagaagaattttatagcctttaagaaaatatcctaaggtagtttacactataaaatatggtgcctctgttagcttttcaaggatggaaaaattgcccatttccgaataagtataatgtgcatggcctaacaagaaaaacaattcaagtcttcaacacggcagacgcaattgatgcccccaacgtcgccaacgagactcacgactgctgcatttgctgctagctcatgagtggcgtagagatgatgttctatcgtgtccaacgagatgagcttatgaacaaccgtgctcatgctcggccgcctgctaggctcaccgtccacgcacgaaaccgccagctccagcaacccggctgcctgcacatggttgaagtcaccgcgcagccgcgcgtccacgagctcctccagccacgccggcagctcgccgtcgtcgcacttcagcttctccttgagccacacggccagtcgctggacattccatgccccgtcggccgtcgccgcagccgctacccagtcgcacaccctctgccccctgaccagctcgaggagcacgacgccgaagctgtacacgtcggctttgccgttgatcgagcgaccaactgtccagcactctggcgtaatgtagcccctggtcccctgcacccgcgacagcgccatgtggctgccggcgtcgcggctcagcagcttgacgaggccgaagtccgtcaccttgggctcgaagtcgccgtcgagcaggatgttctccggcttcacgtcgcagtgcacgatccactccaggcactcgtggtggaggtacgccagcgccttcgcgacgcccacggcgatcttgtacctcgaccgccatggtaacaccaccacaccggagctctcgccgtcgtcgcagaagagggccttgtcgagcgagccgttctcgacgaactcggagacgaggaggcggtgcgggtgctccgagcagaagccccatatcctgacgaggttcatgtggttgatccgcccgatgacgctcagctccgaccggaacacctcgtcggcctgcgtcatctcgtccagccgcttcacggcgatgctccggccatcctcaagaacacccttgtacacggatcccgtcccgcccttagcaatctcgtctctgaatccgcacgtcgcgtctgatagctcgtcgtaggtgaacctccggaaatggctaaacaccaagctgtacccttcatcaccgacccgtcctgccgccacggagtcagctcgaaagacaaacaggtaacccacgacgacaaaaatggcctccacgacgaacacaaccgcgaggaagctgtagaagtagatgaagtttatcgtgttgcgcctgccatgaaggtacgagctgctgaccgtagcgtcccgttcgtccatggtgcaggtgtggccatcgaagtgcagcaaggacgggttcaggttcttggcacccgtagggaacttgaggtagatggtttggtacggaatgctcataacccggccgttccagagagagatcttggggtagcactcaccggtgccctgccggtaaccgaacgcctcgcagcggcagtcgacgaggcagagacgccggcacgtgtcaaacgagatcccggcggtgtagttgaggtcgaagccccagtagtcggtgtgccgcatctcggcgaacgcgacgtcctcgccgcacctgacgtcgaacgtgcgccggcatcccttgctccagtcgctcgcgtcgtgaggcacatagccgtcggggcaggagcacgtcgggccttggctgtacgtgcatatgccgtagcggccgcacaaaccgtgcacgtcgcactgcctctggaccgcgacccacgtgacgtgccagcgcccggcggcggcgtcgaggctgtagaggcggaggttgccgtcgtagtcgagcgtgagccgcctcatgacgcctccgtcgcccatgtcggaggcgttgaactgcagctggtcgctcgccgtgaagacgccgcggcggtcgaagctgccgtggcggctgctgttgaacgccgtccggttgttgtcccaccacttcttgaaggggtccggccagtagttgctgctgatctccggtccgtcgtacatcaggttgaggatgttgctgctgtcgaagtagaacttgtagtagccggagtacggggagcccctcgcctcggcggacacgagctgcctgtaccgcgtcacgggctgctccggcaggagcgtgtccgtgggccagtcgaagctctgccacagccggttgccggcggcgtcggagacgacgaggttgccggtgtcgaggagctgggcgcggtcggccggcgtgccgctggtgttggtgctccacacgacgcggccgtcgtagtcctgcagcaccagcgagccgtccttgcggagctcggcgcgcgagccgacgccgttcacgggggtgtcgcggttggccgtccacgcgacggtggcgtcggcggacgcggtgaaccagacggcgagcgtgtaggcgttggtcgccaccttgtagaagccgcacgagaagttgccgctcggcgacacgaggacgctgtcggcggcgtcctccacggcgatggagccgccgcgccacagaacgctgcggcgatcgccctcgcccgccgaaagagcaacgcaacacagggaggtgagtacgatcaagtgcaagccatggactcgattcatcgtgtatcctaaccccacagggctggaggcgtgagttccaacttccaacttaaaaactggtttaaaaggggaaagaatgtggctagcctgctgacagtgacatttcccaattgagatagtgtgtaccgtcatttatttaaccattaatcttcactgtcactgccggcaagtgaacatgcttcttggtactcccactggatggaggtagctccttggtacttgaccggtggattagtgcagttagagcaagtataataatgagctataagcttactatgagtttaggtggaggagagatagtgaaaaattaagggtgttggctttcatgcaagagctaacttatcacaaattccaagacaaatacattaaatgtataagtgagggatagctagagagaagagaaaacaattatagccaaccttataactaatccattatatatgttgactttaagatatgctaataataagaagtgagctatactattatttttgctcttagcagcctcagcctgcagccagaacagtctggcagtcaagcaccccggtgaaagtagttgtactcaaaagagctaaacatcgttagtactacagactaattgacagcccaaaggccgccggcaacgcagatgggcaattacttgatgctgtggggaatgactttcacatattggtatatcttaccattttttttattttttattactttaagacagcacgtacaaaagcgacaaaaatccatctgcgatgctgtaccaaactactgaaatgggcttgcaaatgtgctattataagggaggggcatatttaccgttagcaagaagccactactattcacggtttgcaatgtgtaaaactttaggccttgtttagttggtgaaatttttttgtttggttgtcgtatcggatacacgaacatacattttaagtattaaatattgtctaacaacaaaataaattacagattccaccaggaaactgtgagatgaatttattaagcctaattaatccgtctttagcaaatgtttactgtagcaacacattattaaatcatggcgcaattaggcttaaaagatttatctcgcaatttacacgtaatatgtgtaattggttctttttgcctatatttaatactccatgtatctttccaaatattcgatgtgacagcgtgaaaatttttgtttgtaagaggtcctgtttagttcccaaaacatcatttttcacctttcacatcgaatgtttggacacatgcatagagtattaaatgtagacgaaagaaaaccaattgcacaaattgcgtgtaaattgtgagacgaatcttttaaacctaattgcgccatgatttgacaatatggtgctacagtaaacatttgctaataatggattaattagtattaataaattcgtcttgcagttttctagcagaataatttgttttgttattagactatgtttaatacttcaaatatgtgtccgtatatccgatgtgacacattgagcaaatttttttttgccaactaaacaaggccttaactctcaaatattttaaaaatatcttgattggacacgagaaataaatgcattgataaatttttcagttacgatattgtgtgaaaagtcaacacatgtcataaatgaaagtataaaataattatttaaaaatgtaaactgcactgtggatccttgctgtgcggttatgtcacgacaattttcattttatctcttcacacctgaacttgactacgctaagcggcatatattctgtttttgtatccatttctcaaatctcaataacatgcaggttagtgagaatgcatttatgcggccatgcgggtgaagggaacatacaggaaatatcttactactgatgttcaatttttgtctgatgtacttgtagaatcatgtgatgattaattttagtgatgaataattttcaaaggtattaagtcaaaagaacaattgtcaaaggtgaatgtttattgaaaatatgttgaatagtgtttccggattatgaatggtgttgttggctctgagaggttggtcagaccggtggtgttggtgcggtttgatcgggtagcctgatggtcagactggcaaatttcgggaaggagtcggttttgggttgtgtacatataagaagaggaatcaaatttggattggaaatcaagtttgagataattggagtgtggagttatatggggttgttgtttccctggtttccctatatgattagaaattctagttctatttggattcatggctaggggaagccatatttcaggtataaataacagaggggttgaggttagaaagatattgactttttaggataaaaagttagggtttgtttagcaactttaattctaattcgtgagttaagagatgagtgctttatatgcactttgtaaacatattgatgtaattataaagttaatataatttcaaaagttttattggtttgtgtttttctggatcccggtggtctaatcggagtacattgcgtggttagatcggtggtggctgcagcggcaagagcatcggcattaagtaggaaggcggtctgaccggaggccagacactgatctaatcggcgggtagacgacggtctgaccggtagtgtaatggtggtttgaccagcgatgatctaattcgaccggtacgtcttgttcagagtctccatcaagtatttgagggaaatcttttacttgtgcaaaaagatttgtttttcaatgtccctaccattcactccctggtaggcatagatgttgttattcactttcgagtatgaataaatcatggccacagttagcctgaatatttgagcattttggttcatgcatcttatttgttgactgttggataacgtactctcttatatcacttaatttctctaacttttcctattgaatttagatagccaaagtaacaccggaaaacaaaaagaaatagtgactacaaaaactatgtttggcaaaattcaaatgaattagggggcatatgtatatttcaaatgaagagtcgtgtcaaacaaatataggaggctttccctgctttaaatggttttcgagctattttcatgaaaactgacaaaaccgctcaagagaagtttttgatcagtgaacggttttgtaaaccctgactgcaacccatctgattaggaacatagttcagcttttcattctctacattagaaggaaataactcataattctattatatacacctacatttatatgaaaagcatataattttaataagtggaaataagtcaaccctaaagagatgtagtttgactaccactatgggtgtatatactgtgtattttctgtagccataaaaccatatcatcctagaactaaatgttgcaacttgcaatagacttatccaaatctttgctcaattcctatccattggaatcaacttatctatatatttactcaatttctacctgcggaatcaacttatctagatcattggcgttgacaattacaactcacactgaaaggattactgattggtaattgtgtaattgttggcaccatagttgggaatcggagagagggaaaaagggttggcaccagtcctctatttttttttctcaatgtaccgagaagaaagggggcttagcaggaataataagatgaatgattgcgatctgtagcccatgtaagaataagaacgaaattttgcaaagacaaatgaaaatcaatgaaagtactaaagggaatggtgaaaaggaaacgcaaaatcaagtgaattacaataaggaaaagataattaaattacaataaggaaacgataattaaaaaatcacttattaattttattcgtcacgcgacgtcaaggcgcatatatattcccactatcctccacgcacgttatagggaaatggagacagaaacacgacgtgtcactatgcaattttagatgcgccaagaaaaaaaagaagatcaaattttggtgacacagccttacaatttcaagatatgcctttgtataggatggcattgacttttcacattacaataataccctagttgaataatgtattaatgcatttttctcatgtctaataagatatttttaacatcatggtagttactcagaaagcgaagcttgccgcactgtaaattaatcgtcaatattaatactttgtttgtactccatccattctataatataagacacaacccatccattccataatataagacacaaccacttttcttagatgttccataatacggagtataaggcatacatgcaagcatgaaattaactatgacatcttctccattaaattattacttttttaaatcctccactctcatgctatctaatcttattggatgcatgcattatatttattaggatgatccaaactacaagatgataataattatttcttagtttttgggttaagggtggttgtaccttatattttggaatggggtgagtaataaataatagccctccaggagtctggtacaccgtacaacaccaaacgataagaaagtgatttcatctcctcgttacgtgcatgtcacctaaatggtcatcaaattttttttaaaaaaaatagcaagatagattaatatgaaatataccactccacaaacattcaagttgaaattcaacatctacaagttgaaacaaaaagaaacaaatatgtaagcgaatgtacgataaccattttaatttgttccttttttgcaacttgtggaaatcgaatttggttttgcatgtttgttgagtgatatatttcatattaatctatgttgtcaattttttttcatattttttaatgactatttagatgacatgcaaataatgagacgatatcccctcgagggatgaaaattcatttcccggcacgatgtttatttctgtggagtaatgactttcacgcttggtttggggtgtggctgctaagaaaattggcatatatgatatattcaatgcaggtgcttccattttgttttcttgtttatgctgggagttgagaaaatcttagtccataatcaactggtcaagtgccgaggaattgcctgggtctcattgactctgttaacttgttccattggcggctgtaataagcctgggacagtgagaattagtaaaagaaatgactgtttaatttgcagctaaacagtatctcaatttcgaaatgtcattgtcaacaaccatgttattttccctttaaatcgttcggagctcacgcatctaaatcctaaaccacctgggttccatgatgagtcgtcgaatccatggcatgtgcttactcgtcctagccaccttcctctcttgcattgctctctcggcgggtgatcaccggagcgttctgtggcgcggcggctccatcgccgtggaggacgccgccgaaaacgtcctcgtgtcgccgagcggcaacttctcgtgcggcttctacaaggtggcgaccaacgcctacacgttcgccgtctggttcaccgcgtccgccgacgccaccgtcgcgtggacggccaaccgcgactcccccgtgaacggcgtcggctcgcgcgccgagctccgcagggacggctcgctggtgctgcaggactacgacggccgcgtcgtgtggagcaccaacaccagcggcacgccggccgaccgcgcccagctcctcgacaccggcaacctcgtcgtcgccgacgccgccgggaaccggctgtggcagagcttcgactggcccacggacacgctccttgccgggcagcccgtcacgcggtacaagcagctggtgtcggcgtcggcgaggggcttgccgtactccggctactacaagttctacttcgacagcagcaacatcctcaacctgatgtacgacgggccggagatcagcagcaactactggccgtcgccgttcaacaagtggtgggacaacaaccggacggcgtacaacagcagccggtacggcagcttcgacaggcgcggcgtcttcacggcgagcgaccagctgcagttcaacgcctccgacatgggcgacgagggcgtcatgcggcggctcacgctcgactacgacggcaacctccgcctctacagcctcgacgccgccgccgggcgctggcacgtcacgtgggtcgccgtcgggaggcagtgctacgtgcacgggctgtgcggcagcaacggcatctgctcgttccgtcccgggccgacgtgctcctgccccgtcggctacgtgcccaacgacgcgagcgactggagcaagggctgccggcgctcgcccgacgtccggtgcggcggcgacgacgtcgtcgacttcgtggagatgccgcacaccgacttctggggcttcgacgtcaactacaccgccggcgtcacgttcgacgcgtgccggcggctctgcctcgacgactgcaactgcaaggcgttcgggtacaggccgggcaccggcaggtgctaccccaagatcgctctctggaacggccggattccgatcaagcccgaccaaaccatctacctcaaagtcgctaggagtgtcaagaaccagatgatcaaccagtcgtcgtcatttctgcacttcgatggacacgcctgcaccgtggacgaacgggacgctagcgtcggcagctcgtacctgcatggcaggagcaacgagataaacttcatctacttctacagcttcctcgcggtcgtgttcgtcgtggaggccattttcgtcgtcgtgggttacctgtttgtcttccgagctgacccggtggcggcaggacgggtccgtgacgacgggtacagcttggtgttcagccatttccggaggttcacctacgacgagctgtcagacgcgacgtgcgggttcagagacgagattgccaagggcgggacgggatccgtgtacaagggcgttcttgaggatggccggagcatcgccgtgaagcggctgggagagctgacgcaagccgacgaggtgttccggtcggagctgagcgtcatcgggcggatcaaccacatgaacctcgtcaggatatggggcttctgctcggagcacccgcaccgcctcctcgtctccgagttcgtcgagaacggctcgctcgacaaggccctcttctgcgacgacggcgagagctccggtgtggtggtgttaccatggcggtcgaggtacaagatcgccgtgggcgtcgcgaaggcgcttgcgtacctccaccacgagtgcctggagtggatcgtgcactgcgacgtgaagccggagaacatcctgctcgacggcgacttcgagcccaaggtgacggacttcggcctcgtcaagctgctgagccgcgacgccggcagccacatggcgctgtcgcgggtgcaggggaccagaggctacattgcgccggagtgctggacggtgggccgcccgatcaccggcaaggccgacgtgtacagcttcggcgtcgtgctcctcgagctgctcagggggcagagggtgtgcgactgggtggcggcggcggacggggcctgggatctccagcggctggccgcgtggctcaaggagaagctgaagcgcgacgacgacgaggaggaggtgtcaacgtggctggaggagctcgtggatgcacggctgcgcggtgatttcaaccatgtgcaggcggccgcgatgctggagctggcagtttgttgcgtggacggtgaaccaaacaggaggccgagcatgaacgccgttgcgcagaagctcctctcgctgcatgatactcgctagagcatcagtgcatcatcatcagccatctgcaccatgcatgagcccagcatgcatcgatcacctttcctggaaggctggaaccccaatgcatgggactgtgtgtgtcataccaaaatgaaaaaaaaaaaacggatttgctataattgtggccacagattttctgtccaatcgcagtcgattttttggccttaggatggcatgtagattcgtgcttatgtgttgtatccgcgcgcgttttacggctcttccacagcttttgcctcgtcaattgactccgtgtgtgttgtttgatgagggacatgctgatttgaccgatggatgagatacgtgtagtaagttacaccataattacatcatatttacactacaattacatatgtaattttaaaacttacatatgtaattttggtatttacatagtaagtacactattttttggtgaatacaatgtaaataaatgctgactattttttgagggaaaaatatggcaccataaatatagctactccccaaaaaaaattgcttagttagactgttcagggtgtgaaactgtgagtgtagtagtgtacattgtcccacaatttatttatttatcaatattcactaattattctcaaaataaattaaaaatattggtgtacttctttatacgacctagtggatggttaagcggataaaatatataaaagcaagtcctacttttgtggattaacggatacggagtatgcaacaatcaggctgatggagtgtttcgtggggaaataggataatgtactgatgtggaagcacatggccccatttcgctgaagggaattcaatttttaaaatactgtatgcatctgcttgtgtgttatatatgtaaagagaggaaacgaagaacggaaaaataatatagagtaagaattttttttttcatttttagtggtctaatagaggctgagggacgaaagcgactataaagccctcaaaatcaatctaaaaagtaaaattggttgtatcttataattcgcgcgccttccacggaaattattggattaattccaaacggatgcaacttgatggcagaaatattggcactaagttgacattagcacactaaaaccaatcgtcgacggttccatttcttttctccaacgaattagcggtgttaactattatatgattgcgattgcgatgcatccagctggctggaataatgcaatgcaaaaattgacaaaacaattatgacaggatctaatcagaattactccctccgtcccacgataacttcatttttggatttttatgtccaacgtttaaattaaccgttcatcccatatgaaaaatttatgaaatttattttgaaaacatagtgacgcataaagtattattcatgttttatcatctaataacaataaaaatattaatcatataaaacttttaaataagacaaagagtcaagcgttgtatccaaaatctgaaaaatggagtcttcgtgggacagagagagtagtaatctaaagcacatttgtttaatacgcaacctagtttagtactaggtcgcactatcttcaggttgatctactagtacatggatgatcgatgctaaaaaaacgactttggttaatcgtgtttgtcaacacgaagaattgatgcacatatgtccaattagatggccacaacgtccaacttaacgagtcactttcgagtatgaattactccctccgtttcaaaatgtttgacaccgttgactttttagcacatgtttgaccgttcgtcttattcaaaaaattttatgaaatatgtaaaattatatgcctacataaaaatatatttaacaatgaatcaaatgataagaaaagaattaataattacttaaattttttgaataagacgaatggtcaaacatgtgctaaaaagtcaacggcgtcaaacatttcgaaacggagggagtaatcattgccccatgcggctgagcatgcacatttgagcatgttggtcagctcctcggctcatgaataatccacgcttatattatatgatttgtacggactgctggatacctgcgtatagtgttcacagtttagtggactgggttttgccgagttcatgtaatacatgaaaactagctagaaagtatcaggatggtgaatataatgcctgcatttgatgaaatccgaatctactcgcgtcaaaaaaaaaatccgaatctactctagctagctaggaggtgacacacacacacacatatatatatatatatatacatacatacactccttcaaaaagagggtagtaggttaataaaaatgactaatgatatgttaatgataattttctttaattaaaatctcattacaacgcacagacaatatgctagtcttacaatttactgaagggaagagctagccctgtcaaagtaagcagtgacgaccgagttagatgaaacatgaaaccctcccgttcaacccatttgaatagtaccagagtttgttggagttcaattaacttaattacttaagtcataatcaccttcagataatgtaatgcagaaatttgatttaactgacttcgttgtgaatggatgaatcacctcacgaacccctttcaacgtcgagtcaacaactttccgtacttcattcggaagagaatattttgtaaaatcctactttgcataagtttagacaaatcctataatataaagatatggctaaaaaatgcagtaccctctagggtttttagaaattttcacatcaataaaaaaaagagaaaatgatgggttcaaacttaatgatatagaccgaaagctcaattaatttaacagttgtatacatcaaatttaattctactttaactgtttagctccgtataaaattatgcggataatctcctagtgattgtgtgttaacaaagcacgctcaccatggaacgtgttgcgtatatatgtgtagcggtgtgcagtgtacatataatgtggaaataaaaccgctaggattctaggaagtttgatcgaaatatcgtgcagattgtaacgctttacttaattagttacgtacggcagctaggtcgccgtcgtccaccggagcacgccaaaccacgacgaaatacacaccaatggatcgtactagagcatgccaaactgcccattgccaagtcggattcagattaagtgacatagggtaaacatgtcacgagatgacatagcgtagatttcggtcctccaaaataaatccaatggctgagattcgtccacgtcattacgagttttcgaatttctttgaccaccgcctcggagcccttcttcaacaactatatgtgactttcttttcccccgagtttcgaacccctcgagttgaaccatgtagatctcctcctcctcgttgttgttgcggagaaagaccgtattcacgtctagttaaaatagatgcaagtcccctcggccgctactatatcgagaatcattcggatggttttgagcttgactgcttttacctgaaaccatgcggcactcaattgccgcacacgcaacgcagcgcaattcactcagccgacccacccttgtgggcaaacatgttgtgccgcgcgacgcgataacgatatttttcgccggcccggccgcctccacggtgtgagacgtgaaggcgatacggccgttacggccgttcgcgcgtaaaaatgccgactgagatgtggcggctcccggctcgggacggcgcatgcgcagcatcgaccaccatccgcgacggcccgccgccccgcgagagcgaacaaccacgggttgcgcggcccacgctataaggctacgtacaaggccgcgtgcagggcttggggttgggggatggaattttgggccttttggtggaatgaggggccgatacgttgcgttggggaagcccatcctatctgagagagttggagtttacacccattgggtcttaggcctgcctattagatcagcccaaatacgcccatttcaactcgtattcgatagctagagagacttcctttcccttaaaaaaaaaagtgagttcctttaagatttgagcacttttttttagaacaaagatttgagcactgaatcaataattaagtagtactactccctcaatggcggaggtaggtgtattagctggccggctcgctcccagcacgcaatgcaactctcctcgaccactgtcatgtcatctcatctaggccctatttgtaggccctatttggttctatgggctaatgtttagccctaacattttagcctcaaattagccctcaaggatccaaacaggtggactaattttgtatggggaccatcaagggatgctaatggggttaattttgcgtggggaccatcaaaatttgatatcctgaagtgccaggaagcaagctactgtatcacgctctagtactgaagccgaatataaagccttggctaatgcaactgctgaggtaatgtgggttcgtaaattgctagaagagattggtttgttgcatccaggaccttctcaattatggtgtgataatattaaagctacctatttgtcagcaaatcctgtgtttcatgctagaacaaaacacatagaagtggattaccattttgtcagagaacaggtggtgcagaaaatgttggaatttcggtttgttccgtcacaagatcaaattgctgatggatttacaaagcctcttcctgtgagacaattacaattgttctgtaacaatctcaatcttggagagttgagattgagggggagtgttagatgataagaatagttagctagatagattggttcttatcttcagtttgttgtaactaacagagagataggataagatctctcatcctttgtatgtaccacgctaggggttattcctagcctatataacatgcaggcgtacctggaggaagggtatcgcttccatcacagctaatggggttaattttgtgtggggaccataaaaaagcagctctctctctctcctctctttctactctctctccaccttttaaccttgaattagcacatggatccaaacataccaccttagcctaatgtttagcctaccaattcatgactaaacattagctctcaaaattagccctgggctaatcttccaaacagggccctagtacgccggatcgccgactaacgaacaggttgccgtcccttgtttaaataaacaaacaaatatttcttccccgttttaaaatataagaaaccgaatgtgatttactataataaacaggttgccgttccttgtttaaataaataaactgtgatattttttaatattataaatctaaaccgatcagacctaagatcggatgggatattttctagtagtataccgattcttaatagtaggaaatggcttatccgttttcggtttagtccctccttcccagtaccaaatgcggcctctgctgtgcatcggtgcatgtgccttatcgagttcttcggaaacttctgtgtgttgcgagttactacttgtttcaaaatagcactattttagaaagagaaagtaaagtctaacacattcacggctaagccggcaaaattctcaattcatgttaaggacctctcaatgattgagataatttgaagaggcatttcatttggcttctacctcttatatgattcaggcagcaatccccgaaaagtaatatgattcaggcagcacacaacgatttagacaatacgcattccaaatcatatttatatattttcacgatgtaatcatgcattacaaataatcgtgcgaataaacaaataagagcaaatagttagagaagctgacagcctgcctaaccactatagtaaccaaatacgaacacgagcagataagcaacaactcgtcacgcgtcaaccgccgcagccgccgccgcagccaccgcccccgcacccgccgccgccgcacccgcctccgccggagtcaacggccgaggcgatgatggcgccggtggcgagccccgcggcggcgccgacggcgagcccggctcctgggccgaacccgctgcggccaggcctcccggcgttcgccgccgggtacgcgtaccccgcggggggcggctgcgccgggtagccgtacgcgccggcgggaggcggcggcgggtacccctggccgtagtagtagacgtcgttcctgttcttccgccgctgcctcttggccccgtccgcgcagccgaacgcggcgacggctgccacggccaccgttgcggcgacggccaagatcaccaccgcggccgggctgagggaggcggcggcgcctcttccaacgccggcgtgaagggcatggagagccactcccgctctcaccatggcttgcgcgcccgataagagaagagatggagcgaatgaatatgaatgcgtgtttaaaagagagatgagggtccacggatttggcatgattggctccttttggtcaaagtctaccatatttgattattgaggagtactactactgtatttttttttaggagagtagtatactataactaatatcctcagatatgtacgcgaatatttagtattcaaataagtaaaacgactcgtacaacttgagaacatcgtgccctccagcatctctcaacgtcaggaaatttctgagcctgactggatgtggatgaatgtctctcccatgcaattgcagctaagcccaagcggttgataattactacctcctatagatgacgccgttaactttttctcacatgtttgaccattcgtcttattcaaaaattttatataaatgtataagatataaatgacacttaaagtactatgagtgataaaacaactcataacaaaataaattacaattacgtaaagtttttaaataagacgaatggttaaacatgtgagaaaaggtcaatgtcatcatttattaaaaaacggagggagtatatataaggaacgcgttagggagggagctcaggaggatatgcgaatagataacaaaagtcaatagcttcaagcagttgttgggatggagtcatggagattaattttctcggaccacttccagttgctcatagctaggttcgttcgttgactttgtgaaatttttaccttcttcctgtgcactctgagaggcagggtttaactttccaatttcaaagtaaaaactgctcctcggttttgccaaaatccgatcgaaaatcggtaaaaaccgatgactttcaattaacaccatacgaaaactgactaataccaatccttttcacaaaagtcgaccggttttcgcgaaattccagcggtattgcgaatcctgctagtgagaggcaatggagccgccattgcagacgaagatggagcaggcaagcaagatacgagggaaaacaaaaagattattctctccatacttttcgagcaccaaattccaccctacttactcccaattctgcacacatcaaccatgttactctccatgctttggcataatatgctcccggccggtcatctttccatgttgcatcgacgtcatactcactcgaacgatgtcgacactggctcttggagaaaggaacgacatatcacatatgtctatgatattctatcccttcatcaaaccaacaggtatacaagattatcactagctagcactgcaccatggctagagcccaatttcgctctcagctagcttggattgtctgatggcgacggaagatatttttttgccatgctcaagagatctagtcggccgatgatcaaaacgatgaaagccaccaaggcacaaaactcgatcatcatggctgtcaaaatatgcctgacgcactcgctggcatatgcatctcatccaggattagatagttgtttcagatatgattgcacaatatcctttaaatccagtcgatatgttatagcgattctgaatgacctctaccgtacttgttgtgcatgcactgaaagaactgaaactaaaatatgcaagcatgaaaaaatcgcaatcatgaaaggatcaagcatcaagtcacacaaatctgaaactgaaactaatttcgaagcgagagagattgagggagagaaaagagaagctggagaagccataataccacttgcaggtgggtctcaaaagggtttttatttttatttttgtatatagggccacatagatgccatgtcagcattaattgaccccattaactcgccacgtgagataaaaccgttattcaaactgctcaggaactggttttgatggttagaggatgctctgtagggatgcaaatgaacctccacctatagttgaaggaagtgaagtggacttttcccattcgaaatcagtgttgggccagttattgggttttaaagcaggccttagaaattgtttcggacgaaaaaaggctacccgattcggtcaaccttaaaaaactgcaactccggttctctatggcatatgctttccaaagatcgacaaagcccatcacaattcgcacgagaaacataagaagtcagctgaaaagcatcagttgagttggaccagtccagcagagataatatagtataacgaatctgaataatagtagttttttcctactaatatattgacgtgcaatccttttacgcgttcgaaaaaaaaagaataatagtagtttatgttttatcctaattctagattgtatttttttttgggaacggatggtgtaaacctgaagattcaacggattcacagaggatgttccaatcacagctttttagtctcgacgttcgagcagacgccgcctgaagcatccgtaggcgatttggtgattggcgagagctccgactttcgccaaagattcagcgtttgttattgttagtcaagaacggctgcgcggtgcgcgcgtacgtgtgcttttcctgatccactaattctcaggccatagctgcagacagtcagacatcctctgatcctctccatccagagaggcaaaacggggcctcttatcattttggatcctccatgagatgagctcaatgatttagctgcgaaaaacagctcgtcgacatgcagtaagaatgaagaacatcaagctcaaggaagttatctagattctactagacaagtaagccttttttttttctctgtgcccagttgatctcttcttcatttggttttcatagttcagttgtgttgtgatcttcttctgtgttcctcagctgcaaaccaagttctactggttgttcttctccttttcagtggaatcagaccaagccttttacgtgttcttgaaaaacatcgttctgagtcttgtagacaccataaacaaacacagttgacatgtgttcctgtcatgcaggccacaagtgattcttttgagttctgagatgattttgttcatgcatgaagtcctttctgaagtttattatggtgaactaaatatattttctgtaatccttaaatttaagcacgtggtgtagttccatctgttggcacatttgtaaacttaattcgtatttttttttgtcttcacgccggccgccgggcggctaaatccgtacaaagaataatcgcccacactcacccacacacacacccaaaagaaaaaaaaaaggctccaaaacaaagcagagttgttagttgttcctttcttttctatgaggaaatcaaaagcaaactaactgtgctcagctcagattaattctgaattaatcaaactaatggtggaactggtgaaatgtgaatagtacaaactatcaatgttaccttacaatcaagatatattactgctaattaaaatgtgcaatgatatctctgatttttatgcttgtctgatctatgcaatgacgtactagtacgcaaactccagagtaaagacaagctcaattagagaacgaatgtgagcatgtctactgctgttgccataagtaagtaccaagattaattagtactatcaccatggcaaaataaaagaccaagattttgcttatctaactgttcgtctcacctcactggtttcttcagtatcgtcagtctcggcaaccgcggctgcagtagtgatgctcgctctgatcaagcgatgccgccgctacaggaggaagatgaagaagaagatgctagctaggatcgcccacgaggcgaccgaacagcaccgcgagatggaagcccgcgacgcggcggacagcgtgatgatcgagatcggccccgtggagaagttcctcaacgagatcctcagcgagaagccgatgcgcttcacctccgagcagctggcggcgtgcaccgggaactactcgtcggagctcggctccggcgggttcggcgtggtctacaggggggagctgcccaaaggcctgcaggtcgccgtgaaggtgctcaaggtgtccatgaacaagaaggtccaggaggcgttcatggcggagatcggcaccatcgggaggacgtaccacgtccacctcgtcaggctctacggcttctgcttcgacgccgacaccaaggcgctggtctacgagttcttggagaacggctcgctggagaagtacctctacggcggcggcggcgaggacagggggaagaagctggagtggcggacgctgcacgacatcgccgtcggcacggcgaaggggatcaggtacctccacgaggagtgccagcagcggatcgtgcactacgacatcaagccggcgaatatcctcctcaccgccgacttcaccccgaaggttgccgacttcgggctggcgaggctgggcgagcgggagaacacgcacatgtcgctgacgggcgggcgcggcacgcccgggtacgcggcgccggagctgtggatggcgctaccggcgacggagaagtgcgacgtgtacagcttcgggatggtgctgttcgaggtgctggggcggcggcggaactacgacctcgccgcgcaggcggagagccaggagtggttccccaagtgggtgtgggacaggtacgagcagggggacatggagtgcgtcgtgtccgccgccggcatcggggaagaggacagggcgaaggcggagatgatgtgcaaggtggcgctgtggtgcgtgcagttccagccgtcggcgcggccgaagatgagcagcgtggtgcggatgctggagggggagatggccatcgtcccgccggtgaaccccttccactacgtcatgagcggcggcagcggcagctcgacgctgacgagcagcagcacgaacctgagcagcgggggcaccactacaggaagcagcgaggtggcggtcagccttcctgccaaaaagtccacggacgtcatggttgaatagtctaagtccaagtgaaaatgttgacccttctccctttgtacaacggtaccagcgagacaaagatttcgtacatattttatcgtcataatgttgttgcaattatatttgttaataatgtaattattttttacctctgtttatgagtttactagtaccggattttgaatcactttctaaaaaagaataaaagaaatgtgtgaattttcgtaggaaaaagtctttgcctccctcaaggtaataattctttccctctctatatatttatcgataaattttctccaaaatatttatcagatataagtatagtaaattatgattaattacattataacttgtatgtaattacaatgtacacggtaagttgtgtgttaaaatccctcgttaccatgctatatttttgtaaaatagagattgtgggaccaaatcccctcatgtgcgcacactatgatttttgtcttcctcgcttgcataagacttaaaacagatctaacagtttaaaaatatatgaaagttacacataagatatactgtatttacatgtaagttagtacaatataattacactatgatcacactgtatttacatatgttaaatttcagagagaaaaattgtcaacaaatatatagcaaaatcgatcctcctctacctctgatcctcccaatgacagtcagggcccacatgtctaacccatcttcctcgctacagagtacagactgcagagtcgaattgagtcacaccgaaacgtttaaaaccaaaattagcggaacaaatacggcactataacagtctaacacactaaaatgttgtagacatgcacttatacacatcagtaggtgtacgtctttgaacacaacagccttgctgacaactcacacccgtgctgtgcaaacgtggaagaatcagaaaacgggaattcgtttccgacacgtctacctgccggtacgagccgacgaaccatccgattccgtggtggcggtagtggtggtcggcgacgagccggcggcgctgtacggcgcgaggtgggcgaacgggttgcgcggcgcggcgatgtggtcctccccttccagcatccgcacgacgttgcccatggacggcctgtcctccggcctgtactgcacgcaccacagtgccaccatgcacaccctctccgccttctccctctccctcccgccgcccgccgccgccgccgtcgcgcgcgccagcacggcctccgtctcgccggcctcgaaccggtgccacacccaccgcgggtaccactcctggctgccgtgcccgtgcgcgccggccccggcgccgagctccaggttccgccgcctcccgagcatctcgaacagcagcatcccgtagctgtacacgtcgcacttgtgcgtcacggggagcggcatccacagctccggcgccgcgtaccccggggtgccgcgcgcgccggtgatggtcaggtgggtgtcctccctgtcgcacagcttggcgagcccgaagtcggacaccttgggcgccatcccggcgccgaggagcacgttctccggcttgatgtcgtagtggatgatccgctgcgcgcactcctcgtgcaggtaccgcaccgccttcgccgtcccgacggcgatctcgtggagcttctcgaacccgatcctctccgccgccggcgacggcgacgagtcgaacaggtagcggtccagcgagcccttctccatgtactcgtacacgagcgccttcacgtcggcgtcgaagcagaagccgtagaggcggacgaggttgatgtggtacgtcctcccgatggtgccgacctccgccatgaactgctcctcggcgcgcttcccgagcgtgctgttcagcaccttgacggccaccggcgcgccgctcgggaacacgccgcggtacaccacgccgaacccgccggagccgaccttgtgggcgtagctcttggtgaaggcgcgcagctgccgcgcgctgaaccgcacgggccgctcgttctggaggccctcgatgaagtggctcatgctgcccatctcgacgacgtccgcgtccgcgccgccgattccgccccggctgctgctgctgccgccgccgttggcgatgggcgtgtgatggtcacgactgctactataccacattttgatggcgatcttggcgcacttgtaaatcgcaactatggtcacgactgctactataccagtcgtgatcaccccaactgcgatatgttaatcaaaattttgttactacaagcgacatagatgtagataataggcgatgcatatgagtacatcgatcatacttactgagtgctaaagcaagacttccattggcgatggccatgctgatgaactaccaggaggggttagctacagtgtgcaaggagtgttggctacttggcttatgaagtgtcttcctgccttgtgagttgtgaggatatttttattggttcattttgtttgcagctagctgatttgactgtttctgtgtgccactgtcaactgtgctagtgtgagagaaaacaatgtttctgcactcttcatgcttacgcgatgaacacaaagatttgataaattcaataaactaaaattagaagaaggaatactatgtatcctgtttgattggtgttgactaaactagttccccttcctttctcaccaagtaaactattttaatgattttttaaaagaaccgtataaataccatgaggcttcattttttttaaacacagtacaaacgcagacacttatagaaaaaattacaaagttgtaaccctaggagtaggagcagagccggttctatgcaagaaaaaatagtgagaccatacagtattaccatgtacatatagtcgtgatcacaccaactgcgagatgttaatcaaaattttgttactatgagcgatatagatgtagataataggcgatgcatatgagtacatcgatcatacttactgattgctaaagcaagacttccattggtgagggccatgctgatgaactactaggagtggttaactgcagtgtgcaaggagtgttggcttattaaggcttctggggagataggggagattgagtctcgttttccgtgcgcatgtttttcaaactactaaacgatgtattttttgcaaaaaatttatataagaaagttattttaaaaaatcatattaatccatttttgaaatttaaaatagttaatactcaattaatcatgagctaatggctcaccccgttttgcgtgccttcctaccttgtgagttgtgaggatatttttattggtcattttgtttgcagctagctgatttgactgtttctgtgtgccagtgtcaactgtgcgagtgtgagagaaaacaatgtttctgcactcttcacgcttacgcgatgaacacaaaagaatttgataaagtcaataaactaaaattagaaggggaatactatgtatcttgtttgattggtgttgactaaactacagcttccccctacaactgattatgcttccattttccccttcctttctcaccaagtaaactattttaatgatttttaaacaatggtttgttaaaaccataccaccctatatttacaaaatttgagatatgccatccatatcttaattacatgtaggacctacatgagtcaatgacatgtgggtcagggtgacatatcataaattttgcaaaatttgtatggcatggtttaaattgtccctttaaacaaactgtataagatgtcatgaggtttcatttttttaacatggtacaaacgtagacgttcatagaaaataaccacaaaattgtaaccctaggagcagggccagtcctaaatttttggaggcccaatgtgaaaaaatatagaagccctacaatattagtgtgtgtgtatatagatgtacgaggacaaaattaactttattttattatatggaagtcccgtgagttcacatacgctcgaagtgaccgagatcaacagaacattcatacaccccaactgcgagatgttaatcaaaattacaaaaaaaaattaaagagttaatacaactgtgagcaccatagataagctaattatcgatgaacatataagttgtactccctcctttttttaatagatgacgccgttaactttttctcacatgtttgactattcgtcttattcaaaaaatttacgtaattataatttattttgttatgagttgttttatcactcatagtactttaagtgtgatttatatcttatacatttgcataaaatttttgaataagatgaatggtcaaacatgtgagaaaaagtcaacggcattatctattaaaaaacggaggtagtatggattatacttactgatcgctaaaacaagaattcctggtgacctggtctgaccgccatattgatcagttaggactggatagcttcagtgcaaagagggatggattattggcttgctgtgcctgtgacgtttttttagttcatttaatctgctttcatgcttgtcatttttggacatttatttatcacgtttgtcaacttttacatatatagttcttccaagtgtgcaacgaatggttcattcggagagaaaacaaatagtttctgcacccttcacactcggacgataaataaggggctgcttggttggcggcttggaatgccacgccacggcgtggctcgccacaggagtgtggcggacgtttcgtccgcctcagaaaacactgtagcgtggcgaaaatactgtagctatggcattcaatggctgggatccaaacacacccttaagaatatgagcaagtcaatggaactgaaacttaagagaggaacttagcttggtacgatgatagcgtccgctgcgatgcatggaacagcgtgtattggttctaaaaaaaaaaaagaacagcgtgtatttgtatgtcgacttccattttcctcttcttccctctcagaataaacagttttattgcttcttacatcaccggcaatggcgttgatcaactgaaaagtttaccatgtcaatcagaattcgccctccttgtgaattgaaaattttcaacttgtgtcacaagtggttctgttacatgaacagacagataccgtcataccaagttaccaactcgtatagtgacattttgatgggccgcattcaaagcctcaaccttttgtggggccaagagcccattaatatgctagcaatttctctaggaaacatgtttatttacagtacctgtagtacaagatgacacgttgagtactccctccgttttaaaatgtttgacaccgttgactttttattacgtgtttgaccattcgtcttattcaaaaaatttaagtaattatttattcttttcatatcatttgattcattgttaaatatactttcatgtacacatatagtcttacatatttcacaaattattttgaataagacgaacggtcaaacatgtgctgaaaagtcaacggtgtcaaacattttgaaacggagtaatatttgagtgtctgcactccattaacgttcccgttcaaacatgacatcatacatgcacttgctgtcataaacttgatagactcagccgcttcctttggattgactgataaaattttcaactcctattacttgctgatcctgctggtgttctgtaaaataatattgcactgcgtgttctgcgtacacacgtactctaaagtttgaacgacgtgtaacggcatatgcatatgttaatgatcctaagcagtacgcgtaagcattttttacttggtagtttagagtatgtgccaagtttctgtaaattctccctgcgataccgacccnnnnnnnnnnnnnnnnnnnnnnnnnnnnnnnnacaggtcaaacgaactgcgaaattgttccgtgaacttaactgataattcaagtttcaagtttcaagccaagaaatgaagtacacctctcttgctctaggtaagcatcattcatgtgatcgtctcgtgtgcttgacttggttttttttctcgttttaatttcgtttaatttctaatggaaattttgtgcacacatgtagctgggattatcatcggtggcattgccgccatcctggtcttgaagttcatcatgagatgcgtggaggccaagcacgccgaacgcgcgaggcggcgggaggaggaggcagtgccagtgtcgccgccggcgagcggcacgtacagcagcgtggacgtccgcgtcgagatggggtcggtggaccgcttcctggacgacatcctccgggagaagccggcgcggttcacgccggagaacctccgcgagttcacgggggactacgcggagcggctcggcgccggcggcttcggcgtggtgtaccgcggcaggttccccggcggcgtgcaggtggccgtcaagatcctgcaccgcacgctggaccgccgcgccgaggagcagttcatggcggaggtcgccaccgcggggcgcacctaccacatcaacctcgtccgcctctacggcttctgcttcgacgccaccaccaaggcgctcgtctacgagtacctcgagaacggctcgctcgaccgcgtcctgttcgacgccgccgcggcggccgccctcgagttcgacacgctgcacggcatcgtcgtcggcacggcgcgcggggtgaggtacctgcacgaggagtgccagcaccggatcatccactacgacatcaagccggggaacgtgctgctcgccggcgactacgcgcccaaggtggccgacttcgggctcgccaagctctgcagccgcgacaacacccacctgacgatgaccggcgcgcggggcacgccggggtacgcggcgccggagctgtggctgccgctgccggtgacgcacaagtgcgacgtgtacagcttcggcatgctggtgttcgagatcctcgggcggcggcgcaacctcgacacccagcgcccggcggagagccaggagtggtaccccaggtgggcgtggcagaggttcgaccagggccggttcggcgaggtcatggcggcgtcggggatccggagcaaggacggcgagaaggcggagaggatgtgcaaggtggcgctctggtgcatacagtaccagccggaggcgaggccgtcgatgagcagcgtcgtcaggatgctcgaaggggaggagcagatcgcgcggcccgtcaacccgttcgcgtacatggcgaccatggacgcgatctccagctccagctccggcggcggcggcgtcagcaccgccacctccgcctccgcctccggcgactcggcgcaatcgactcgacatgacatctgccattgacatatgcttgggacaaacgtgcatgtgtacccattttcgtgtagtacatttggatgagctgcttggaactttgaatagtatgtaaactgataggcctcggttagaatttaatatgcttgaaaaattgcagtttaaggaaatttcattcaaaaatttaaaaattttaaatcgcacgtacattttaccatggcgagatccctctgcttttgaactctcaaaatcaaacatcaggtcagctggtggcctggtaatgtaactcgattattattgggccattcggcccagcattaaaatgatgtgaagaacagcccagcccagcacacagaatgcgtcttcgtcgatgggtggcgtacctaacatcgacggcggataaagcgtaatcgacggcgtaaggcggcgggaggggaacattttccagccgccactctccccccgagagaagacattccttcacccacctacccaaacacgccgccggccctgacccaatgcgtgcgggcccaggcctatccactggatcaacgggcccacatttcatcggctacctcacgttgtacatctggaatctggagcttattaccaaaaaacctcgtgtacccaacacgtcagaattgtgacccatacgagtcacagacaactgggccccaatgcctatccggacccaccgcacagatacagttaaatcatcttctgttgatgaaagattagcagcggaaagtcgcatcgaaactgaggcggcgattggattgtatgtgtcactgcaggtgggcccgtgcacgcgaagtacaagggggtgtcccgcttgtcataggatgctgcacacgcacgctcccgcataaagcggtggacttagcagttacagtagttattcccccttcccaaaaatcgcctcagattttctggttcgaaatcctctaccccctcccatggcgtccctcttcagggctcgccgccggcgatcgccggaggacgacggcgagggggaggacggatccgcgtccgggcgggtcacccgccgccgcctgtcgccggaggagggcgcgctgtcgctggccgaggcgtcggcgtcggtggccgcggcgggggcgggggcggagagtagccccgggtggctctccagcatcgtgtccggagcgaggagggtgatctcctcggtgttgttctcctctcccgaggaggccgcctcaggggaggaggaggaggacgacgacgaggaaggtactccttgagcgccgtggagtagccacgctgttcctcatttcagatttctgtttgtcactctctccttgcttgcttcactgaactgtttcgtctacttgaccgcccgagttgtgccgctgcggttacttgcgctgttgggtgctaattacgtcttcgctgcaaagctagggtttcggcttgcttgctctaattagagtagaagtagtggaattttgataattcggggtcagtagcagagagagagtgtgcgctgacggttttttcccttagtagactgtggttgggtaagaattttgcggttttgccacattaggtggaattggggataagcttggtttgactccaattacacagtcctagtgttgtggaattagaatttgaagtttacaatgtggagtgctccggctgctgtattcatcaatcgatgcttcagcagcatcacacttccatttggtatgcttgcgaagataccatcattgattcatcaacacaaaattaaaggcatgtatttggttagctgccaccatcctaaggtttataatgtcctgaaaattatgatacgaggtgcagagggcttaatttagatctggcatggttgttttcagaatcaacctcatttgggaaccacagttacttgcatgaacatcgagttaggatgacatggtgcatattattggaattcagaaaataattgagccatcttttgtcacatatgctagatatttccagaatgtagaatagttgagctatttgttattgacctgttagttctattgtggtttgagaaggtgctcgatctttagctttgtaatggtggacagcacttttaattgaccttagaccattttagagggatgcactgcagactaatcagtgttttgtacttttgcatatgaaggaacagtgtttccaattctgttgagccattttacctttcgtaaactgttcgctcacacaactacattgtgctgcccacattcagatgaactatttttgggatggtttatgagtgcgttcatttgtaatacctgtgcagatgaaacagaagacaatcatggagcaatagtttcatacaatgagtcaaagcttgccattgaggaaatggttatgaaggagacattctcaaggtaactgtaatgctattgttctttacatgtgtgcttagatgtatatttttttccctggacaactgctaacgattaaatttaacagtaaagaaatctagtttatttctcatttacaaaacagttctgataatacaagcataggtgcatatggcctaagttggagctactcttcttttgattttttgtactatgaattctatagggtactatgaattaaaagggtaaaactattcaaatttgagttggagaaggaatcaaagtcatgatattattgcaactggataagatagacactctgtagcagtaggatgaggaaaattgcacttcaaagtactaagcatgcaattctgcctgtggtgtgtgctgccgagatactgagaattttatgttgaatagatccatacatattctacgttttcttaaacagagtaaatttcacagaactgcaattattttgtcagaactatcactttgctacaactttaactgctatatcacaaaaccgcaatcataccaaacaactttatcacaaagcagcaacacccttatgtgtgtatgacatgtgggcctgacttaccagcatgaatattgcatgggtgtgacaggtgggccaaaaacttgtcggacaaataaagttgcagctttctgataaaatcctttattatagttgcagttctctgaaatgcctagctaaaggtgcacatggttgcatgagtattgcatgttacagtaaactgataattttggcaaaatagttgtagttatctgaaatttactctaaataaaatccttataacctattactttccttctcaattattcatgtttatttttatagggatgaatgtgataaaatggtaaagctcatacagtcacgagttacagatgctgcacttcctgaagcacctgagtatggaacgccgaaagaaattccaaccaggaatactgttgttggaaatgatttcacgggagcttggcgttccttgagtcgccacagaaatggcactgaaccagttccattctctagtattggatctggtagcttttctcctggttctcctctccatgcatcgcccgagctattaagcgcagcagttatggaagcaaagaaatggttagaagagaaaaggcagggattaggttcaaagcctgaagaccatg

SEQ ID NO: 9063 - DNA, 11075 bp, Oryza sativa
gagaagaaaacggaatacaaaataatagcaggatgattcatggttttttttgtctatccatctaatcaaatttgatcgaaatcacgctaatgatccatcaatgtgcctgatgtttatacattttttgcctgctgctactgcaatctgatatgtgttcagagtcatctactcctagcaatgggaaatttaactatttgccactcttgtgacatggcaattaacgatttgccacaccgtgtctatgacatgtgggcccttatgtgtctatgacatatgggcctagtggcaaatcgttaagcaccactcgtaagagtggcaaatagttaaaagcccccctagcaattgaatgcgcatctatagatgcaaatgttatgtattcgattctttcttcagtgtcaaatttatgccttcgtgcccccaactttcgttcttgattaatgaaaacatccttggcaaatgctttcgtagttgttcgtctttcataaatccaagaatttcacctctgactatgaaatacgaatgcccccgactgtccctattaatcattactccgatcccgaataccaacacaatagaaagaaaaattgaataagacgaatggtaaaaagttaacactgtcgtaaatacggaaggagtacgtcgaactagcttatgtaatttacatttgaaaattgaaaataaaaattacaaacaaatctactcaaagttacattataactataatgcaactacactgtaactataacataataactatgctgtaattttttaggtaggcgggccgatgctataatgtaattttctctttcggtgttgctcaagtattggtttgttgggtagcgaaaaaccttcactgcgattgtggtatagtagagaatacaatgctcctgttgtagtatgtattactcagatggaggtagagcttaatgattgccgtgtgaaaaagactccgtttgtgttttgggctttctccaaaagccgggtcaatatatttgatctgatttcaaaaaaaaaaaaatgccgtgtgaaacgtgatcgaggagttaaacttctgtacatatagagagagagcaaacaaatgcacggcacgtacaacgtcgtatactcgtatctaagtaatctaaggaacgtgaaaaacaacagattcgtcaaatttctagcagatccgaaaaaaagaaccacgaaacaatcgagccgtgtcccttccgactccaactcttccccggctatacgtacggctccgcgttcgcctccgccttcataaaccaccgtctctttccccccatcgaaagctacgatcgattccaggtcaatttccaacttccaactcgcgtcatcgcggcgaaatctaccggcgatcgatatatggccggcaacgagtactccaccaaggcggcggcggtggaggcgatcgacggcggcgaggaggtcgtggtcctggcggggaagctgctgctgccgagggaggtggtcgacaagatcctggccatcaagaggaggcccttctccttcggcgacgacgacatcggctcggacgacgacgagctcagggagctggccgtgcagcacgaggccttgcaggacaagttcgccgcgtgccaggccatgatccgggagcatcgccacgagaacaagggctacgccattgtcgacgacgagttgcaggtcaggatggccgtgaccagggccctgcaccccttcgttgagcgctaccactgggtcggggaggaagacgaggaggaggagcaggtggctgacgtcgttggtggtgaggaaaagctgatctgagacgcaactgagaattgcagagctttgcctatcttaatagcattacaattaatacgtactgtctcatcggatggcctaatcagtcaaagaaaaaaccaaattttgaattttcaaatctaattttgagtttgattttgagatattttcaacgtagtttcttttacaacattggcttttaagtcacaagaacacatttataaaaatttcacctataaattcatttttatttcctaataagccgttttggcttattaggaaataagccaaacgatggggacctcactttcctatgctgagcttattcagtactccgtatctatcgatctacatactccacatgtctatgtgatggctatttatgtatgcaactaccccatctgtttcatgttatattcagaccgtgtttagttccacgctaaaattagaagtttaaagaaattgaaacgatgtgatggaaaaattagaagtttgtgtgtgtagaaaagttcgatgtgacggaaaaattgaaagtttgaagaaaaaagttggaatctaaacagggcctcaatagtagtatctaactatctacatcattcaaataaaatattgttgcaaggtaaataaatgaacaaccatgtgccataatacaactattatattgacagattctttgacatgcttttcaaacttattatcaaaatatattcaatgtttcatttaatgaaactaatttggtgtataatgttaccaaatttttttataaacttgatcaaaaaaaaatcctaattagggcatcttcagggaaggctgaaacaaaataattatcatctatattgcctctatgttacaatgcttctccaagtgaccagcataaatgtcataaacaaacattacagtacatgacataaggaaaaggataaaaaaaattcaataaatatcacagcaagattaaaacatcacaaatcaactatatgcatcagcatcagaccatcagcatgcatggttaaatcttgatgataatttaacaaatgaacatcacatgcatcgtcgatcgttgcgctaactgaagataaatcattatactatttgacaaaaagttttttataatactagatattgatccaatttcttcaacacaagcttcatcttcaccttgtcgaacacagcgatcgtcctggttccttcctccaattccttgggtctcacctcgaacgccctcgtctcttgattatagacgctgacatactcggcgaactcgccttcctccggtggatcatcggcgaagattttctcccagacatgtgcccgccacagcctccgctcctcctgcagccgctgcgtctcctcgaactcgtcgacgtcgtactccacctcgacgaagccgttgctgccgtactcgacgcggaacttggcccaggatttgcccaggtggccttgaggatgccgttgacgtgcaccagcagcgcctccggctcgtcgtcgtagtagatctccgggaggtggtcctcgtcggcgtcggcgtcggggacgaatgggaatatgggatgtatctctcgatgtccggggcgtcgtcggtgcagagctctgtacggtcgaggacccactcgatcggcgttctcctgcgatagccgcatcgtcgccaccctcctcctcaccgccgccgccgccgtaccgtcggagttagggcacgcctcctgctggccatgctgctcgaccgccgccgccgccgcggccgccatgatttccccggctcgccgcggcgatacatttctgaacgaactcttagagccgtggcttatgtaaaataaaatgggccggtccgtacggttttcgggttaccggaaaccgaactagagttatcgctgcggccccctatccgtgtcactgcacgagcacgacgggggaactattctaatccctcgaggggatattccctcgtttactcaaaaaccatctaaacagttatgaaaaattctagaaaaatttgacaacatttatacaacacatatatataactccacaaaatcttaagtccaaactcaactcacacgtcgagatataaaaaaaagacaaattcagcgtatgaatagtaacgtactgtttatatataaatttgtcttttttgtttctcgatgtgtagatcgaatttgaacatgaattttggtggactagtaggtataattatactctacattgtcaattttttttagaatttttgacaactatttgcatcgaatttagaagaaaaaggtatatgaggggatatcccctcgagggattagaatccactcccgcacgacggcctcacgttggcatcttaaccgtcctcggccgatcggacggctccgcacacagggtcgctggataagaaaatagccgaaattttgacaaatgaccctttcaagaaacttaattaaagataaatcgtaccaaaaactaatttagaaaatgataaaccgtgacctcgacgtgctttaacgtctcgacgctgctataacgttcatgctgagatcttgttcgacgaggcacaaattcgtcggaggagctcgcattcaccttctgtacaatctgaaatcacgcccagtagcgttcccggtcgtaggcaagcgagggcgcaaaactgatcgccctgagagagcgagggcgatcgctcgcccagtagcattcccggtcgtaggcaagtcactcagtatcattccatcgtatcctctttttttttcttttttttttactttaatgcatataaaaccaaatgagaccaataaatacatgcagcttggtgattgcagcacacagcaatatggaatggacgcagcagtggtatgcgccactatacgccattggcaacactgtgcctccaccgtatctattcatccttaccaatgatccccactagattgagccatctcacctaggtctgagctttagcataaggcaaagttcaaaggcaatatatagcacttgagagttgggagattggtattatagggggctgctataggcaaatgaacacaagaaagtttgcaatttttcatggtacgaattgaacagcattgaaacctaacaagtgcatgcactgttaacaagagatgaaaaaatatgcaaaactttgtaatttcacagcgttcaggcactacataatttcacctatctttccttcaattaaatagctaaacttgtgatttttaaagagaaaaaaaaaacagaaaggactaaagaaagttcacttataattagctaattaaaacatctcatattgcatagatgggccagcagtactcaagattgatcgccgattaagatccaaaaagataatcccacaataacaagaaaacaatgacatacgcttgcataaggaaagagatttgcagaatgcattgaattatcattaatcttctaaaccatcattatctaacttataacaagtgacaagtaccaacatcgcaatacataagtctgcttcagcaaatgggaaacctattaggcactcgttgattcagttcttcttcacgaagacaaaacgcttcttctccttatcgaacacaggaaccccaatattaccttccacttccttcatgacaaacttcctcctcttctcatcgtacacttcgatgtaatcgccgaactcgccgtcctcgatcgtgggaagaatatcagccatctcctccgcgagcatctccgcccacaacgccctccgctcctccctcctatgctgcctctgctcgaagtggttgtggtcgtactccacctcgacgaaccccttctcctcgtgcttggcgcgcacccacttctcgaagtccctgaacttgtcgaactcgtccatgaggagactgtcgatgtaccgcatcagggccttggggttatcgtagtaggactccggcaggggatcctccgcgccggggacgccggaggggctctggaggaggaaggggatgtacctcgagatgtcgggcgcgtcgtcgccgcacagctccttccgggcgaggatccagtcgacgttttcctgcgacagccgcagcttcgccgtcgccgtcgccggaacctcctcgtgggaaccagttgccgccgcagccatatatacttgttctgactcgccggcggcacgcagagggaagtttcgatgcttggattgccacaaaagggaatctcgtcgtctcgttaacctaagcaagccctctcgattttggagattgtgggggggaggaggcggtgcggcgtgcaggtttatactggtggaccgctccgcccgcgtccgactcgaagttcatcgttgaaaccgaaccggatactgaaaaccgatcgataggtgaagtccgcgtccgtcaggtcatgggcctcacgggtttaacagaccaaacggagcgcataccattttccggacaacgaaacaaatacgatcggacacaaataggaaaatattttttttttcggaacgtaaaaaccaactcaacttttaaaaacaaatatcatcatatataattagctcattttatataaaatataatataatatataactttttaaaagtttaaatattattaatagtgtggactagcgttaacagatggactactattaaaatctaaaaaggtatattgaaggtcatatagttataaagaaatacggtatgtcttatggcttttttgatatccgaattattattcatatctaaggaaaccccgatatcttattcgtattgtatatgggagaaaatatatgtttttttatcagtatccgaactatccgagaattatccgtttcgaaagatatatgtattcgtttttattcggaacggacaaaactatccactccactttcatccctagctattgacaatgtacagtggcatgcctaaaactaacggtgatattgacaatgtacagtggcttgctatatttctacatctctatctctaactctactttttatcttccatcttctatcttctactattataaaaattaaaaatgtttttgctagtattttgatacgtcatcattgtttgagtcaactttttaagttctacaaatccatgtttgagttcgtttttaagttcgttcgcttttaaaaatacaaaagtagtcgtacaagaaatttctttaaaaaaaactcgcatgctaacttgagacgaaagttggactcctaactgcagctaatgattttctaaaaaaattatccaagtgaattctcatagtgaatttcaccctaactaaaccgtataacaataataaaattaaaatagccttcaccgttgcaacgcacatgtatttttttctatttaaaaaaatgacaacatttcatggcaactcgcatatatccttttggtccctaaagtttggccttaaggtcaatatggtcctcgatattttattttgtccgatcagatccttaaactttgtcatatggtccaatatgaaccttaggctcaccagaaatgccatgtagacatgctatgtcatcattttattaaaagtggattgtgaaatttttaatctgtatatttgtatttgtatgtgataataaatactataactaattaatcttatataattagataatttaatctaatcccaggaattgatatatacactaggtcttgttcgtttctccaacaagatggagatgaaattttggatactcgtgatatgcttttcaaactactaaacgttacgtttcgtgcgaaaacttcctatatgaaagttgctctaaaatgtcagattaatccattttccaagtttttaataattaaaactcaattaatcacacgttattatcacatcgttttacgtgaaacacttaatctttatctccatcttcatcttcaggagattcaaacaccaaatagattatgttacaagatggcatggcaacgtgattttttttttccaaggaccatagtagactgaaagataaactctgaggactagttcgaacaaaatgaaatatcaaggatcatattgacctcaaagcgaaagtttaacgactaaattggcgccccccccccaaaaaaaaaaataataataaaggggagggggatgagcgggtgtttgtacgtacctacatatgtacgtttgatggtgtatgtacataagtaaatgtggcccatgaccttatttattagaatgccagatggtaatttaggagtgtttataggaattacacaaggcagcacagggatgatttggctctgcccgtttcatccttctcaccgcattatccgattattggttatttagggaatatatgtcacgccccgaaatagtcccgaccggaactagcccgtgacgtttcaaattaacctgttaatcgataccagtcccaggaaacagtgctggtatcacagggagacagaatatcacagcaacagaggtctctttattatagagtaggagtacagtcatgttgggctacggacagatcccgagctcacaactgcattacaaaaggaaagcggaagccaggacttggaccaatcatcacaggcgcgacttgggaactaggccgaaaccctaaaactcatcgtagccggcttgctcctggaagaactcctcatcagcaggatccgcttcatcttcttcagcaactgggggggattatttatacagagcaagggtgagtacgggggtactcagcaagccaggggaaataagtgtttaatgcaggcttcaaggagaggctgttgtttttgcaattgattttatttgaactccttttttctaaaaacgactaagtgagtgcttctcaaacgacacggatgagacagtgcgtcttgtccggtcggagtatgtgcaatgtatcagtctttagatttgaaacaagattggcacccggccaacagcttttcaaacggccacccgggccaacaacttttcaaacggccacccgggcctagctgatcccgtcagctgctgatttttcaaacatcgaacccattttctcaacagcaaattcacaagcggtagtcaaacaaaactacgctaggaatcacctcacatccgcccatgaccgtgggcacggctgttcgaacagtttgttaacctctgcagagggggtacactttacccacacgacattactaacccggatcacccagcccgtggggatcagccacgtcgggagacctccaagctttcatggcaaggcatttcgaaagccgatacaggtttaccatatgccgacgagaggggtcccagaccaacaacaggttaggtcccagaccatactgtgccaggaagcccaggggtcctccccgacaccaccccggcgaatccacatgtctctcggcatcaaggctcccctgataagctagttactcagccaggggtgtcccattccacccatgtggtcgtacttgtcttatgttcggatgaaattccaaggaaacggtccttaggtgcaagagcgggaaaccgtacacccggtacgttccccggtccgcggttttggaaatccatttagttcacaagcaccgacccaggtgtcgggttttccaagtcttttgtaaaactccagttttacctaggttgttactcagattttaagtttgaaggcgaccgtcgatactcgcacagagtgcacgaatatcgaggcgcaactgggtggttacaaggggacatggtatggcaattaacaatggaaggatcaaatgcaacaagtcaggtaggtccaccaatctgccttgcagatgggacaaaagattaagtgcggtcctatcaatgcataatatttttcaagcaatataattaaatttcaatgataggctcaagatgttcaaaggtggcttgccttgctcgagatctggagcttgatcctcgaaatcctcgcactgcgggtcttcgggctctgaatctacacgcgaaacggaacgactcaacaaacggcgaaaataaagccctattaatgacctctaagcgtgccattagatagatctcgagatttgatgaattttggaagttgaacggagtcaaacggagtcacggttgggaagatattgaatttctaagattattggatttttggtctaaaggaaaaaggatttaattaaatcctttttggaaaagaaaaagaaaagaagggagggagggaatatagacttttctcgggcggctagggtgcggcccaagagatttggggcggctcggccgagcttaacgggccggccggcccaagacggcccaagcgcgcgcgcgcgcgggagggaggagagagagtccggtggaccgggctcaccacgcgtggccccgggtgggacccgcttgtcagcggctcggctcaccgtgcggagggagcacgcggcgcacgtgcgcgggcggggaggaacgcggtgcacgcgcgcggtccgcggcggacgcaggtgcggcgggcccatgcgcagcctcacggcttgcggtggaacgcgcgcacgcggagggaccgaccggggtcggcccgacccggtctgggctgagctggcgccgacgtggcgcctacatggccgccacgcgggccggcgggaggtagacgacgatccggccgcgaatggacggcgggcggcggcggcgagcggcggagcgaaccacggtgatacgggcaaaagcgagcacaccgggcggttacacgagacgaggggagacgaaccaacggctcggatttgccgggggttgctcgacggcggcggattgcggcggtggcaaccggcggcgggagaagagggaaacggcgacgaggccacgagaggtcgattcccggcggtgagagcatctacgcggcttcgggaactcgatgctagcgtcggattgggcggaactacgccgagcgaggccggcgacaagcgggtgatacggagctcgggcggcgacggcggcgagcacgcggcgagcgacggcaacggtcggggcggcgccggctaactacgggaaggctactcaagctactaccgaaagctaggggaaggagatggagcgaggaggaagaacggagagagacatcaccgagaagaggaggggcgctgtgatgagaggccgacggcgcgggagtaatctctccggcctcgggccggggaagaggaaggagagggtgcggccggagtcctcttccgcgtccttgctcgtgccggctcctcccacacgcgcaacgacgatcggcgacggcgaaacagagggcggcaatggcgcggaggcgaaaaatgagggagtttggagggggggcttgggcttaaatggacggcaatgtcggtttgggagaggggaaccggcattgaacggtcaaggcgcgagctggcgctcggcgcttgcagccaaagcggcggcaggaggatgacgccggtgagg

SEQ ID NO: 9064 - DNA, 10246 bp, Oryza sativa
tgatagggtttttgacaaatcaccatctatttcctatatgcaagtaattttcagggcaacatattggcttcggttgtgggctcaactacaaaagtgtgaggaagatggagttttcctgaatgttgcatgtcgtactcttgagtcaacggttatgcaactttttgccaaccatggatggagattttctaataggctggaataatgttttccttgtcatgttaggtctttcttttaattttggttggtttgatagtttcatctcgaattaagattttataagtgtgttactttttgtaataattggctgtagctctttggagtaaaggccgggatgtttcattccattatctaaaaaaacaaattttcagcttattattttttataatcatatattgtagcgcccgttccgtcgtggcgcctagcgggaaaattatctcttaaaaaccctaattgcgaaatttgtttctttgtttgttgtctagtgtccgtgccatctcaagatctcaatccccgatcaatcgtcgagttcaattccgaatccaaatccctccaaatcaatttcctccgcaaaagtctagtttgcctcccccgggttcgatgggccgaatccagctcggcccatctctctcccgggcgctctctctctctctctctctctctctccccccggcgcgctctttcctttcccccgctcagcctcgcccgcacgctgctcgcgcatgcgcgggagtcgcccgcgctgagcgccccctcccctcgcgcgagctccccgctcgcaaagccgcttcccgcgcgccgtgttcgcgtgcgcgcgcccgcgcggacgccgcctgttgcaagccgcgcgcgcgagccgagtggccgaccgcccggtcgccgccgccgtcagcctctgcgcgcgccagtcgccggtgtcgccgccccgctccaagccgcccccccgtcatcaccgtcgtcatcgcccggcccccgccactccgcgcgcaagccgccaagggacggagccgcgcccctcctccctctgccggcacgagcaaggacgcggaagaggactccggccgcaccctctccttcctcttccccggcccgaggccggagagattactcccgcgccgtcggcctctcatcacagcgcccctcctcttctcggtgatgtctctctccgttcttcctcctcgctccatctccttcccctagctttcggtagtagcttgagtagcttcccgtagttagccggcgccgccccgaccgttgccgtcgctcgccgcgtgctcgccgccgtcgccgcccgagctccgtagcacccgcttgtcgccggcctcgcttggcgtagttccgcccaatccgacgctagcatcgagttcccgaagccgcgtagatgctctcaccgccgggaatcgacctctcgtggcctcgtcgccgtttccctcttctcccgccgccggttgccgccgccgcaatccgccgccgtcgagcaacccccggcaaatccgagccgttggttcgtctcccctcgtctcgtgtaaccgcccggtgtgctcgcttttgcccgtatcaccgtggttcgctccgccgctcgccgccgccgcccgccgtccattcgcggccggatcgtcgtctaccacccgccggcccgcgtggcggccatgtaggcgccacgtcggcgccagctcagcccagaccgggtcgggccgaccccggtcggtccctccgcgtgcgcgcgttccaccgcaagccgtgaggctgcgcatgggcccgccgcacctgcgtccgccgcggaccgcgcgcgtgcaccgcgttcctccccgcccgcgcacgtgcgccgcgtgctccctccgcacggtgagccgagccgctgacaagcgggtcccacccggggccacgcgtggtgagcccggtccaccggactctctctcctccctcccgcgcgcgcgcgcgcttgggccgtcttgggccggccggcccgttaagctcggccgagccgccccaaatctcttgggccgcaccctagccgcccgagaaaagtctatattccctccctcccttcttttctttttcttttccaaaaaggatttaattaaatcctttttcctttagaccaaaaatccaataatcttagaaattcaatatcttcccaaccgtgactccgtttgactccgttcaacttccaaaattcatcaaatctcgagatctatctaatggcacgcttagaggtcattaatagggctttattttcgccgtttgttgagtcgttccgtttcgcgtgtagattcagagcccgaagacccgcagtgcgaggatttcgaggatcaagctccagatctcgagcaaggcaagccacctttgaacatcttgagcctatcattgaaatttaattatattgcttgaaaaatattatgcattgataggaccgcacttaatcttttgtcccatctacaaggcagattggtggacctacctgacttgttgcatttgatccttccattgttaattgccataccatgtccccttgtaaccacccagttgcgcctcgatattcgtgcactctgtgcgagtatcgacggtcgccttcaaacttaaaatctgagtaacaacctaggtaaaactggagttttacaaaagacttggaaaacccgacacctgggtcggtgcttgtgaactaaatggatttccaaaaccgcggaccggggaacgtaccgggtgtacggtttcccgctcttgcacctaaggaccgtttccttggaatttcatccgaacataagacaagtacgaccacatgggtggaatgggacacccctggctgagtaactagcttatcaggggagccttgatgccgagagacatgtggattcgccggggtggtgtcggggaggacccctgggcttcctggcacagtatggtctgggacctaacctgttgttggtctgggacccctctcgtcggcatatggtaaacctgtatcggctttcgaaatgccttgccatgaaagcttggaggtctcccgacgtggctgatccccacgggctgggtgatccgggttagtaatgtcgtgtgggtaaagtgtaccccctctgcagaggttaacaaactgttcgaacagccgtgcccacggtcatgggcggatgtgaggtgattcctagcgtagttttgtttgactaccgcttgtgaatttgctgttgagaaaatgggttcgatgtttgaaaaatcagcagctgacgggatcagctaggcccgggtggccgtttgaaaagttgttggcccgggtggccgtttgaaaagctgttggccgggtgccaatcttgtttcaaatctaaagactgatacattgcacatactccgaccggacaagacgcactgtctcatccgtgtcgtttgagaagcactcacttagtcgtttttagaaaaaaggagttcaaataaaatcaattgcaaaaacaacagcctctccttgaagcctgcattaaacacttatttcccctggcttgctgagtacccccatactcacccttgctctgtataaataatcccccccagttgctgaagaagatgaagcggatcctgctgatgaggagttcttccaggagcaagccggctacgatgagttttagggtttcggcctagttcccaagtcgcgcctgtgatgattggtccaagtcctggcttccgctttccttttgtaatgcagttgtgagctcgggatctgtccgtagcccaacatgactgtactcctactctataataaagagacctctgttgctgtgatattctgtctccctgtgataccagcactgtttcctaggactggtatcgattaacaggttaatttgaaacgtcacgggctagttccggtcgggactatttcggggcgtgacaagagatggtatcagagcacaggcttggccctagggcgaaacccgacgcttaggacgaccctaaggatactaagttcaaaactacttgcgaaaagctaaggtttcttttgttttctttattttcaatagtttgtttctaaaatggttactgatctttctccctctttcaaaattgtagatggaagtgaacgccagcttcagttcccacggttttggtgagggtcaccacgtcgcccagcttcgtgacctcgcccgtttccttggcttctcgtgtcccgagtacacggggtactccgtggaccgtgttccccctcactgtgagctctctgtgtacctttaccctcgtggaggtatacacggagctggccttcgcccccaccacttcactgtggccaggcccactctccagatcgcgtaccaggacctctcctggaatgcgcttcgtcgcctggcccacgactacagccaccgtctcggaggttccgccttccggcagcttccacgccttccttctggccactcagacgccaggtacccttgtccgtacagcgagtctcagccagtgctgactcgcatggtcgagctttcggaggctcaggccactcagcacgacctactccttgaggcttaccgctcccttgcccgccgctacgccactttggaggcccgtctggccgaggagggtgtcacctcagttgacactatctcttgggactcaggccgcctctgccacgccagccacctgtcctcccatagctcccgcggctctgctcgcactcccagtggcccgcgctcccccagctcgcgtgcgccgtactcaccagtgtactccccctacccacacccagttagcccttcctacacccccggacacactccagttgcttcctcccgccgtggcccacgctttatccgcactgcacggaagcgtgttgttggttcttccaccgtgttccgtttccgccacccagctcccccaccgccagcggcccgtgctgctgccggccctcgacaggttccgccggtcccttcgcgccagccgatcgacgtttcttcgactgaggagccgactacagggggcagccaggccgacgaggagtagaggaggcagtcttcagcagccgtccgtgtgttaggcccttttgttccgccgccaactcttttggagtcgtggcgaggtagcgcgtgcgtgtgtttgttgtgggtgttgtttggtagtctggttctcctaggtggtgtgcgcacagtcaagctcggcgtagctctgtgacttgtccacacccgttgtatcaggtgtttttatgatttgaaaaatccagttgtgcctagtgtgtgctatctgagttgctatttgctttgctccttgccctcctaagtgcttatctgactcttaccccgcccttttctgggagtttagatggctagccgcccccgccgtgcagctcgtgcaccagcccgctttggttttgaagatggtagagttgaagcagaagcaaatcatgaatcagctaatgagcagtctcaccgcagcaaccgttcgcaccgtactgtttcccgcaacgcagaggttgagcaaccccgccgcagcagccgctcgcatcgcacagtttcccgtgatgcagagatggagcagtctcacctctctcactgcactgtcagtcacaattctggagaagaacgcctcccttccccacctcatgtggaaaacaacatgcaacacataatggcagttcagacacaaatcttgcaaggactaaccacagccatagccagttttcagcataatgtgcatggccaccctcacgtgggcaacaatagatccaagctgacagactttctgaggtcacgtccgccagagttctctcagaccgtcgagcccgtcgaggctgacgattggttgaaagatgttgatagaaaactcaacttagtgcagtgtactcctgttgagaagacgctctacgcctctcaccagctaagaggacctgccgcagattggtgggaaaattactgcaatgcacatcctgaacccaataacattgcttgggatgagtttgctacggctttccgtgcagctcatgtgcctgaaagcactattgacatgaagaaagaagaattcaacagacttaagcaaggcaacaacagtgtcaatgagtacctaagtcagttcaacaagttggctcggtacgcccctgaggaagtagacaccgataagaagaagatcaggaaattcttgaagggaatcgcagttggaatgagactccagttgcttgctcatgacttccccacttttcaacatatgatcaacaaggcacttctgcttgaggatgccagaaaagaggctaccgaagaatacaagaaacgcaagtctaaccatcagggaaattcttcccgaggcgcacctcgccctcgctacggtcaacccatgcaataccaccagtcgatcactcaaactaaccgccagccaggctacgcccctcgtcctcagataaaccgtccggcacctccgccacagcagcgtgcccctagtggcaatactgcgccaaacagtgttacctctttcaagtcaccacagggaccgtcagcagttcagtgtttccggtgcaaccagatgggtcactatgctagacagtgtcctcagaatcctgccaacaccaactcagggcatgctaatggcagcaccgccagaactcctactccagcggcagctcagtctcgtcctagctctcaggcaagtggacaaggttctcgtgcttccaaccactttggtcgaggacgtgtgaatcacattcaagctgaaaccgctcaggatgctccagacgttgtgatgggtatgttctctgtcaactccgtacccgcaatagttctatttgattcaggagcttcccattctttcatatcacaagcttttgtgaaaagaaacggttggaaaacccaaaatttgcgtgtaccaatgatagtacattcccctgggaggaatataagggcaattcaaatatgcccggaagttaaccttagaattgaggaagttgacttcctagccaaaccgatagtcctagactcgcaaagcttggacatcatcctagggatggattggttggctaagcacaaaggacagatagattgtgccgaaaagtccatcaccttgcaaggacctggaggaaagcaagtccgctttacccctaacacccctaccgcaagtcggtctatcctaacctgtttgcaagtcacctccttggagtcggtgcccatagtcagtgaatatcctgacgtatttccagaagaattaacgagtatgccaccagaccgagagattgagttcgccatagaactggtaccaggcacaactccaattgcataaataccctaccgaatggcagctaatgagttagcagaagtcaaaagacaaatcgaagagttggagagtaaaggttatgtgcgacctagctcatccccttggggagccccagtgcttctggttaagaaaaaggatggctctgagagaatggtaatcgactatagagccctgaatgaagtaactataaagaacaagtacccgttgccacggattgacgatttattcgatcaacttaaaggagcaagagtcttctcaaaaattgacttgaggtcaggttaccaccaattgaaaatcagatctgaagatattccgaagaccgctttctcaacgcgttatggtctatacgagttcacagtaatgtccttcggactcaccaatgctccagcgttcttcatgaacttaatgaacaaaatcttcatggaatacctggaccagtttgtcgtggtgttcatcgatgacatcctgatatactccaagaacgaggaagaacatgctgaacacctgaggctgataatggaaaagctcagagatcatcaactattcgctaaattctagaaatgcgaattctggttggaccgagtagcatttcttggacacgtgatttcctccaacggtgtcgaagtagatcccagcaaggttgaagctgtacttgcttggaacccgcccaagaacgtgtcagagatccgcagcttccttggcttagcgggatattatcgaagattcattgaaggattctctaagctagccagacctatgaccgagctgttaaagaaagaaaagaaatttcaatggtctgcagcctgtgaagacagctttcaagaaatgaagaaaaggttgaccactgcaccagttctcaccttgccagatatccgaaaagatttcgagatcttctgtgacgcatcaagacaaggcttaggatgtgtcctaatgcaagaacgaaaggttgtggcctacgcatccaggcagctcaggcctcatgaagtcaattatcccacccatgatctcgagttggcagccatggttcatgctcttaagatctggaggcattatttaatcgggaacagatgtgaagtatacaccgatcacaaaagtcttaagtatatcttcacacagaccgagttaaatatgagacagagaagatggttggaactaatcaaggattacgatctgggaattcattatcatcccggtaaagctaacgtggtcgctgatgcgctaagtcgcaaggcctattgcaatgtagcccaaacacggcctaaccaagatcacctgtgcagagaattggagaagttaaggctgaccgtggtacagtcaggtgtccctgccagcttgacagtacagcctaccctagaatcacaaatccgggaggcccagaaagatgacgaagggataaaagagttaataaaaagaatacgggagaagaaagacaccaatttctccatagacgaacaaggcacagtttggtgcggtccacgcatctgtgtaccggccaagaaggagttaagagatctcatcctaaaggaagctcatgagtccgcctactccattcatccaggaagtacgaagatgtaccaagatatcaaggcatacttctggtgggctggaatgaagcgagacgtcgcagaatacgtagccttgtgtgacatttgccaaagagtcaaggcagagcaccagaggccagctggtctgctacaacccctaccaattcccgagtggaaatgggaagagatcggaatggatttcatcaccggtttgccaagaaccccctgcgggtatgactccatttgggtaatcgtggaccgactcacgaaatcagctcatttcgtgccagtgaaaaccacctatgatggaaagaaactggcagaactctacatgactcatgtcgtatgtagatttggctgtcccaagaaaattgtgtcggaccgaggcactcagttcacctcaaggttctggaagcagttgcatgaaactctcggaactgatctaaattttagtacggcctaccatccacagaccgatggtcagacagaaagggtaaaccaaatcctagaagacatgctgcgtgcgtgtgccttggatttcgaaggcacttgggatcgttgtttgccgtatgctgagttctcatacaacaacagttaccaggctagtattcagatgtcgccaaatgaggcaatgttcggaagaaagtgccgcacccccttgtgctggaatgaggtgggcgaagccctggtattcggtcctgacatactcaagtcagcagaagaacaagttaagctgatccgagaacgcttgaagacagcgcagaaccgtcagaaaaattacgctgacaatcggagacgtgaccttgagttcaaaaaaggagatcatgtgtacctgcgggtgtcacccctccgaggtatgagaaggtttgggatgtccggcaagttagcaccccgctacatcggcccctacctcatagccgccagacgtggcgaagtggcttatcagcttgagctacctgaaggtctcgcagatgtgcacaacgtgttccacgtatcccagttaaagaaatgtcttcgagttccagaagagcaagttcccctgggtagtatcgagctggaaaagaatctgacctacaaggaaagaccgatcaaggttcttgaagaggcagaacgtcagactcgaaggaagaccatcaagttctacaaagtccaatggagcaatcattctgaagatgaggcaaccagggaacgagaagatcttctccgcgccgagtttccggagctgctcccttaggtgctgaatctcggggtcgagattcttgttaggggggttggtctgtagcgcccgttccgtcgtggcgcctagcgggaaaattatctcttaaaaaccctattagcgaaatttgtttctttgtttgttgtctagtgtccgtgccatctcaagatctcaatccccgatcaatcgtcgagttcaattccgaatccaaatcccttcaaatcaatttgctacgcgaaagtctagtttgcctcccccgggt

SEQ ID NO: 9065 - DNA, 15734 bp, Oryza sativa
atggcccgtcccatcagaaggtcattcggacgggcaaccatacaaatctccgtccatttatgaagagaaggcaagtcaagttggagaaaagagaggataagtccccacacaaaagagagagatggtgcatgtggtatccccttgagatataaaaggaggaccttgcccacttagagagagaggaaaaagggatggagaacgatccgagactgggattcggaaccagaaagggagagagttagagttctctggctctccagctctttgtagcttcttcatacacagatccaccaaaacacaggagtagggtattacgcttctcagcggcccgaacttgtatacatcgcccgtgtcttgtgtgtttccattctcgcgaactttccacagaccgagagcttagaacctcacccagggcccccggccgaaccggcaaaggggggcctgcgcggtctcccggtgaggagccacacgttccgtcatctggcgcgccaggtagggggctctgcgtgtgtttttccaagctctcgcattctttcgtgtgcgccaagcttttcctgttcagcccaatggccgaacaagcaaaggcgcacaacctctctccgagtgttagcggtgacgacggggagccgaacccacgccgtcgagctcgtactccaccgccccctccacgccaaagtcctagacgggaggaggcgctcgagagggtcgaaggatccgcgactgcgacatccacgggtgatggagaagggcgccgagatggggagcgtcgcctcctcgtctacggcgatggcagcacgccccagggcgcgctccaagctgcgggcgcgctcctacgtcacccgcccgtcgtccctgacccggagtctccagcccaacgttggctggacgacatggccaacttggtcatgacggcacggcaacgcctaggtgctggtgggcgctcctccgccaccaagacctctggcgctgctaccaccggctccgtgtcgtcaaggcggagggcgcggcgagcggcggctgttgctcgccattcggctgccactccctcgtcagcacctccgacccgggaagatcagtgtggggggccagatgcccgcatcggtatcgagcaccggcgtaatggtcgacgtgctgcccacgcaacggagggcgcctcctcgtccggagtgtcacctcaactcggacgcggggatcagccctccgtgcccccggttggtggtgtcggctgtagagcctttgtggcgagcgtttggaacgtccgttggccctcaaggttccggcccaccatgtcgcgaccgagaaaattgcattttcccgaacgctagtgtattaatgcccgtcccaggaaaagccggggtacaccatacaaacatgatataaaagacacatctttattatatcgataatatttacattattacaaaggcacttaaggcctgacaatcaaaaataaacagcagcggactagcgggcctacggctccatcttcacaggcgctcaactggggtataagccaagactccacctaagacttcttctccaaagcttctcttactgaaggggggagaaagatagagcaagaatgagtacaaccacagtactcagcaagccacaccggcggatgcacgattaatgtaagggggtacaaggggtaatgatataggggttaagttttgcagttaacagcatttaaaagtcacttagttgcccaaagccattttataaagacgatcctagagctacacagtattattaatcaaggccgtgaacccacacgaacctgccttaacctaaggcctacgatgattcagaccgaactggcaacccgaccctgggtcccagctcgtcccaagccaacccaggccaaccattccacattttagttgttaagcaggttttaagaattaaaacactaacttgggtacattgctcggcttgcccataaccgagggcgcggctattcgaatagattttactctgatcagaggtgtatatctttacccacaagacacatcttcctcacgtgtaaccacgtgccacataccaccatggcatatggatggaagacatgacatagtttccaacccatcctggccatagacaagagtaccgacccaaccccacctacggccggaacctccgggacaggtaggcaggattgagcccctagcagcaggacaccagccctgtgccatgacatctcgactaccgggccgcagctcgtgtagccttcatttgtcctagagatgtccatcgacccccgacttcgtccatctccatccgtgtacttttgtttataaccagactgagccacaaactaagccttacccactagacatgtggaagtacggtagtgctttgcaacagaggcccgaagaccggtccttatatggccgaggtgctactatcaaaaccatacaccccgagcccagcctaaaaccattttggggattttgaatagagggggcggtgtgaatccaattccacaataaaccaacaattccaaagtgtccaggtgatatgaatatcccaaagtctagagttgtaaaaccacctaatgttacctaattaatcagcgaagcatctacctaaaatttatactagtggtactaagaatagagtgtccactagttggggttttgtttaatctagggtgaacaaggtattaatatcaataacaataataataaggtcataacaaaggtagataggcatggctaaataaaacagtgataacgcgggaatttaaataaagcgataatgcaatagtttaaatcaaaataattttataaactgggattcaatatgttcaaggatgatgtgacttgccttgctcgctttcccaaacgtcggcttcaacttccacgaagagcggatcttccgaagcggcagcgtctacacgaccaccggaaaagaaaaggcttttactctaataaactccatacaacaagcaggaacaaagcacaaaaatgggttcttgacttcttaaggaaaaattagagacttgaacggtccaattccgagttcaaatggccaagttatggccatttgaagtttatatgctctttaaatgaatatttgcgaatttcttcatttaaattttaatttaaaattggatttattgcgtcagccgaggggaggggcgcgtggaccgggtccacgggagtggggcccacgcggcagcctcacggtccacggtggaccgggtgcacgcggctgacgccggccggtgccgtgggtcccacgcgtcagccgcacccgcgggcgcgggcggctgacggccgggccccacatggcagccgcggggcgcgcccggaagcggcctcgccggcacggccgacgggaggcggcgcgcccgcgccccgatggtcgccgccggcgaccaccgacgcggcggagcggcgcccgagagaagggagggaagggggaagcgaaaggagcggtccacggctcaccccgggtcgacgaggacggcggaggaggcggccggagcggagggaggcggcggcgcagctcgggtcgacgaggacggcggcgttccggcggtcggcgggcgaaacggaggagtggacgaggtcggcgaggacgcggcgaagccgaaggaggcggcgccgaggtgggaggcggtccggggtgacgacggcggcgggccggagctcggcggcgacgacggagagagagagcgacgtcgcgagctcaaatccggcgaggaggaagggcggcgagaggcggaaccggacggaggaggtgcggggagggtttaaatagagccggggcgagagagggtggccggggaagggaggaaaccggcgcgggaggtcggccgccatcaatggcgccggcgagatttgcgggggcaaatccgcccgtttgaacgcgggagagagagggagaaatggggggaaagagagaggggatcacggggaataattccccccactttaatgcgcgcggggactgcgggaggcggcgggattcgcggcggcggccgcgctagggcgcgggcggggcggcgggagcggcgggaggatagggatgacaggtgggccccacccgtcagcgagggtggcgggcgggcccgcccgtcagcggcgcgcgtgcggggagaggccgagtgggccgcggggaggaggagagagagggaaggagatgggccgagccggcccaagagggggagggggggaaaaagactttttagggtttttctttttataaaatcattttaactttgtttttttcttaataattattatttgtgctctgaaaattccactaaaatttgagggctccttttagaccaaggaaaatttaacaaaaattctccgggccacatttgaatttttcttgtacgtattttagtgtttgccaatttcttttcgaattttaattaattctattattccttttagcaaatgatttttaattcgggatgaatttatcaggacgtgacacaccatcgccgaaaaatatgacgggagcgtcaaccccgccgagtttctcctggtctacacgaccgggatcgaggccgccgggggtgatgacagggtcatggcgaatttctttcccatggccctgaagggacaggcgcggggttggctaatgaacttgccacccgcgtcggtccactcctgggaggatttgtgccaacagttcaccatgaactttcaaggcacatatccgcgcccaggtgaagaagcggacttacacgcagtacagcgaagggatgatgagtcacttcgctcgtacattcagcggttctgtcaagtccgcaacaccataccatgcatccctgcacacgcggtgatctacgcgttcaggggggtgtgcggcacaaccgcatgctcgaaaagatcgcctccaaggagccccagactaccgcggagctttttcagctcgcggaccgagtggctcgtaaggaggaggcatggacctggaacccctccggttccggtgtggcagcttcggccgcccccggatccgctgctcggacagggcggcgtgacaggaggaggaagaagaggtcagcccattccgacgacgagggtcatgtcctcgccgtcgagggcgcttcgcgggccacccgaaaggggaggcctgcgagcgacaaaaagaaggaggccggcgctcccagcagggagcgcccaactggcaagtggtgtaccgtccataacacctcccttcacgacctcgcggactgccgcgcagtcaaaagtttggctgagcggacgaggaagtgggaggaggagatgaggcaggagcgccgagagggcaagtccccggcggttccttccggcaatcggcgaagtgaggccaagcagaaggcccccgccaaggacatcgatgacggcgatgatgacctaggtttccaagagcatggggccaccattgccactgtcgatgggggagcgtgtgctcacgtttctcgccggagcctcaagaccatgaagcgagagcttctggccgcggcccctactcatgaggcgacacgccgggcgcggtggtcggaggttgccctcacctttgaccagaccgaccacccaccgtacgttgcccggggaggacagatcgcaatggtggtttcccccactgtttgcaacgtgaagctggggcgtgtcctcattgatggaggagcagccctcaacatcctttcccccgcagcctttgacgccatcaaggccccggggatggtgcttcggccgtcccagccgattatcggtgtgacgccggggcacacttggccgcaaggtcatatcgacctcccggtcaccttcggtggatccgccaatttccgcacggagcgggtgaactttgatgtggcggacctcagtctgccctacaacgcggtcctagggaggcccgcgttggtgaagttcatggcggcggtccactacgcctacctccagatgaagatgccgggccccagtggccccatctctgtccatggtgacctcaaagtcgcgctcgcttgtatggagcagcgcgcggaccacctcgccgccgcgtccaagcccgagggtggcgacgagaggcttggcacctccgtccccgccgccccgaggcagcggatagtcacatgcgacgaggtcccggtcaaggaggttgccctgggcgacggcccgtccaagaccacacggatcggtggtcttctggatggcaaataggaagacgcgctcgtctccttcctgcgggcaaacgctgacgtcttcgcatggagaccggcggatatgcccggggtccccagggaggtgattgagcaccgtctcaccgtgcggccgggcgcaaggccggtccggcagaaagtgcggcggcaggccccggaacgtcaagccttcatccgcgaggaggtggcgcgacttctggaggccggattcatccgcgaggtcatccatccggagtggctggcgaacccggtggtcgttcccaaggcgaacggcaagcttcggatgtgcatcgactacaccgaccttaacaaggcatgtcctaaggacccttaccccctgcctcgcatagatcagattgtcgactccacagcggggtgcgaccttttgtgttttctagatgcatgctctggttaccatcagattcgcatggctagggaggatgaggaaaaaactgcattcattacccccataggaacttattgttatacgacaatgcccttcgggttaaagaatgcaggtcctacttttcaacgtactactcgaatttctttgggtagccaaataggacgtaatgttgaggcttatgtcgatgacttggttgtaaagacgtgcaaccaagagaccttactctcggatctagcagaaacttttgagagtctccgctccgcccgcataaagctgaaccccgataagtgcgtgttcggcgtacctgcgggcaagcttctcgggttcttggtctctgcccgaggcatcgaggccaaccccgagaagatacgagctatagagcggatgcgcccccccagcaagcttagggatgtgcaatgcgtcaccggttgcatggccgccctaagtcggttcatatcgaggctgggagagaaggcgctacccttatttaagctcctcaaacgctccggaccgtttacctggacggaggaagctgaacatgccctcgctcagttgaaggcgtatctcagctctcccccagttctggtcgccccggagccaaatgaacccttgctactctacttagcggcgaccccgcaagtggttagtgcggcgttggttgtggagcgcgatgaggacaatcctcattccgcgcatccccaccctgcgctggcttggcccgggagagagcagggaggagaggcccccgagccgaacggtggcccaaggcccccgacgaccggagctggccctctgcccgcttgtcagacggtgccaggtgcccccgacccccaggatggcccgagggccactgcgggaaggccgcacctatcgccctctgaccccgaggctaaccctgtgccgactcgacccgggagagagcagggagaagaggcccccgagccgaacggtggcctaaggcccctgacgaccggagttggccctttgcctgcttgtccgacgacgccaggagcccccaacccccaggacggccccgaggccactgtgggaaggccgcccctgtcgttctccgaccccgaggtcgtcggcacagaagatgagtgcgccccgcgaggccgcttggacgaagagcgccctagggatgcggcccctagcgaagaggatcggccccaccgaaaggtgcagcggcccgtctactttgttagcgaggccctccgggacgtcaagacccgataccctcaggcccagaagatgctttacgctattctgatgacttcgaggaaactgcaccattatttccaggcgcatcgggtcacggtggttacgtcttaccccctcggccaaatcttgcataatcgagagggtactggacgggtggtgaaatgggcaatcgaactttctgagttcgatttgcactttgagccacgccacgctatcaagagccaggccctcgccgattttgtggcagagtggaccccggctcccgagcccgtctcagtccccgaggccagctcgggcccctcgcagctgcctcacaccgcccactgggtgatgcagttcgacggctccctgtctcttcagggcgccggtgcgggggtcacgttgacctcgccgagcggagacgtcctcagatacctggttcgccttgactttcgggcgaccaataatatggcagagtacgagggactccttgcgggactcagggtggcagctggactggggatccgccgcctcctggtgttaggcgactcccagctagtcgttaaccaggtctgtaaggagtaccggtgctctgacccgcagatggacgcttacgtgcgccaggtaaggcgtatggagcgccattttgatgggatagagcttcggcacgtgcccagacgggataacacggttgccgacgaactttcacggctcgcttcctcgcgagcccagaccccaccgggcgcctttgaagaaaggcttgcccagccgtcggcgcgacccgaccccttaggggagacggacgcgcctgatcggcccccgaggcccgtcggagtccaggcctcgggacccgaggggagcgctcccagctcccttagattgattgcttggatcgctgagatccaagcatacctcacagataagactctacccgaggaccgcgaagggagtgaacgcgtccagcgcatctccaaacgctacgtgctggtagaagggaccctctatcggcgcgcggctaatggaatcctcctgaagtgcattcctcgggaacaaggcgtcgagcttcttgccgatatccatgaaggcgaatgcggagcccactccgcctcgcgcaccttggttggcaaagcctttcgtcaaggtttctattggccgacagctctcaatgatgcggtcgacctggtccggcgatgcagagcgtgtcaattccacgccaagcaaattcatcagccggcccaggccctgcagatcataccactttcatggccatttgctgtctgggggctcgatatcctgggaccgtttaggcgggccccgggcgggtttgagtatctgtatgtcacgatcgacaagttcactaagtggcccgaggcttatccggtcgtcaagatcgataagcactccgcacttaaattcattaagggcatcacagcccggtttggagtgcctaaccgtattattacggataacggcacccaattcactagtgagcttttcggtgactactgcgaagacatgggcatcaagctctgcttcgcctcacccgcccaccccagaagcaatggccaagtggagcgcgccaatgcggaaatcctaagaggccttaaaaccaagaccttcaatatcctcaagaagcacggcgattcatggatcgaggagttgccagcggtgctctgggcgaaccgaaccacaccaagccgagcaaccggggaaacgcctttcttcctcgtctacggcgcagaagcggttctgtcacgaccggaaataacccaacgggcgttcctgacgtgcgtgcattaatccttgtcccaggaggcaaggtacaccaaaagttgatacaattcagagtttaacaagcggaagcgtaaatagataacttattacatgggcagcgaaggcccagcacacacaaagacaaacgggaaaccgtggaagactagggcgacgaccacaggcgcttgacggcaggcacgagctaggcaccaaagccttcatcttcaaggaactcctcttctgggcttgggaaaaattgagcaagactgagtacaaccaccgtactcaacaaggcacacccacaagtgcagaataaatgcaagggagtacaaaggaattatactataaaggggttagggtttgcattaaacaacatttaaagatatttagttgctcaaagccattttgtaaacacgattctagaactatacaatattaattatcaaggccatgaacccacacgaacctgccttaacccaaggcctacgatgattcagaccgaactggcaacccgaccctgggtcccagctcgtcccaagccaacccaggccaaccattccacattttagttgataagcaggttttaagaattaaaacactaacttgggtacattgctcggcttgcccataaccgagggcgcggctattcgaatagattatactctgatcagaggtgtacaactttacccacaagacacattttcctcacgtgcaaccacgtgccacataccaccacggtatacagacggaagacgtgacatagtttccaacccatcctagccatagacaagagtaccgacccaatcccgcctacggccggaacctccgggacaggcaggcaggactgagcccctacagcagggcaccaaccctgtgccatgacatctcgactaccgggccgcagctcgtgtagccttcatttgccctggagaatgtccatcgacccccgacttcatccatctccttccgtgtacttttgtttataaccagactgagccacaaactaagccttacccactagacatgtggaagtacggtagtgctttgcaacagaggcccgaagaccggtccttatatggccgaggtgctactatcaaaaccatgcaccccgaacccagcctaaaaccattttggggattttgaatagaaggagcggtgtgaatccaattccacaataaccagaccattccaaagcatccaggtgatatgaatatttcccaaagtctatagttggaaaaccacctagtgttacctaattaaattgcgaagcatctacctaaaagtaaactagtggtgccatgagtagagtgtccactagttgaggtttgtttatcctagggtgaacaaggtaataataacaataacaataataataaggtcataacaagggtaaataggcatggctaaataaaacagtgataacgcgggaatttaaataaagcgataatgcaataatttaaatcaacataattttacaaactgggattcaatatgttcaaagatgatgtgacttgccttgctcgctttcccaaacgtcggcttcaacttccacgaagagcggatcttccgaagctgcagcgtctacacgaccaacggaaaagaaaaggcttttactctaataaactccatacaacagcagaaacaaagcagaaaaatgggttcttgacttcttaaggaaaaattagagacttgaacggtccaattccgagttcaaatggccaagttatggccatttgaagtttatatgctctttaaatggatatttgcgaatttcttcatttaaattttaattaaaaatcggatttattgcgtcagccgggagagagggcgcgcagaccgggtccacgggagtggggcccacgcggcagcctcacggtccacggtggaccgggtgcacgcggctgacgccggccggtgccatgggtcccacgcgtcagccgcacccgcgggcgcgggcggctgacggccgggcccacctggcagccgcggggcgcgcccggaagcggcctcgccggcacggccgacgggaggcggcgcgcccgcgccccgatggtcgccgccggcgaccaccgacgcggcggagcggcgcccgagagagaaggggaagggggaagcgaaaggagcggtccacggctcaccccgggtcgacgaggacggcggaaacgacgaccggagcggaggaaggcggcggcgcggctcgggtcgacgaggacggcggcgttccgtcggtcggcgggcgaaacggaggggtggacgaggtcgacgagaacgcggcgaagccgaaggaggcgatgccgaagcgggaggaggtccggggcgacgacggcggcgaaccggagctcggcggcgacggcggagagaaggtgcgacgacgcgggctcgaatccaacggggagagagagtggcgagtggcggaaacggaggagggaggcacggggaacgtttatatagcgtcgggagtgagagagagcggccggaggggaaggaatcggccgcggaaatctcggccgccattgatgcgccggcgaagatcgcgggagtgaatccggacgaatccgagggagagagagaggggaaagagggggaaaagagggagggaatcacggggagtgatttccccctctttatggcgcgcgggaacggcgggatgcggcggattcggcggcggcggcggcgctagggcacgggcgggcggcgggagcggcgcgaggttggggataacgggtgggccccacccgtcagcgagggtggcgggcgggccggccgtcagcggcgcgcgcgcggggaagggccgatgggccgcgggggagaggagagagagggaggggactgggccgagccggcctaagaagggaagggggggaaagaagactttttagggtttttctttttataaaacctttttaactttgtttatttcttctcagttattatttgtgctctgaaaattccactaaaatttatttacgcattttaggcttttaggaaatatacaaaaatcctccaagccttatttgacttttaaatttgcacattttaattgttggaggctttcacatggattttaattattctatgcacaatttcgaggatgtattttagagtcgttttgggacgcgacaaacctaccccccttaaacggaatctcgaccccgagattcggaagaactggcgaagagatcgggatgggctgccttcaggttggttgccttcaccggtggcagcatttctcctggtcgtcaccatctgaaaaccccacacagaaccagcaaacagagagagctaacaattaaaactaaccacccacgactactataattcttgaatttattactgctattaaatgggttcattaaagttcaagttgcttaggcaaataaagtaaagacaggctccgacatagttataccacacaccggcataaccatgccccacacgacccaacaggaagacaaacgaggaagaacacacgcgcaagcctactaactgctcgtctaccgctgcgacgggccaggacggaaggtgagcaacaacgcatcctccgtgctaccaacgccggaggcttccccctcctggggaaccacgggcgcgggctcagcacgaggggtctcgacgaagcaagtccatgccagggactgacgaacaagctcgggcctggaggtgctcttgcgggcggtgatcttctggctgcggcagacgcggcgacgcttggggcggcagacctctccctgggcgatcttgagctgatgcagctgcgcctccaccgcatctaggtccttcttgagctgcaggttctcctgacgcagctccaggatcttcaagttgttctcgaccatcccgcggcgcaccatctgatggaagtcgatacgagccgcgtcgtacgcctccaccatgcgcgccaggtgcacgatggtagcgtcatcctccgagctagcatcccggaaggtggtgtagtcgcgggctcctccgcgacgagggtggtagcggtagggcgagtgctgcaactcgtccgggtagcgctggtgaagagtgccgatggcgaggagagcggcgttctggcaagcggcggggaaggaatctccacccgcggtgactgccagcgaagtccgctcgggagagccagagaggatcactgcagtgacctcccaaccagcgtggggctctgcatcgtcaccctcctgctccggaagcggcctggcttggtagtccactccatgtggataccccaggacaacgcacatgccccgcagctccaagacgaagccagtcatgtccaaaccacgacgggtgacgctgccggccatctacaaacaaaaacaaaaagaaaaacaacattttaaaggtcagtttttggcgataaatgaagcagcaagacagagagagactagacagttttcacaaataacaaaggatttttatttttgaaaatattgctaaggcttgggatctacggctcgtcctagggtcaagggggctctgataccaacttgtcacgaccggaaataacccaacgggcgttcctgacgtgcgtgcattaatccttgtcccaggaggcaaggtacaccaaaagttgatacaattcagagtttaacaagcggaagcgtaaatagataacttattacatgggcagcgaaggcccagcacacacaaagacaaacgggaaaccgcggaagactagggcgacgaccacaggcgcttgacggcaggcacgagctaggcaccaaagccttcatcttcaaggaactcctcttctgggcttgggaaaaattgagcaagactgagtacaaccaccgtactcaacaaggcacacccacaagtgcagaataaatgcaagggagtacaaaggaattatactataaaggggttagggtttgcattaaacaacatttaaagatatttagttgctcaaagccattttgtaaacacgattctagaactatacaatattaattatcaaggccgtgaacccacacgaacatgccttaacccaaggcctacgatgattcagaccgaactggcaacccgaccctgggtcccagctcgtcccaagccaacccaggccaaccattccacattttagttgataagcaggttttaagaattaaaacactaacttgggtacattgctcggcttgcccataaccgagggcgcggctattcgaatagattatactctgatcagaggtgtacaactttacccacaagacacatcttcctcacgtgcaaccacgtgccacataccaccacggtatacagacggaagacgtgacatagtttccaacccatcctagccatagacaagagtaccgacccaatcccgcctacggccggaacctccgggacaggcaggcaggactgagcccctacagcagggcaccaaccctgtgccatgacatctcgactaccgggccgcagctcgtgtagccttcatttgccctggagaatgtccatcgacccccgacttcatccatctccttccgtgtacttttgtttataaccagactgagccacaaactaagccttacccactagacatgtggaagtacggtagtgctttgcaacagaggcccgaagaccggtccttatatggccgaggtgctactatcaaaaccatgcaccccgaacccagcctaaaaccattttggggattttgaatagaaggagcggtgtgaatccaattccacaataaccagaccattccaaagcatccaggtgatatgaatatttcccaaagtctatagttggaaaaccacctagtgttacctaattaaattgcgaagcatctacctaaaagtaaactagtggtgccatgagtagagtgtccactagttgaggttttgtttatcctagggtgaacaaggtaataataacaataacaataataataaggtcataacaagggtaaataggcatgactaaataaaacagtgataacgcgggaatttaaataaagcgataatgcaataatttaaatcaacataattttacaaactgggattcaatatgttcaaagatgatgtgacttgccttgctcgctttcccaaacgtcggcttcaacttccacgaagagcggatcttccgaagctgcagcgtctacacgaccaacggaaaagaaaaggcttttactctaataaactccatacaacagcagaaacaaagcagaaaaatgagttcttgacttcttaaggaaaaatt

SEQ ID NO: 9066 - DNA, 21005 bp, Oryza sativa
acagtagctcatcagattagtagatggtacacacatggcacagttgtatatcacaagctgacatcgtcatacagatcttacaatctattaataatacaagggtagcccaaatgggatccgaatagaccaagcatggtcgacaacaacacaaaataccaacacaaataaatgaggtagcggaagcgaagcagcggcggtccattttatcccacacgcatcgactggtgaacctaggtccctattccgccgtcctcggtactccttgccagcatagcacatgtacagatcgacaccaacaccttttctaaaagatttaaataagcaagagtgagtaccaaccgtactcagcaagccaccactacagaatgcatataatgttcataggggttcaaggatggcttggtttacttgcataaagctagttttcacaaattatttcacaaacctatgacatagcagttttaactgaaaaccacgttaaattgaagttgtcattaacctgcgagggctcatcccccttccccaagcctcgcttggtccgatttaccctcgcattcaatttccacagttttaaccactacgacctttccgcacatcgggcaaggtcataccttccacacccatcatattttaagcaatattacaaattgacgaggctagtcaagagtaatacaagtcccggcgctcattaaccgcgagcacggctattcgaatagtttaatttactcacactgcagtggatgtacgcttttaatcccacactccgtgacgcacccaacacatgagacttgtcacggcccggtttttcagttaccctcgcatggcggcacccgctccaaggactatgactccccattgcacccccggcgccacattcctacctcgagccggttgtgaggggagtcctagcgctcctgagattgaaggttacattatacatatataaagctttgacgtcattaaccacacactttcacatttccataccgatatccagaacctaccatgtctggggtgctaccccacgagaataacctagtctaccgggtctaaccccactcaagaagtgtggtcgtactcggttcgtttcttgcttagcttcttgactcggtccttaactgaccagggtcggcggcttaccgttcccagaaccacccatattctattcgtgccgcccaatcgaaatcatttttgtttaattaagtttttgagttttcgcaaaggttttcatgctgtgggtggcgcttatgtctccacccgatctctaacaatcactcccatcgagtgatcagtataaccacatccacatatcacacatatggagtgtataacgtctatgtaagcagggctaagcagtgaataaataatcacacgtaaagtaatacactcaggtaacaacggtgtgtaaatacataaggataaacaatatcaaaggtaaggcttaaacaaatgtaggtacacattttataattagtatgcaattttatttgtaatcaacacatttataaaaataggatcaacatattcgaggaagagggcgtagtgacttgccttgctcaattgggggttcgttctcaattagctcagtttcctcctcgcagatgtaccctgtccggttgaataataacgtcacaaactactcgctaacacaaaaagagccaaaaattccagaaaaaatcgaaaaataaccaaaccagtgccattgcgtagatcttgattttagaaagattttgacgaaagtttcgttcaaatccgacttaaaacaagggagatacggaattcgaaagattgaaaaagttttaaatcgaagaaaaggaaaaaggtctgacgggtgggaccgcccttaactcctcacgtgcaggttttgtttttaaatgggtgtgggacccgtgagtcagcctctctctcctacttcttctttcttgcgcttccttctctcgttctctctctcctgccatgtgcctgtgtttgctcgggctagcgcttggctgcgccggcggcgagctccatcgaagctactgcggccggggcaggggggttgtggggggggggtcgggcctgccctgggagatggcgcagggttgggggaggccggcgatggcaagggagctcgggtgaggcgacggcaatggcgtggcacaaggaactcggccggagcctacggcgacggcatttggctgcgaaaatggaatcctcaggtgtttgtggtttccctagggtgtgcacatggtgaggcgaagggtttgggcgagctgcaagcatgcatgcatatgcatacacacggctagctagctgcatgcatgtgagctgcttgcatgcatccatgcacacgtacagccaactgcttgcatgcatgcacacgtacagccagctagctgcatggcgcatgcatggccggcggcgcagcggcgattgctgcggagggcggccgcgcaaggaacgggtacagtgtagcgcctcacaacgtcaccgcgccgcggcaacaacggtagacgagaaatgcggcagccgggtagcggcacaccgagcggtggtcctcacacaaaactacggtcgtcgatgtacagcctggggacggtcgacccgcggatcgccctcacacaccacgtgttcgattggtggtaacaaacgaacacacaacgttaaggactaaatgttagcgggttagtgcaagttagggttaggggttagcgagttagaggtcagtgagtcagtaagttagagtgtcagcgggttagtgagtcaatgggtcgaatgttagatgttagaggttagccgttcaataagttagtcgttctcggggttcagatgacggcggggcggcctatccgtcctcttgctcaactgaggcctagccggagccggccgcggtggagcaagcggagagacggcagcgtgtgcgcgggagggagtggctgaggggaagcaaaacgaggaggaggtgaagagagaatggagagggaccggttgcgtgctcacccgtgacgacgcttaaatagagtctggggaagggacgtttgctgctgcccgcattcattccatcccaaaaaatgcgcatgtgtaggtgggagcggtgacggctgcgtattggcggcggaaatgtcgtccaccttgtcggggcacgtggcggcgatgaagtggtagtgcggccgtggcggccgtcaaaacacggcgctgtcgaacgtggtcgctgagcgaccgtcgccacctactcgacccgaggaggagcggcttgatttcgagttcgcacagtgttggctcgaacggggtttgccggtgttaacgaccaaatttggtaaatcaagtattggattcgaagatggaatcgaagcggatttggaggaagctggcggttaccaaaacagagcaagaatcggttggtgaccgagtcggctatcgtgtccatcggctgagacaaagtcagacaaggttagccgatgtagccaattctgacgagaagataacagagtctttgtcgggttcggttgatgtaaatatagagaagggtttttcgaaaatagttggcatatgcaaagattaggatatctcataatcatagttctttgaataaataatatttgaaatcaaataccgacatattctcagacgttcgtctattagcccacgcataaaaggaaaacgacagatcgaaataaattaatcccggcatgaatgtattttgaaaaagatttttgattattccaaatttttaatttcgtatttcaaagttgaaattttcagggtgttatagtagccgagccgcgaggcgcgtatgggacaccaaggaggagtcatagacgcacgggagggcgtcgtggaccaaggtgcacgaggacgcgctagagatgaagacggtgacacaatcatggcaatcgttgagaaagatgacgccgaagatccgatatagtcgaaccgtaaaggacgagacgtcataccgggtttgccagaccctcggacaactcaagacgaacgcgcgtaacggtgttgccaatatcacgtggatgaggtaggagaccaccgtgaatcatacaccaatgtcggagaagactagcagagaagacctccgtgacagtcgcggcgtgagaacagtgtagagagagaattgtcgtagcagcactcagttgccggagaagagcgaagtgtaatcgaggaagatacggcgatgctggtgatgagacatgctggacgaagacaaaggcgaagtaacgggaccaacagcctggacagcaacgtcggtggccatgtagaggtagctggaccaccggcctagagcggtgatagtggcagcttggagatgcggtgacgatgctcgaagtagacgaagaagacccgagtggctgacgatgaccagtgcagacgacgagggcatcgaaacgcgaacggcgatgaagacgacgagagggacgaggctgtggtccgaaggaacaacacagctgcatctcttatgtcgatgcagcggcgtgaactcatcggcggtgaggccatgctgaggagaacgcctctcagcattgcaacaactagtggaggtggaccatggacggcggcactgcggcccaaggggacgatgcagtagcaacccgaagcttgatggcatagccatgtgctccatgacgattggttgcagaagtcgttgtagccgggcggttgaacgggtgattaagccgaagatgcacgaggcggaacgatgaagtcaatgccaatgtcgtagacgcgtagatgttgacgaggtggtgggcgacgcaaacccattctctgaacgggaaaaagaaaaattggcggcagtagcaatatatgtcgccaaaaccaatctgaacctcgagctcacggcgttgatgttcctggtagcatggaggagctcacatgcagcatgttgactcaagccatgcatgcatatgtgccgccgcagacgtcgagcatgcatgctcgttgcgtgcatacacaggtgcagaacagctagagccatgagtagacggtagacgatgagattgctgttggtgctgcttgacgcgaatgacaaaagatgccgcccaaggaggtcgagaccgattcccacacggcaactaaacacgaggctgcgtcgaggagatcaagattgatccttcgacgacaaaccatgacgacgacatgacgccaagagatcaatctctccagggcagacgaacaatgacaatgagagaaaaatcgatgaccaagaaaaaagacgctggccgcccccgggagatcgctactcccggggtagcggcggcggaagcttttgagcggagctagatcgtctgctctgataccatattgaatagtgcagggagagagatactacgaattttaaacatgttgtattgagcctcggggaccaatatatataggagtatatgaggaggaggtaagaaaggattgcagatatgaaagaagtccacataattcaatcatatcctaatataactttaactaccatatactctaacacggtcatggggggagagagagagagctcgagaggctcggcttgtgtggagaaaaggggagggctcgtcggctatttataggcggtgagaagcggtggatcaagtcggttgcggaggaggagagcaaggggtacacgacgacggtggcgtggaggagatggggtcagcaccggcttcgttctcccattggatgacaatagcggcgcgcgtacgtggcggctgcagtatggttgggcggcggaggaggaggagcacagcacagcgacggcagctcggtgaaaccgcggcagtggcggcgcccatggcatgtggtggcggtgacgcgctcgcatgcgccatgcgcgcccacagaggagtggagagggtggcggctcggctgggctggctaggccgacttgggcggttagagagggagatgggctgaggggagaagaaaaaggatttcggcccaaagtgaatagaaactgtttttgaattttggaggagatttggatggctaggttttggagaggatttgaatttggagagatttatgtatggagatgaatttcaaaagatcttctaatttatttgactgcaatatttttggaggtggaatataatggaatttatttgatgcactcaaaatgggagagagggatatatattagcatgaatagtatgattcctaaaattgaatatattattgggaatgtgggaggaaaataaataggattttagccccaaaatatatggcatggattttagagaattatttgaggataataggaaatttggattttggatgagaaggataaaatctattttcttagcacaagagcaattattctaagaatattattcttgtgccaaggttggagtaaagccatagaaattaaattggagactagatagaaatttgaccattggaatagatatagaaggatttataaaatatttggatagaggagaattagagataggtctagatcaaaggttttggtcaaggattaattccaatgaaattggaattatggtggtttaggttcaagggcaatattggaggttttcttggaccataatttataaaaggttttcaaataatttgaataaaagatttttagtcgaaagaaagtttaatattcaaaaatagaattcaatcaagaaatacctcaatttaacaaaatatatttttaaatgaaaaccacaaaagaaattaaataccaaagagggattttatgcaagttagttttaggaagttacctctaattgtatttcctaggttttggaggttattaaaaacataagaatcggcatgacgcaggattagaaaatagttaattttcagatgttacacacgcgcacacgtctctcctactaaattacattacatgtgttgtctctcctactaaattacattacatgtgttttatatgtatgttcattagattatacttaatcaacttacatacataattttcggacttacattgtaaatacatatgtaatttacggacttacactgtattaaatacatgttgactattttttcacgaaaaatatgacggcatatatatgggtggtctctgttttgtttacgggtagtacatatatatgtacattcttctcgatccatatgcattgaatccatttatcagagattagaatgaaggattttaatagatttaatctaatggtcaaaaataacggatccaccaattaagtgaaaatttgttttgcttttttttctcaaaacttgtaggagattttaatagatttaatataatggtccaaaataaagggttcaccaatttaagtgaaaatcaatggttatatgtttgctttttttcttaaaatttgtagaatttgttttaatttattagaatgtcatgtgatggtttgatagcatttgtataaagtttgacggaattttagtatatataatagatatagatagatgtaataatagcccgtgcaaacatgtggtttggcactagtagtattaattcacgtttattgcatatagttccatgcatatagtttctttttcacaagtactcatatatacatgacagcactttctcctgatgtgcacgaatctcggcgcatatcgatccaatggccatgcacataagagtacatgaccttaaggactgattttacttttccaactctatttcactactagaaaacttattttcgacgtcgtaagggttaaattttcgcaggcgggtgtagacccccgtttttataacaggaatcaatcgtgtaaacggtaccatttccctggatcaagtagtttggtacacacgaattcatagctggaatatatagtgcacatacacgagtgtttaatacgaattattacatcataggcccgcccgcaggcatagtcttaaatcatcggaccgagaggtccggaatacatccaaaaacagaaatagataaggcagcggaattcaggcagcggcatgccattgccacaggcaacgactgtactaagacctactggacgccatcgtcttcatctccctcctgatagtaggcatagggatcctccgaggcttcatctcccgcttctgataaattttatatttgcaaggatgagtaccaaccgtactcagcaagccaccacagcaacaatgcatatgaaagggggagttcaaaggatggccatagttcttttgcgcaaagcaagttttgtaattcttttcacaagcctaagacctagcattgactgatcaaattttagtaccagagtttgtatttaaacaacgacggttctgtccaccatccattgtgatcccaaggatagcttcccgccattgattcgtcatggttttctgaggacgtccaccttcccgcctctcaggaagtggctccaacagcataaaattcatcatgcaatatcccctcccacacaagttaagaatttagagtctagccaagtgtaacacatgtcccggtgctcaatcaccgcgagcacggctattcgaatagatttggtttactcacactgcagtggatgtacactttacccgcactccgcgactgcccaacacatgagcctcgtcccaacacatgagacgcgtcacggcaaagcttttcgataacctcgcattggcagtacccgctccatgaacttaaatcctcatacactctaggcgtacacggtttctagcagtgagaggagttctggcgcacccgggaaggaaagactcacacatgcattaagttataattatgtttaaattctcacatggtagtcctactgatggcgacaccactgtagacacccgcctcgcggttctaccaatggctgccccaccgtagagcccctaccttacacatcaagaaaccactatgcatggatactgcctccgctcagctatctattccgctaggtctatacccatacgagaaatgcggttgtacgggggtcgtttcatgcttaacttcatggctcggtccttaattgaccagggacggcactagccttttccggacaccacccaagtcctccagccgccccagtcgaaaacagttgttttactttatttttctttcacaaatcatgtcatcaacatcatggcaatgtggcgctcatgtctccacatgccgcatctcaattaccttctcaaaggtaattgccccaagcatatagcatttgataaatatgagtatgcatgattcaagaatagcatttctaagcaattgtcatagttgactagggactcatacgtaaatatggttacaaagatttaaggattaacaataatcaaggcatggcataatcacaaataggatgttcatcattgcatgcaattttatttgtaaacaaaacaatttcgcaattaggatcaacatgttcaaggaatagtgatgacttgccttgctcgaggtcttgcgggtcttggccttcacctggatccgcggcttcctcgatctctatagttacgtgcgaaaattgatctgaattcggttagaattcaaataaaaatccaagtaaatccaaatggaagtcgaacgcgaaagtcgattcctttttattaattttactatccgcgaactatggcaaaccccaattttggtttaaattattttgcggttacaatattttgttgtcgtatgtttttaatttaatctaccctagcattatatccatatatattaggttagaaatttcttatcgcgagctaaatgtcggacggaatcctaaaattatcttataatattatacgacttaatttagtctatgattaaatataatacacggctaacaccctagtaattaaatccgaatcgctaccgttgatcgattatttatagagattacccagaaataatccacaataatttatgagaattcatacatttgtttaattattaattacatctaaattaataccgcgaattgatttcttatggagggtactaaaagttatctataatctataggaatttatccaattatattttccttaatcctacatttaaatgctagtattttaggtatttaattagtaagagtttatctaaccatattttcattaatcctacaattaaattctaatatttgtaaatattttaaatttccccctaaatttttcctttttctttttctctttttctctcttttccttttcttttctttctcttctttttctctcttcctctctttctttttcttttgtccttctctctccctcccggtttctctcgtccttccttctcttttccctccctcggttctccctctctctctcggctctccctcctacccgagcggcgcggcgacaaaagaaagaggggggggggggggaacagcggctcaccgacggcggcggcggcgacgacggtggcggcgacgacggcgcacggcggcacgagaacggcggcgcgggggcacgggaacggtggcgcggcggcacaggaacggcggcgcggcggcactacggcggcggcgcggcgaaaagggaggagatggaggggaatgggtgtgggggagaagagatgggttgggggttttatagggtgtgagagggggagaaagagggggcggtgaggggatgcgatggcggcgctgcagcgcgcggagcgcgaggcggcgggcacgcggcgcgaggcgacgagacggcgcgcggcgccgcagcggcgacgggacgcgtgcgacgacggggcgcggcgatgggacagcggcgcggcgcggtagcagcggtggtacgggctcgggcgggacgcgacgggtggcgacgcgacgggtggcgacgagcgggcgagcggcgacggtgactacgcgacagcggcgacgcgacgggcgggcagcggcggcgcgcggcgcgaggtgcgggtgcgggcgcggcagtggtgcgcggcgtgaggcggcgatgggacgcgcgcggcgacgggacgcgcgcggcgatgggacggcgcggcgcgacggcgatggcgacggcggtgtagggctcgtggcggcgacggcaacggcacgggcgacggcgacggcgacggctcggcagtggcgacgtgacggtgcgcggcgcgatgggacagcgacgcggtggcgacgggcgacgcgacggcgacggctcacagcagcggcgcggggcgcgaggcggcaggctcgcgtcgcggcgatggaacgggcgagcggcgcgcgggcgcgaggcgcgaggcgacgcgacgtcggtgcggcgcggcagcggcgatggtgacggcggtgcgacggcacggggctcggggcggccgggcgcgcggcgcgcggggcagaggagggggctgggctaggggagaggtgggagagaaggggaaaatgctagggaccacatcgaacaccttgcgggcaatcaatagtgcactttcctaatattcccgattttaggttattttcaaaataaatttgatttcataatttctaaatcttgtttaaatgaagtacatcccacatttgtgttatcctaactaaaatcctccttaatttaatatcactcatattctgtttatataatttattttaattagggttattccatcgtactaaaatttaattattgctaatatggttgcgatatttatttccaaacccacctaacctttattttaatttatattttaattatttatttagtcaactagatttattttatggtttgttcctagctagttattcattattcgcgattaatagactccgacatcaaaatccaatgaaacaggcgaataaagtcggcatgatgcaattggtttaaaaagtttttgaaagtccgcatttttagagttttgatttcgttggtcgaattttcagggtgttacaaacctaccccccttaaataaatctcgtcccgagattttcttaccagttgccgaatagatgcgggtactccgtcctcaagaattcttcgccttcccaggtggcttcgtcctcagtgtgattactccattgtaccttgtacatacgccacactttgctcctagtcctctaatctgcttcatccaatatccggatcgggtgttctggatatgtgagatcattgctaatgtgaatctcttccagcggagcttgttcttccggcactcgtaagcatttctttaattgggacacatggaagactgggtgcacatcggcgatatattctggtagctgtaactgatatgcgacttctcctcgcctggcaatgatctggaatggccccacatatcttggtgccagttttcctttaaccttaaacctttttgttcctctcatcggagaaacctttagataaacgtaatctccttccttaaattccaggtttcttcttcgagtgtcggcgtaactcttttgtcgtgattgtgctacttttagacgatcacggatcaagcgaaccttttcttctgcttcttgaataatgtcaggcccaaataccgcccgttctccagtctcggaccacattagcggggttcgacatcatcgaccaaacaatgcctcgttgggtgatatctttaggcttgcttgaaagctgttgttgtaggagaattcggcgtagggcaaacatctctcccagtccttgctaaaatccagagcacaagccctcagcatgtcctccaggacctggttggttctctccgtctggccatctgtctgtggatgataagcggtgctaaatgcgaggtaacttcccagggcttcatggactttctcccagaaatgtgaggtaaattgtgtgcctcgatcagatataatcttcttaggtataccatgaagacacactatcctggtcatgtacaactcggcgagttttgcactgctatagtttgtcttgacggggatgaatcttgccgtcttgttgagtcgatccacgatcacccaaatggaatcatatcctgttgcggttttgggcaatccaacaataaaatccatgcctatctcatcccatttccattcgggaatcctgagaggttgcaacaaacctgccggcctctggtgttcagccttcaccttttggcatacgtcgcaaagtgctacgtattcggccacatctctcttcatgttgggccaccagtagccctccttcaaatcctggtacattttggtacttccggggtgtaatgagtatgccgactcgtgagcttcctttaaaattaatcccctcagtccaccctgttcgggtacgtaaattctctttttataccatagaacgtcttttccgtcggttgaaaattcttttgcacgtcctgcagctaagcgttccttcacctctcggacctcctcgttgtccttctgggcttcttctatttgggttctcaaaagaggttgaatgtccagggtgtttatccgtccatgaggcactatatgtaggttcagctgagctatttcctccctaagctcagggaccatcccttccattctcagatgattgtaatggctcttacgactcagagcgtcggccacaacgtttgctttgcctgggtgatagtgaacctctaaatcatagtccttgattaattctaaccatcgtctttgcctcaagttgagatctgactgggtgaagatatactttagactcttgtggtcagtgtagatatcgcaatggtttccaattaggtaatgtctccaaatctttagcgcatgaaccacagctgcgagttctaggtcatgggtagggtagttttcctcatgtggtcgtaattgtcgcgacgcataggccacaacttttccgtcctgcatcagtactcctcctagtccttgccttgacgcatcacaatatataacaaagtctttcctgatgtcgggaagaactaaaataggtgccgaggtcagcttttctttaagctgttcaaagctttcctgacattgttctgaccatacaaacttcttttccttcttgagtagttgtgtcatcggtcgggctatcttagagaacccttcaatgaaccttcggtagtatccagccaagcctagaaaactccgaatttcagtcacagatttgggtgctttccattccgtgacagcctccactttagcagggtccactgctactccaccggctgagattacgtgacccagaaaagcgacttccttcaaccaaaattcgcacttgctgaattttttgtataacttgtgctttcggagtttctggagaaccaatcttaagtgttccgcatgttcttcttcatctttggagtagatcagaatgtcatcgatgaataccaccacaaacttatccaagtaatccatgaatactttgttcataagattcatgaagtatgccggggcattggttagaccaaacgacattactgtgaattcatacaacccatagcgtgttgaaaacgcggttttggggatatcctcggtcctaatcttcagttggtggtatcctgatcgaaggtctatcgttgaaaacaccttagctcccttaagttggtcgaagaggtcatcaatccgtggtagtggatacttgtttttgatagttacttcgttcagtgatcggtagtctacacatattctcatgctaccgtctttctttttaacaaacaacactggggctccccaaggtgacgaactggggcgtacaaatcccttctcttgcaactccctgatttgctttttaagttcttctaactcattgaccggcatccgatatggtctcttggatatgggggtagttccgggtatcaggtcgataatgaactctatgtcacgatctggtggcatcccaggtaaatcttctgggaacacatcaggaaatcgctgcactacgggcattccctttaggggtagcatggtaaatatacctccggcacgttcggttagcctaggatcttgatccatggttgctcgcatatccgatccccagggtgtggtcagggtaacttctctacgtctacagtcaattactcctgtatgctttgctaaccaatccatacccaaaatgacatcaagagtttggggtattagcaccataagattggagggaaataccacatccctaaggagaattggtacgtctatgcaagcatgactcacagttatctcgcccccaggtgagtgtactatcataggctttctaagtcccacgagggtcaagttgtgcttttgactagccttcagagatataaatgaatgcgatgcaccagaatcgaagagaactttaaccggggtggaattgatagagaacatacccattagtacgccctgatcttcctgggcctcttcagctcggacatggttcacttgtccgcgcccaaatccagtggtggtcctgttcgattgcggagtcttgaataggcctcgcccgacagtaggggtagtagtgccgcgaacagtcattgcattcgcgccagttcggacaggggttttgcgtggatgagggcagttgttagcgtagtgcccgtattccccacagttgaagcagtccacattcttcttggctccaggggcagccaaagttggtgtaggggtgcggttctgaagtgcaactggcctgttgaagttgctaggtgcagcgggacggttggtcaccacgacagggggcttccatccggacggagtggctcccttgagtcgctgaggcactgtctgaggtgggcgactcatagcaagcctcctcttgcggttgtgttccaccgtcctttgatcgttctctagcctgacgaccttgttgatcaggctctggaaactctcgtgatcctgcccgatcataggtccacgcaattcatcattcagcccttctatgaacttgtcgatcttttcttcttcatctgccaggtctccaattgcgtagcgggccaactgagtgaacttgttcagatactcctgcactgttgtattcccttgccgcagtcttctaaactcgttcttcttcatgcgcatcactgcagcaggtacgaagttctcgcgaaatgctgcagtgaactcctcccaggtgggttctccagcaccgtcttctcgggcttccttgtaggtatcccaccagtctccggctggtccttccaattggtttgccgcaaagatcactttatcggcctcacgtactcgaacaagagttagctttttctcaatgaccctcaaacaatcttcagcatccataggttcttcagctgtggcgaatgtgggtggcttggtcctcatgaactctccaaagcttgaccctccgcggttgccttagttgttcgcgatagcttgcagaagttgagtttgggtggccataactccggccagagtggttaggtcaggtgtctgagtttcgtcgttgctggttgttgcccgacgacggcttgccatctgtgtagggtgatggggtaagtatcctaattttctaactagctcctatggctttatcctattaagggagttgtgttgatatgaactttgttttgcaagcatggtggaataaactcatttataacacaacaacaatggataccataaataacatcacagagtttcacaaatgatacatgaatcatgatgcaatcgactgcatacatacgcagtccaaataaagttcatccagaagatacaacgaactaatcatcaaactactcgacaatctaggtaagggagggggtgtctcgcatactatccaaaaaccatctgatacgagagcgaagctgcaaggagtccgtcagtctagtcctccagccatccgcaagatcctggggcaggtagagggtggtcgctggcacgcgcaaacctgagtccccacggctcagaagtagtggcctctggatctggcttgggcctcttgcccggaggtcgtgtgctcttgcgagcagtgctgagggtgcgagggcctccaaggaaggtgatgcggggaacaggagcctcatcctctgaaggatcagtgatgtctggctcgatctccggctcggtgtcggtctcctctgtctccgagtcgatctggatcggagtctccaaaccggaacccagctgcggggaaggtgtagggaccagtggagtgtgcaccaactccggaacaggtggctgtgctgctgtagggtccactaggtagggtgctgactcggtagctagcatactagcctctcccaggagagcgtggaacgctggtgggtacggcggggtgaggaagaagtagcggtcacggcctgctgctgtggaagtagaagcccctgtagtgctgatcttggctgctcgaagctgctcctccaactggctgacgtgctcctgactctctctcagctgctcctcaagagtatccatcatcccgcggcgatcgttgtactggtcagacaactgctggtactggtcgccgtggacctggagctgtgccttcagtgagtctatctcactgccccaagcctggtgctcctcctccaactgaagctgctgcgctgtgaggtcggtcacctcagtctctaactctcccatacgtctctggtggtcgtcaatctccaacagagcctcctcgtagtagtcatctactgcctcagcccatcgtgacaaccgagtcactatcgggttgtagcagcagggcgtgttctgaactgtgcaaactgagttgccctcctcccggaacgggtggtgagcaaactcggtactcactaactcggctcggtggatagagctgagtcggaggaaggcctcccgggcggcatcctgcatcgcggtctctggcaggtctcggtggtgacgtgtctgaaagctgtagtccaactcggaagggactcgggggtgaatctcgacccgagcctcccaaactgggccacactgcctcactcggtatgacggaaaaccagggtatcgcagacgcctcaacatctggtgcagcacaatgacatacccctccgattggggtaagctcaactcccaggtagcgggtgaatccgaatctgccatctaattttaagaaaaacccaaagtcagttgagagtaaaacttgttttgtaaagaaaatagttaagagtaagatgaaaattgtgccgagttttgtaaacatagcgtttttatttttgaaagtattactagatgggaatttctcccttggccaacttagaaaaagggtggggcgccttttggtcttttcctacagtcgtatggctctgataccagctctgtagacccccgtttttataacaggaatcaatcgtgtaaacggtaccatttccctggatcaagtagtttggtacacacgaattcatagctggaatatcaagtgcacatacacgagtgtttaatatgaattattacatcataggcccgcaggcatagtcttaaatcatcggaccgagaggtccggaatacatccaaaagcagaaatagataaggcagcggaattcaggcagcggcatgccattgccacaggcaacgaccgtactaagacctactggacgccatcgtcttcatctccctcctgatagtaggcatagggatcctccgaggcttcatctcccgcttctgataaattttatatttgcaaggatgagtaccaaccgtactcagcaagccaccacagcaacaatgcatatgaaagggggagttcaaaggatggccatagttcttttgcgcaaagcaagttttgtaattcttttcacaagcctaagacctagcattgactgatcaaattttagtaccagagtttgtatttaaacaacgacggttctgtccaccatccattgtgatcccaaggatagcttcccgccattgattcgtcatggttttctgaggacgtccaccttcccgcctctcaggaagtggctccaacagcataaaattcatcatgcaatatcccctcccacacaagttaagaatttagagtctagccaagtgtaacacatgtcccggtgctcaatcaccgcgagcacggctattcgaatagatttggtttactcacactgcagtggatgtacactttacccgcactccgcgactgcccaacacatgagcctcgtcccaacacatgagacgcgtcacggcaaagcttttcgataacctcgcattggcagtacccgctccatgaacttaaatcctcatacactctaggcgtacacggtttctagcagtgagaggagttctggtacacccgggaaggaaagactcacacatgcattaagttataattatgtttaaattctcacatggtagtcctactgatggcgacaccactgtagacacctgcctcgcggttctaccaatggctgccccaccgtagagcccctaccttacacatcaagaaaccactatgcatggatactgcctccgctcagctatctattccgctaggtctatacccatacgagaaatgcggttgtacgggggtcgtttcatgcttaacttcatggctcggtccttaattgaccagggacggcactagccttttccggacaccacccaagtcctccagccgccccagtcgaaaacagttgttttactttatttttctttcacaaatcatgtcatcaacatcatggcaatgtggcgctcatgtctccacatgccgcatctcaattaccttctcaaaggtaattgccccaagcatatagcatttgataaatatgagtatgcatgattcaagaatagcatttctaagcaattgtcatagttgactagggactcatacgtaaacatggttacaaagatttaaggattaacaataatcaaggcatggcataatcacaaataggatgttcatcattgcatgcaattttatttgtaaacaaaacaatttcgcaattaggatcaacatgttcaaggaatagtgatgacttgccttactcgaggtcttgcgggtcttggccttcacctggatccgcggctccctcgatctctatagttacgtgcgaaaattgatctgaattcggttagaattcaaataaaaatccaagtaaatccaaatggaagtcgaacgcgaaagtcgattcctttttattaattttactatccgcgaactatggcaaaccccaattttggtttaaattattttgcggttacaatattttgttgtcgtatgtttttaatttaatctaccctagcattatatccatatatattaggttagaaatttcttatcgcgagctaaatgtcggacggaatcctaaaattatcttataatattatacgacttaatttagtctatgattaaatataatacacggctaacaccctagtaattaaatccgaatcgctaccgttgatcgattatttatagagattacccagaaataatccacaataatttatgagaattcatacatttgtttaattattaattacatctaaattaataccgcgaattgatttcttatggagggtactaaaagttatctataatatatatgaatttatccaattatattttccttaatcctacatttaaatgctagtattttaggtatttaattagtaagagtttatctaaccatattttcattaatcctacaattaaattctaatatttgtaaatattttaaatttccccctaaatttttcctttttctttttctctttttctctcttttccttttcttttctttctcttctttttctctcttcctctctttctttttcttttgtccttctctctccctcccggtttctctcgtccttccttctcttttccctccctcggttctccctctctctctcggctctccctcctacccgagcggcgcggcgacaaaagaaagaggggggggggggggaacagcggctcaccgacggcggcggcggcgacgacggtggcggcgacgacggcgcacggcggcacgagaacggcggcgcgggggcacgggaacggtggcgcggcggcacaggaacggcggcgcggcggcactacggcggcggcgcggcgaaaagggaggagatggaggggaatgggtgtgggggagaagagatgggttgggggttttatagggtgtgagagggggagaaagagggggcggtgaggggatgcgatggcggcgctgcagcgcgcggggcgcgaggcggcgggcacgcggcgcgaggcgacgagacggcgcgcggcgccgcagcggcgacgggacgcgtgcgaccacggggcgcggcgatgggacagcggcgcggcgcggtaccagcggtggtacgggctcgggcgggacgcgacg

SEQ ID NO: 9067 - DNA, 26639 bp, Oryza sativa
tttataaaacctttttaactttgtttatttcttctcagttattatttgtgctctgaaaattccactaaaatttatttacgcattttaggcttttaggaaatatacaaaaatcctccaagccttatttgacttttaaatttgcacattttaattgttggaagctttcacatggattttaattattctatgcacaatttcgaggatgtattttagagtcgttttgggacgcgacaggttctcccatccgagctcaccctgaggtcccctcgggccaccatgtactgcgaggctgttcaagatcagcttcgcagagatgacctcgactacttggaagagcgaaggcggcgcgcggccctccgagccgcgcgctaccagcagagcctgcggcgctaccatcagcgccacgtccgggcccgatcactctgcgtcgacgacctcgtcctacgccgcgtccaaacgcgtgctggattgagcaaactctcaccaatgtgggagggtccgtatcgagtgatcggcgtcccccggctgggctccgttcggctagccacgggcgacggcacagagctgcctaacccgtggaacatcgaacaccttcgtcgcttctacccctaagggggatcaggtgtcaggtttcgggctcgggccaaccccgcacccccctcgggcgtgcagggttggccgggggctaccacatatgcatattcttttttctcttatatctgtatttcaataaaagcattttcaatttcctaaaggctgtatctgtgctgttattttcttttgaagaatcttgacttgaaataggtcactcgtgctcaatcttgccctcgggggctcgggtcggctaaaatcgccaaaaggggcccagaaccaagccatgccccggggcgtggtgaactccgggggggaatcggcaaaaacccacaatcgggtcacccataaccctcggtcaccacgctcccggcctggccagtctcgacacgtggatctccccaggcactagccccgacccgcgccttttgaggactgggacctgggcacgagcccttagtcaagctaagacacaaaaggaccacggcacagatcatcctcatcgcatacacatagcaaaataaaattgacacagaaatttctttattttgattgcagattaagtgaatctatacaaaaaggaggcccgaaggccttcgaagaagaaagaagaaactatttaaaattggcgggggcctgggggctcactccgatgcacccggatcgccagcctcgtcgccactgtcgcccactccgccgtcatcgtcctcctcgtcggagttgagggagaacgcgagctgaggggccgaaccctcgaagctgtggacgatgtggtcggcggcgtcccggacctgcgcgcgcgcgccgtcctcggtcccgggagggaactcgtccagcgccgtccatggggagaagtcggggtccctggcctggtaactcgccagtacgagctccaccgctcctcgggcgaggtccctcgaggatgacttaatcgtcctctcgagctcctcggggagccgttggagagtcccggccatctccgagaggcgctgggcgaggcccccctggttggtggcgtacttcgcagtccgcccgccccagagacccgcctgccgcccggcgcggtctaaacgggacacggcgtcccgaagcatgccgggccctacctcgcctgccaagcggagggcctcgacctccctggcggacgagtctggcgcgccctgcagatccgcgatggtgtgttcggcagctgcgaggcgggcggttaagtcgctttcgcccgcggccgccccgccgctgcgtgccctcgcgtccagctccttcacccgcgcctagagctcagcggcccgctggttcagtgcggccctctcggcgcgggcaccttccagattacggcgcgcctgctcctcccgcgctgcctcgcggagggacaggctgtccgccagccgctgcgccgcggcctcggcctcctcgagagctcgctcccgctcggtgagcgcgtcctcgcggaggcggagtccggactcctcttcggcgcaggcggcctcgtgcgccgccagcgttgcctcccggatggcaacggcggcctcgcggtccgccaggtccctctccacgacgcaggcacgctcttccagcgccatggcacgggcctcaagggcttcttcgcgccgccgggatgccacctcggtctccgccgcccgccgttctcgggcagcggcagcgtcaaggaccccccgggcggcgtcgagcttcttccccagctccgcctcctagctcccgtattgaaggcggagggtgtcctgcgtctcgttcatcacggtagtggcgatgagggcagccccccgctcctcctccacctccttggcaatctcccccagcaccttccgacgggcttcgagctctgaggcatgccggcggtgtgccttgcggcccacctccaccatggcctccaccgagcgtcgcccctcttcgacacgcgcccatgcggcgtcgagctccgcccgctctgcttgcagggcctccacctgggcacttaacccgtccaacaccgtggtgtttgcgacggccaaggcctgcagaaggggctctgcgctcagtggggcaacggaagacgtggggaagagccgcctcggagaggatgccgcgcggctcggtccgccgatggacgtgccggactcggggatgtcccccggacctggtttgtcctgagcgtcgcacgagggagtgggcccaagcgatgcgcccgcggcctcgtcgcgagctgcctcggaagtcgtcatcgcctcggcctggcgaagtcttgcctcctcccgagcggtttcttcagcttggcgagctcggacggccacctgggtagcttcctcggcttcccgaaggcgatccgcggcctcttgccggtcagtttcacgggtcgcctcggaggatgtcgtcgcctcggcctggcggagtccggcctcctcccgagcggcttcctcggtctggcgagcccgggcggcctcccgagcggcctcctcggcttcccgtaggcgatccgcggcttctcgccggtcagattcccgcctccgggcctctgcggtcgccggatcctcggcctcagactggccggacttggaatggcgggagggacgcgacgggatctcgctgaaacagaagaaagaccagaagacaaacaaaatgggtgagtgaaaactcgcgttgagagaatgaatacagccacgatgggcgtgggacgaacctgcgagggggtcggttaaacgaccaccttggaggggaaataaggtttccccgggatggttctgtcccccccatcttgcggagccgtttcttcttccgctccccctcgggctgcgacgtcggcacggcaccctccgggcgcctgctgctggcacgcgccgccccgccccctcggggaggagatgggggaggggttccttcctgcttcctcttcccccgggcatcggcagggcggctgctccccgggcccccgtcgcggggcccagaagcacgaccccctcccggggtagattgttcccccctgcggctcccgcccgcgccatcgtggcctcgaggagcccgctcctccgacgccccgaccgcctgcatgatggtcaggatggaggcgcggtctggatcgctgcagagggggaggactccttggggaatgagtgatgcctccacggagctgagattcagcacccgttggaccactatcttgaagtcctcaggagcccagtcccatctgaccctctggtgggtcctcatgtagtcttcggacccggtgtactcccaggcgccccgggcgcgccgctggagcggcgcaatccggcgacgaaggtagtcgccgtacaccatggcccctatgagcccctgggatcgcaggcccgccaggcggtcgaggacggcgtcatagccatctcccagatctaccggcgtccgccagctggaggcctgcgccgggggctggctcggaagtcggaggcgcgcttcgtcagcgaggggggtgtagaaccagttgctcttccagtcatcccacttcttgcggaggacgcaggggatgtagcggttcagcaccggcccccgcggctggaagtagcagccaccaaccaccgacggcggcgacaccgactgtacggtgaagaaccaccggaacagccgaagggatgggcgcaccccgatgaacatctcgcacaggtgcgcgaagatggccaatgtcattaccgcgttgggggtgaggtgcgccatctggagatcgtaaaactccagaacatccatgaagaaagaagaaaatggcggaaccagccctgccattgcaaaagggaggaagaagacggaccgccccgggtagcatggcgccgggcgtccctcgcccagcgtgactatctcccggccggtggcagattccggcatgaagcggcgcggcagcccggcctgcctctcgctcacgatgcgggaaggcggcagcacgctaccatcgagcagagcggagccccgtgccatgacgccggaagaagagatgtttgagagcgagcgcgtgtggcgagggtagggcacaggaaacaaggagttagggcgcaagcggtgaagacaaggagaataatggcgagaggaaggaagcaaatctcttcctcggtgtctttatacccttgccaacgctgtgcccggctcctcgcttctcgcgcccactatctcgctccctcgtttctcgcgcccacgcttccactaatcccattcgcccgcttgcggcgcatgaggtggatatgcggctgtggcagtcgagatggaacatatcgtgcgcgcgttgattacgctcgccgaccgaagcgccatcaccatatctcaaggtaaaacgaaccggctcgtcccgattcgtgtgctactcgagtaatgtggcagtcttgaagagaccgctcattattggcagccgagttaccattgccgatgtgcgtgatttgcgaccgttgggtttctgcccaactgtggagaccggtcccacctgtcaccaggccttaggaagtggcgtcacgcccgaccgcttccctcgaggagggcgatcgccctggcataacgccgggggctactgtcggtgacatgggaccgggagtatcatgactagaggcttgggcaggagcaatcacccacgaggcctgaccccctcgggggggggggggtcgggcccgagggtgatgtggccgcctccctctttgtctccccgaggggtcggaccgctcccgtttcggccccgaggactgaggcgccccgaccccttgtggattttgcgccgcgtgtatgggttaggtgagcgcagagcggggctcacctaaccgcatttattgcggtttggacgagcgcgtcacgctgcatgtaacgcagtgcagcgtgctcgtttatccggtctgtgactggtcacagaccgatcagatcgtgggttacgtggcgacaggcggtctgacgcacgcctcgccccatcccgtcaggatgagagcctccaagcactcgtccctagccggagccggcgtgttacctcctggagatggcacgttggtcccggtcagatatatgccaggcttcatcctaaccattacaagcaagatattgtatgaagaagggcgaacatgcagattgataaactgacgcgtggtggacaagaatgaccgatttgtgaccggtctgacactggtcatgtcgtcggcagacagccatgttcccacgtcgcacctgcttccggcgaaagtagaggtaggtatgggccgtcccatcagaagatcattcggacggcaaccatacaaatctccgtccatttatgaagagaaggcaaatcaagttggagaaaagagaggataagtccccacacaaaagagagagatggtgcatgtggtatccccttgagatataaaaggaggaccttgcccacttagagagagaggaaaaagggatggagaacgatccgagactgggattcggaaccagaaagggagagagttagagttctctggctctccagctctttgtagcttcttcatacacagatccaccaaaacacaggagtagggtattacgcttctcagcggcccgaacctgtatacatcgcccgtgtcttgtgtgttttcattctcgcgaactttccacagaccgagagcttagaacctcacccagggcccccggccgaaccggcaaaggggggcctacgcggtctcccggtgaggagccacacgttccgtcaatatatatatatatatatatatatatatatatatatatatatatatatgcctattcctatataattagaaccgactactcggcaggggtggatctagaaaatagagtagctagggtcactactcaaatatggtggtgtgtcaatacagtaatccttgtttctagagtgtgttagcaaagtgattagtaagaaatcatgggtgtcagctgacacctgcttacactatagatccgtctctgttactcagcatgcattgagtcacatcatccataataaaaggaaatgcctctatggtcacaataaactctaaaacatttgatttttctgtatcttctctccaaagccctaatacgtgtccttgaacggcagctgttggtgccactgcatgcgtgagccgttcggtgaggccaaggcagagcagctttgttcgtggcatcgatttctgtttcccaaagacaaattatacacacatctagatgagaagaacttgcatgacgatctacaaatttgtgcaagaattattttaccatggatgaaaaatacgtaaatattagaaaatgatctaatattaagtataattagaagggggtgagcttttaaagccaaatcgtctagccaatcaccttatgaagctagccggaagaccatgggctgttctcatttttccatggatgcgtgaatgtcatcttacatacgtgccgtgggggagatcggtagcatgtgcatggcgaggagcaatgtcttgtcactcgtgtggctggactcgtcgaacaagaacgtagtcgagaacacgacgggaaggagcgacacgggtgaagagagggagaggggctgactgacgtgaggacctactaatttattactccctccgtattataatgtatgacgccatattttttaacaagcgtttgaccactcgtcttatttaaaatttttatacaaatataaaaatacttatgccatgcttaaagaatatttgatgataaatcaagtcacaataaaataaattataattacataaattttttgaataagacaaaatgtcaaacgcttgttaaaaagtcaacggcgtcatatattaaaatatggagggagtattattattatatctggctgtcatgtaggtcctattgagtttttttttctatttttgtttttttcttttagtgtcacgtaaacatcacatgggttgggaggggaataccaaatccagcatgtgagattgacgttacgtagaacaaaaccattgagggattagatttatactgattttgatatctgggtgacgttatgtgtttggatttacggttgagagacaccaataaaattggacccatacttaaggggcataaagtggacttctctcgttgggagttggtggtctagcggtttgtggtaaaaattggaaataagtctattttgcctccctcgtgtcttgtccattgtagaatcgtatctctcggctctctcaagttcaaaaactagtgcaaattaactttgatggttttgatagcagtattgctgatgttgcaggttgacttagccctgatacgctgacgtggcaacccaatctttaaaggatttgaaaatagaagtgggtcccacatgtaagtgacaaggagtaaaaaataaaaaacggtgggggtccatacttctcctttttgaacagcgacgcgcgtagtagtgttgagtatagatggccaactgggctacccggcacaacacggcccaagcccagtcgtgcctgggccgaggtaattagtcaggccggcacggcccgatcgacacgccgggccgtgccgtgccagcccacgggcggcatacacagcgcaagcacggcccaatacgactcgggtcgtgccgggccagctcgaaggcacgatcccccatcgtgcttttccacagaaaaagtctatttttcattcctcaactctgtgggctatgttcaaatggttggagaataagtctatccgtattcctatcttctttgggccttgctttatacagttatctgagtctattttgcatccctatattttttttttgttcgatcttgccgtgccgggttggcccaccgtgctgagggtacaatctaggcacgatccggctgtcggaccggaccggcatgggcactaccctagtcgggccgtaccatacttgggtcgggccaaaatggtgtgtcttaggccgggccgcgggccttagtccatatggccatccatagtgttgagcacctcgtcgcgaactgcttctgtaacgcaccgttcttgtggtttgcctctcctgtccgtcagcaccatcaccttcggggacagcgacctcaccaccgtcaggaagctacccagctattaaggagaagaagtgttttgtcttcgtgaagaactgaatcaatataataagcgagtctttttttcttatttatgtggaaatcaattgctgtagcatgctttcgtggagattgatgtaacgcacatcgacatgatcaaactgaacgtgtaggttgatctgatgctgtttagctatatccaaacggtaccctttgctgttgattatctgtcgcttaatttgttataagttagataatggttttttttaaaaaaaaacaggaaaatattattagaaacatagaacatgagttattttacaattgataggagagaagtcacattgcatacttctggcatgacaatggccctgtttgaatccaagcgataatttttagccctctctcaaatagcccaaatagccccaaaagatccaaaagggtgagctatttgaggactatttggaaatagcccacccaaaaaaactatcccacccaaggggtgctaattggagctattttgggtggggcccacagcttttatctctcccacagtcgcacgggatcagaaaaaaggtcgcgcatcctctctctccgcacgaccgcgcgcgcaggcgcgtagcattttcgccgccacctccttcactcctcgccgccgcctcctccactcctcgccggcccccaccagcgccaccgcctccccccaccagcgccgccgccgccccacctccagtgccgcctcctccccccaccagcgcgcctccccccaccggctccccgctgctagatttgttttcttctccatggaaccggccacaccaagacacatgcacaacagatccagtggaaaaagagagtaaagggggtagttatgattgggaaagtgtactaaaggttaaatagctcttgcatccaaacagctcaagggctatttcattggagggctattccttgagctaaaaaatagctctcaaaataactctcggctacttctccaaacagggccaatgtctccaaacagggccaatgtctagtatatgatttttaatgtacacatgtaacgacgtggagggcgggtctcacatatcggtgaccacgtgcctctaactttatactccctccattccataatataaggcacaactacattttggatgttccataatataaggcatgcatgcatacaattaattaatacttcttcttcattaaattattactttttaaaatcctccactctcaagatctctaattctattggatgcatgtattacatttattagggtgattcaaactaagagatgataataattgtttattggtctttaggttaagggtggttctgccttatattttaaaatggatggagtattagaatagtactgaagccattattataacatgagggggccagaacaacgggctaagtaatagaaaaaaaatagtttaagtacaaaaaggtttggcttcaaacccctattgataataaagtactctatttgtaatattacgatgtgtcccattctgtactatttttttatattttaggacacggtagtatattatatgttttgactattgttatcaattgaataatttttaggtttatcatgttacccctagcaaaagaatacataagaaaattaaaaaaataacataacatttgttgatcaaatttaacttacggttactaactatatcgtaaatattgttgattttatttgatcggcttaaaactaacaaattaaggcctacataagttggtaaacaaagaaattacaatttggctagcaaaactgtcgttctagcaaaatttctacctcgtaaccattattataggatcgagtgacctgcagaccggccgagttttggtcaaccgaccctagtaggtcaaatagaccatcaaacgtatattcgattatttgatttccgctgatgtaatctaccattcacccttctctggtaggctttgttacctgtgttcgatcttataattatttcacaaaattagagtgaacctgtctactgtcggagtttggagcagtcgaaaccttcacaatttggtgtgtttacatactgttacacatgcaccctgagcaaacaccaggctaaaatggcgtagactccaaataccaaagcatggctgtcatactcatacgtgatttactagtacaggatgggacctaatgtactaatgcctgagataatcatgtcgatgcctgagataataatcatgtggttaattaattagctggtacttaaaaaaataattttgttggaggagaccaggcctctgctcgccacccctgtggctccggcattgcatcagagcatctcaatcgtccgtcaacaataaagccccggccattgtacaacgcaagagatagtatttttcagcgagctctttccctccaataagtctatttcaatttgattataagtaccgatacatgtgtgtcaagatttattaacatctatgtaaatatgggtaatactcgaaagtcctataatatgaaacggaggaagtatattcttacaatgtaaataatttctaagtatttatgcttatcctgctgaccatatatatatatatagaaaacattatatactatgacatattgctatctaagccttattgattacaattttatctgtaatctttttcgtttaatgcagaccatatctccaataatgaattcgcagcgatgtccattatgagctgtaatctttttcgtttaatacagatcgcattattccacatatgagtagcagcaatgtccatttataaaagatcaacgcttcggccaacgacattagcctagagagtacacccaatcattttagcttgcaatcgctctcagaatttccacattaaactagctaggatgaagttacaattcggtgttctattgttgtcccttgcccttgtggtgcagtgctcaggtatgtatttttttttccatttcctactccaaaacggaaatattagggaatgacctaatatgtatattaaggaatgacctaatatcaaataattagaaaggatgaggcttcgaatctaggtcgtctagcccaccaccttatggagctagccggaagacccctgagcatttctcccatttcctgttccgttgaaccgaatgaagtttgaaggattttttatggattctaaattttagatttttttttgtatgtattgtttagaacgaaagatatgattacagcaagtcatatcaaaaagcatttgcattcatccatagttccatcccttaaaaaggaacatgaagtttcacagaggaccctattaattgtttttcaaacaaccaagtgttagaagtaggcttctttctgggtgtgtttagttcacgctaaaattagaaatttggttgaaattggaatgatgtgatggtaaagttagaagtttgtgtgtgtagaaaagttttgatgtgatggaaaagttggaagtttgaagaaaaagtttgaaactaaacaagtgctctgttaaatttttttattttctgttgtagatatggcgaggaaggtgataatggcagatgaagaaccctcatcgacgaacccccaagattcgtcgtgcggatctatcgtcaatccagggccgtgttttccatcgtcgtgcaaaacttactgtaaaatccaggttcccccaacgctgatggcaactgtacgcctgacggatgcaagtgcacctactgcttgccgccttcacctccaacaaaacaaggacgatagatgaattcagtccaaaaaggaataattcttgtgtggctcgtttggtttgtatgattaattcaagggaatttggtaggacaaaaaggcctccaaatctagtataactaggattcaaccccgggcatgttgtggggctggtagggtttactagctattttaatatccacaaatatatcaaagggatcgaattttcggaatatttcagaacttcacatttttaagatttggataaatttcatataaaaaattgaagattaaaaatttaggtgaaatagtttcatgttgggaggttcaaaattttttaatttcccaaaaatttcaaaccaaataataaacgctggacacaagaagggctcgtgctcgtagtcgtgggaggcaaggatccaccacggctcctccgcctcctgcagctagaccatctctctcgctagaagtagggtagttaggagcttagggcagttaggggcttagggctacagtctgctctattcaaagattattttttgcaaaatcacaaaagccacctcatgggatatgatgcatgagtagtttagtaccatcttacctattttaggagagggagacctccttataagagaggatgtgctctactagccacttgaggcatgtaaggtggagagaagagggggaacacgcgcttgcttgcctcgcttggcatggcggcgcgcgttctgccaaaaaattggtttctcactcttgcgcacatgccagcctctttttgctgcgggaaattcaaatttgataattcggtgcgtgaaacggcgtggagtcccaaaattggttcctcactcgtgaaacggcgtggagtccggataagttacgcgcgacttatccggttcgaataatctggtgcatgaaacggcgtggagtccgaataagttacgcgtgacttatccggttcggttatgcggagcgaagttttgttttgctgcgagaaattcagatttgtttgttttggaaatactcggaataatccggtgcgtgaaatggcgtagagtctggataagttgcgcacgacttatccagttcggttagatcgtgcaggcgtcctgatcaagcgtcataacatctctatataagttaagccgccgcctacacgcaacacacgcgaaatcaatctagggtttgcctcctcctctgcaccgcgctgtcgctcgtagtctactctatcccattcgccggtgtgcagcggcgatcggaagaaaaggtctccggaaccttcgctttcgacgtcctgcaccaggagaaaacggtaataaggtttttgggaagcgctttacaccactgctccctgttcgaccacaacgactcgtcttccttttcgctcgtgtgctgcgcgctaccgtcaaagcccggaaccacgagtacttcctgctgggcaaccgttcttccagtaccctcggtacgtgtttagcatattacgcatattcgataagtttacatatgtagatcttatgatgcgtttatgctagtttaaatatgcaatgttatgatttatttatggaataaattaaatcattatatgttcataaattaaacataaatatctattgaaattaaaaattaaaacataatggaaaaaaaattgtaaattgtaacgttgagctctagagttagagttaggaagattccgataacgccctggctcttcacacgaggattttcaccggtggacaaaccagccatcgctgtcatcttcatgctcgtgtcaacgcgcctgctgaacttattctaatagacctagtttgattcaaagtttaaattttggttaaaattggagatgatgtgactggaaagttatgtgtatgacaggttaatgtgatgaaaaaggatcgaagtttggatccaaattttagatctaaacacagcccaacttaattcagaccaacttttttcagccgccgcggcggcatggccatctcgatccggcaatgtgtccgtgtacacgaagtgcagcaaatctcatccttagttctgctgctgcaaacctttttttttttgccgaagaaaattctgctgctgctaacaattaatcagccatttgattatggtatagcacattattaagtagatagataaagtatgaaccaaattaagttttagtgtttagaacttaaaccaagagagaatctatgctatatatgccactgagtttgtcccagtttaatgattttcaattccattgacattgtcttttctataatataccggtaaatttattaattattttacaatatagcatttggctaaaccttgtttccaaaaatacctaaaatacccttgtaaacatacaaagttaacaattgatttttcctatcatgtgtttcaaaacaatcatgatttcattagcctttttacacaatgtaaaattttgtgtacatgtttcgagacttttgcatttctatttttcttataaaatataatttatctgttatatgttacatggaataattttgtgttgatgtttttaacgtaattcatcttttatatgctacacaaaatatttttgtgccattattttttttccataagcaatttctagatatatcatataccacacaaaaatatgtttttttaaaaaataaatataccaaaagatttgaaacttatatacaaactttcatgttgtgcgacgatgctacataaaaaaaatcatatctttaaaagtttctatcagaataaatcaattgttaaccatgtatggagtatcttaaaaaaatccagatcaataacatattatagaaaaattgataattttgtttgtatattatagaaatggacaatgttaatggtaatttgttaaactgaaaaaactaagtggtatagaatggtaaatcgttgaacagaaataaataaactaagtaatatagactaatggattctctcttaaatctttgcaaagtactagagcatatttctgtcgtcaagcaaagctagacttgattgaagttaggaatctggcatctcctgcactgagagctaggaagcaaagcaaagcactaagcatatgagcaggcttcagcgtgtccaggcaaaaaaagggagcacgtacggctatttacgtacgcatgggcgatcatctataaattaacaacggccgagatatagactatagtattcaaactgcatgcatcgatagacatatattcatttcaatcctttcttgtgctctaggcgtgtcatcgacatgaggccgctgagagattatcaagatggctctgctcaatacaggtaattcaaacaacgtatttgaccaaactgtaggtactaacactacacgtacgtctttccctaatatgcattattcaaacaattattcgatgaaacaagtgttatttacaatagcagctagccgcccaaatctatttatatatactaacgaaatgtctgtgcattacaacagattttcataaaatatatgaaaatatcgaacaagatgggtaaatatttctcaagaaaacatatatattttgtcgctgagcataacactgtacatagtagatttgttgcagcaagtttagaagctctttgccttgccaatgattatagtggttcaatcatatgtgtatactttgattgcctcaaggtggtgaaaaaaatgtcattatagtattactgcattccaaaagaaactgatgttgaatctaggtagttgaatttgggaggcatacaggctacaaaatcagtcactgacaacaagagcccataagtcaatgatggaagtagtatagacatcataacggtctccacgtcgtaatccatctagacctacgccgcgctaatattacctacattaacgattttcacgttgttatccatctgagacttaccctatctactactcccttcgtttaagcttataagtagttttgactttggtcaaacttaaactatgtcaagactaagagagtgtttaagattaaagcagtgtcggagccaataattttgagcctgggcaaacctaataagagaaaaactatatatagaaaattgtactatttatcatatatgtaagttaagttaattagtgcccagcgataatttatcaatgagatgatggctgtttatcgtcagtgagttagactatagggctgcaactctttgctttggcctcatggttacaaacgtaatgattttgtccttgctttgcttgtttgttggcaaaacatataattaacatccactagaaccaggaagcaaggtaattaggttcaaattaagtagtaaatgatgtttatgccatggagcaatgtgttgttgtgtggtacggagcccgggcacctcccggtacaagccgaggcgccctactccaccacggaagtaaaggattaagaagatcgaaaaaatacgcaaaacaagtgaaccattaggatacaattaactaaccagtgggtccaattatcaagcaataaagttatagctttctaataaaatctcgtacagtatatattaatgttgcagttgtctgaaatgtctaaataaagttgcagtaaattgatgattactacaaatggtcagttaaactagattataagagaatggaggtactagattatttacttaatgataattaaactgctaactaggtagtaatatgtgggtttatgcattgcatgctcagcagctcattggctactcgtgttcaagaagcgtggaacaagtgggagatccagtgcctagtgatggcgagcttctccctgcaggtgttcctcctcctgtcggcaccatttcgcaggcgccacggctccaggctgctgaatggctcgctatgggtggcgtacctgatggccgactacgtggcgacctatgtcctaggccgtctgtcattcctgttggccgcagccggtgacacgcggcatcagttggcgctgttctgggcgccgttcctgctgctccacttgggtgggcaggagacgatcacggccttctccatggaggacaacacgctgtggatgcggcggctgctggacctggcagcccaggtgacgatgtccgtgtacgtggtgggcaagcagtggaaaggggatagattgctggtggctcccatggtgctcgtgttcgtgttgggagcagtcaagtacggcgagagaatatgggcgctcaggtcagccgccgcacgggcacccggaagtagttccattgctagccttgctgctcgcacctacagcaatattgctagtttcattactagccttgctgatgtgctgccggaatcagggcgtggtgtgatggcccattatagaagcatggttagtattagttcacaagacaaggtaagtatcgagagcatcctgaaggaggcctccatggagttccaagcaagcttggactttttcatggacgtgagcccttcaaatgtaagcggttcctactcgaggtaccataggatcaagaatgcgttggtggagatcaagtcttcaaagaatggatacgggatggcatacaagctggctgagatgcaggtctctttgatctatgactacctgtacaccaaattcggcacagttcgattccaaaccttcccaatatcaaaatcaaaatcaaatccaaccatggcggcggcgctccaatggcttgtctctcttggcctaacctctgtggctcttgtgttgttcgctagggccatggccggtaacactactagtagtaagttcaaatatagtagacctgatgttctcatatcttacatactgctcgtgggcgccattgcaatggagatatcctccatcttcattgcactcaccacatcatgctgggcaggcatcgctgtggtcaagcatcttcatctccatgtaggggagtggtcagggaagctggcacaatacaacatggttgatgcatgcgtccaggagagggagagacgacgacagacagcagctagtggcgccgtagggaagctaatccgctggatcctggcaccatgcgacagcgagacaccacaaccacacgtcgttgtctctcttgaggtaaagaagctgcttctgaacaaagtgcttgaaatagcgaccgatgtagacaacaaccgctgggacttcagtaggttccaaggccagtgggctctgtgggtggccaacagagtcaacggcggagacagtgatcctgctgctctaggcccagctcacagggcactttcggctagcaagatccaagagctggatttcgtgtccaccgttgttgcttggcacttggttacgaccatatgcttgctgcccggcgatggccctggcgagctcacaaaccctagcaaggacttgtccagttacatcatgtaccttgtggctaagcatgggatgatggttgatagcaatggacacatcgtgattgctagaagccgaatggaggtgcaggcatcttcgcaaatgcttgattttctcgatgagcttcacgaagatggcttcatccaggaactccgtgatggtgataggcaatataactctccggatatgatcgtacgtcatcggagtagacctgcacttaccacagctcgcaaggtctgtgtggagttgctcaatatcccagaagcaagagatcgatgggagctgattgctgcggtgtggacggagattctatgctacatggcacttaattgtggagctaccttccatgtcaagcatctcaccactggtggagagttcctcacacaagccaagatgctcctcttcgttatacgattgccttttcttatgaagagtcctctggaaggtataataatgcctccatttatgtgagttgttatacatatagaaacactactaggaaaagcattatcgcaagcggccgaaaacggtcttcgcgggcggggcggccgtccgcctgtaagaaaacgactgtgaagatcgccgatcttcgcaggcggggcggccgtccgcctacgaagataattttcgcaggtggacgttggctagtccggtccgcctgcgaaaatatgaagctgccacctgcaaaaaaaaaaatccgcctgtgaagataggtagaaatttttgaaatttaataataatttgcccgtaaatttaataataatttacccgttaatagaaattcttgcaggtagattattatgtacatatattggaagattatcaaacatttggtactaagaaatttacatatattgcataactcaaaagtgttaccaaaatatatatattataatatttttttatattgtgacttcaaatataccatctagttacattatggcatagcagtgttccactcccaaagattcttgaattcgtcacttgtcgctagagcaccctccagagtttaatggctaaatgaaactgaaaacataccacaaagttgagtcaacgtttaatgaaaaatgaccatagcatataaccatcagatgccacacgtacaaatgcctatttactgaattttgaaagaacaaatcaatgttccccctccagctccaatccaacagaaaggagaatgcagcagtctgtacgtagcgataacggtggtgatgttgcagcgcgaggcaaggaggtccaatgtccagaatgtcaatttgagctgaatagggacctgcattgtgtctatgcatgctgaactgcaacattggtgagagaaatgaagatgaaccaaggtaggtgctgcatttttggcacagtggagattttcaaattacctggaagttcaatacatgcgcaaaattctcttaagattcaggaagcttgcctagcagcacaactcaagcgagctggatgagttttacgaaaagctaaaaaatctagataacaatgtcaattgcaaatggaagagtgaaatgccgttgcacaactcaatggattgcctggaatccgaattacaatttacaaaccatgtgggagcaggcactaacctggggccttctgcactggcaaatccaacgtcattgcccctccacaaccgctgaactcctagttgtgacctccgtgccgtcgttccatcgagcaagcattttatcgatcaccttcagtgcctgcataacgcggcggcgatgcggctggcggcggtggagcggccgatggtgtagctggatcgattttggcgcggtggagcggccggcgcgagctcgaaggttggcggcgcgcggaggacgacggtcggcagcggcggaggacgacggtcggagggcgatggtcgcaggcgggcgaggccggatgacggcggaggcgtgtggcggcgaaaaaatttggcggcctgacggcgccaaaatttctagggttcccgcctggacttagaaattttggcgccgtgggtgggcccttatatagggaaacgatcttcgcaggcgggcgatccgcctgcaaagatgatcttcgtaggcgggccgtccgcctgcgaagatcgtttttattatcttcgtaggcggacggtctgcctgcgaagattgttacagaggtgaatatatttatttcaaaatattttttaatttatttttgtaatttgaaaatgtctacagtagttgtaataaaaatgataattgtacatacaaatatacaaaccttaatattattacttttcaaatgtaaatcttacttaaatgtttgaaacattaatatgactactttaaattttttaaaaaattttcaaacaatggtaagtgcacataaaaaattgctactaaattttgaaacctcttttaaaaaaactattaaaatataaaaaactgtaaattttaccctacaaatggtaattgcacataaaaattagtacaaactaatatgcaaaatattgagtacaattgttcatcaatttgcaatatgagcacacatatccccttacatatcaccattacataactaataatttcgtagatgcttacatgccactcaacaatcattaccctttaacatttttgcccacactgtccgtgcgcatgtaaggcttcacggtcttctgagtagatgtctcgatatggagacaaaaacctcggccaatgatacatccattcccgactttccatatctctaaaaaaaatgaacataaaatatttgcactattaataccaaatttgcagggtttattgaaaaaaacatatcgctattcaaaactaactgaaggttaattgtaaattaataaaaaaagtttattttattttttttacacagacatgccaaattaatatattaggaaaagctaacaaaatcttatcatcgacatattacaaactaatataattattttttgattgcaccaaataaatagacattgaaaattttattctctctcatatatatatatatgacaagaagggctgggcattcggtttaaaccgaggattcggttcggttcggctcggttacatggagttcggttttcgaaagaacaagaaccaattggttttcgtaaatactggaaaccgctaaattcgggttcggtttttttggttcggttttcggtttttaccaacaaaaccgatctctacacagctcagtaaaaaacacatccagaagaccagaacaatattttaccatagtacatagaaacaaacaaagtaaaaacatagtacatactacatagtcctgatgctgcaatttaccatacaaacgaacattcaccacacatccatagccataaacattcacaaaaatggtgccggctgcatgctgcttagggctccttgcttcacccaatagtgctggctgccatgccatgtgtgctgcttgctttgctgctgcctggagtggagaagaagaaatactcagctgctagtatatatactcaatcatttggttaggaggagaattatatataccttgcatactgctgcttctttcaactaagaaataaactaacaattttaggccttggtagcattagtgtcctctgtaatgtcttggccaacaagttctatgcataagaagaaacacagttaatataaataataaactaacataagaagtaaactaattgcatcttaaaatgtttcaccttcttcaagcttggacaaatctttggcattttcttcaacactaatagagttgcaaccacgaagccagtcatttgcacaaattaggcgctcaaccattgttggtgttagtgagctcctaaagtcatctagtgttcttccacctgcactaaaggctgactcagaagcgacggatgagatggggattgctaggagatcacgggccatacgagatagcaatggaagcctagttgagttgtccttccaatacttaaggatgtcaaatccttttgtatcctcctcattgtcttctgaaaagtacttgtctagttcagatttggcaatgctccttgaagctccattgttgctcatttgttgtgcaactatagacctcatgagcctcttgcttgttgatagtgatccctgaatatcattaggtgctgctaccggctcattaggagtatatatttctttgtattcatgaaatagggaatgaaaggaattgaccactgttgtccacaattgctctcctatttcatcaccaaacatgaccatagttgccatcttaatgtaactattaagtttataccttggatccaatgctacacagaagaaaacaattaaattcagattttgaacccccggccctatctctccccaatatttttggtacttcagtagcattctcttacccatctctgcacacaacaaatcctcactgttgcaccactgtctcagcaaaacaactacaccagcaatttcatggaagaatgtgtgagatgttggacgacttgttgctgaaacacgaagagtcagttcatagaaatgttcaagaaattcagccatcttcctagctttatcccaatctgatttttcaggaactcctggcccatcatgaccttctaaatctagcttgtaatatgggtcttcatcactgtacctttcaaatgccttctcatattgctgggcaatattaagcatatggtaggttgagttccacatagtgcaaacatctagtgtcaaaaatgctttggtttgtacttttgccaactcagcacatttcttaaattttgccaacctagctggtccggccttgacaaacttaatagcagcacgaacacggcaaatggatttattgatttcttttaaaccatcagccactatcaagttgataatatgtgcaacacatctcatatgaaggaactccccttcagcaatgcatccttttgattcattcaataccctcttcatgtatttaattgcattattgttagcactagcattgtcaaccgttattgacaaaactatatcaattctccactcagataagcaattgtctaaagatttcccaatatcctcccctctatgcccctttactaggaagaagcctatgatttttttatggagcttccaatcattgtcaataaaatgtgcagtgacacacatgtagttttggttggtgttagcagtccatgtgtctgttgtgaggctaaccctctcacaattttccttcaaaaatttcttaagcttcaatctttgcacatcatacactttgacacatgctctagtggtagttcttctagatggcaaagtaaaccgtggacatgctttagccaaaaacttcctaagacctggacgttcacttaagacaaaaggttgttcatcttcaattatcatttcagcaaaactattcctcaagtcttcaatatcaaatttccatgtggaacaagtaccaacactactaccaccacttccaggagtaatttgcaaagtgcgttggttatcaattactggcttgttaggattctttttgcagattttcaagtgatttttcaaagatgatgtaccatttgtcctagggtcacaacgaaacaacttttgacagtatttacacttagctctctcctctccattggaaatttttaccttgctgaagctgccccatacatcagatcttggaacaatagcctttcttttcttttcctcttcctccgtggctgcatgttcattctccgtggctgcttgctcctgctcctcttcatccttgtgctcctctaaccatgcagcaacttccctctccactatctcttcagtgtcctccatctaaaaaaaatatttacaaattacaatccaaaattgagccagcagcaggcaacagcagaggcagcttacattggaggactcctcggttgttgctgccgtcgtataggcaacaccagaggcagcgcataggatgggggacagagggaggacgacgcggcgagccggcgaggatgggggacagagggaggacggcgcagtgaggatagggggggtgtcggcggcgtcgcgcgagatggcggggtgtcggcggcgacggcatgggatgcgtgagactgtgagagagagggcggcgaggggagagggcgcggcggcggcgaggggatgcgtgagagagggcggcgaggggagagggcgcggcggcggcgtgggatgcgtgagagagggcggcgatgccggcgaggggagagggcggaggggatgcgtgagagagagggcggcacggcggcgtgggatgcgtgagagagagagggcggcgacgccggcgaggggagaggacggagccgcggaggggatgcgtgagagagagggcggcggcggcggcgtgggatgcttcacagcttcaggggagattgggagaaggcagcggtaggttagggttagggttagagagaggcaaggcccatgggccggctgggcggctggcggtagggttgtggcgcccggttcggtttttttgggcgaacggttttcatacaactaaaaccgaagccgatccgaattatgcggtttatgctaatctttgaaccgaaaccgaaccgaattaccgaaaaaccgaaaaattcagttcggttcaatgcggttcggatcggtttttggttttcggtgtttttttgcccagccctagacaagatctagatctatatctagaactaggaggtggatgtgatagcaaaataaaaaaaatgagaatttatgttaccacattaaaccactacaacaagagacatcaagtattacacatacatctaacatcaacatatcaaaagaaagtaaattaaaaaacatggaccttttccttcacaattttgcatgcataaatccatcacaaattgaggtctaaaagttcaaaacctcccccccatatttaagtcactttaggagagagaaactttggggagaatgaacagggctcctcgaggaggaagaagactatataggggcatctttgcaagcgggccatataagcggcggctgcgaaaatcgatcttcgcaggcgcacgtcgcctgccgcctgcgaagatagatcttcgcaagcgtcgcttatatggtccgcctgcaaagattgatcttcgcaggcggaccgccccctccaccctgggtatcgtcttcgccggtgggattttggcttcgaagaccatacccgctgtaacaccctgaaaattcgaccaacgaaatcaaaactctaaaaatgcggactttcaaaaactttttaaaccaattgcatcatgccgactttattcgcctgtttcattggattttgatgtcggagtctattaatcgcgaataatgaataactagctaggaacaaaccataaaataaatctagttgactaaataaataattaaaatataaattaaaataaaggttaggtgggtttggaaataaatatcgcaaccatattagcaataattaaattttagtacgatggaataaccctaattaaaataaattatataaacagaatatgagtgatattaaattaaggaggattttagttaggataacacaaatgtgggatgtacttcatttatacaagatttagaaattatgaaatcaaatttattttgaaaataacctaaaatcgggaatattaggaaagtgcactattgattgcccgcaaggtgttcgatgtggtccctagcattttccccttctctcctacctctcccctagcccagccccctcctctgccccgcgcgccgcgcgcccggccgccccgagccccgtgccgtcgcaccgccgtcaccatcgccgctgccgcgccgcaccgacgtcgcgtcgcctcgcgcctcgcgcccgcgcgccgctcgcccgttctatcgccgcgacgcgagcctgccgcctcgcgccccgcgccgctgctgtgagccgtcgccgcgcgcgtcccatcgccgcctcgcgccgcgcaccactgccgcgcccgcacccgcacctcgcgccgcgcgccgccgctgcccgcccgtcgcgtcgccgctgtcgcgcagtcaccgtcgccgctcgcccgctcgtcgccacccgtcgcgtcgccacccgtcgcgtcccgcccgagcccgtaccaccgctgctaccgcgc

SEQ ID NO: 9068 - DNA, 33504 bp, Oryza sativa
ggcatatatctgaccgggaccaacgtgccatctccaggaggtaacacgccggctccggctagggacgagtgcttggaggctctcatcctgacgggatggggcgaggcgtgcgtcagaccgcctgtcgccacctaacccacgatctgatcggtctgtgaccagtcacagaccggataaacgagcacgctgcactgcgttacatgcggcgtgacgcgctcgtccaaaccgcaataaatgcggttaggtgagccccgctgcgctcacctaacccatacacgcggcgcaaaatccacaaggggtcggggcgcctcagtcgtcggggccgaaacgggagcggtccgacccctcggggagacaaagagggaggcggccacatcaccctcgggcccgacccccccccccccccccccgagggggtcaggcctcgtaggtgattgctcctgcccaagcctctagtcatgatactcccggtcccatgtcaccgacatatatatatatatatatatatacagtctttcgtttcagagttatgcaagaattcggttcctgccactataaaaatatcatatagtactataatttggtaattgtagaaaaaaacctgtgttaattaatatactccctccgtcccaaattataagacctatatattttttacacagtcttcaataacatactttaactagtattttattctattttatgatctcgataaatatgaaattagcattatatgaaagtattttaaaatataaatctagtgatataatatgtaatacttagtatagatatagttagtatggttattactcaaaaggtaccgagtttaatttttcttaaaaagaggcaccttataatttgggacggaaggagtagttaattcgagctcaaattactacaaaattcttctcaaatactataattaatgtgtgacgcatatcgggctggctgggcggccagtcacgaaggtttcaaatcatcgtgattcagtttccaaaaaggaaaatcgtttgacatgtttgcgccggggtgtttacatttacaggtgtaaagttttggcttgtcacatcgtgtataccaccacacatttgaagtattaaacgtagactaataaaaaaataaattacagattccgcatgtaaactgtgagacaaatttattaagtataattaatctattattagcaaatgtttactgtagcacaatattgccaaatcatggactaattaggcttaaaaattcatctcgcaatttacacgcaatctgtgtaattagttttttctatatttaatagtcatgcatgtgtcaaacattccatgtgagatggtataaagtttggtgtgggaactaaatacccccttatggtgggggtagcaatgcatggctggccattgcgagatgattataaaatataaaaaacacaggaataattaaatatttgatttgatcgtaagaaaaaacataacgatttaagggaagataaagattcaaaggaaacttttcattaatttctatctcatacttcctcagtttcatattataagactttctagcattgcccacattcatatatttgttaatgaatataaatacatatatatgtctagattcattaacatttatattaatgtgagcaatgctagaaagtcttataacctgaaatgaagtgagtattacatttcctccggaaactagtatagaatgagatatctcatgaacgcaatgcaatgcgacaaacactcaggttacgactaaaggcaactgctagtgagccggtgttggtggtagggcaaagcaaggcgaatgagctctaagccgaacctatttagaaataagttcatcttagatcccttaacttatagcgagtttgattttcgtcattgaaccacaataccagaaacaacagatttctcaaatattaaaaccggtgcagataaggtcgctcgacggtttggatggcggttttggcttatgtagcacttacgtggttggtttgatttgtcctcgtcctacgtgacagtgatgtggcactggaagtaaaatatgaaattaaaaattaaaacaaaaaatatggagcccacatgttagtaagacaaaagattaaaaaaagtgggatattactgccatgggacctcctttgaatggtttgagtaagtttaggggtagatatttttggttttgtggttaaggtaccaaaaaaatctcgctcttaagttaagggacctgcagtgaacttagtccttaaataaaattttatttcggcccacacttccgtcaccggcctataaaattggcccggtttccccccttccgcttcaacctccgttcccccttccccttcaacctccgccactatacctggccaaatgggccgtgccaagctgggccggcccgagcacggcagtactgtagccggcccaggcccggcacggcacgccagcctgtgggccgtgccagcacggcccgttatcccgtgccgtgtttgggccgacgcctcagcccgtgggccggcacggcacggcacgtttactgtagcgtgccggcacggcacggcccaggcatggcacggcccaccggcccatttatttttcctacgattttctaatttttcccatatatttctcatattttttagttttttccacattttatcctatttgtaccatatattttatgatatatttcctaaattttcctcacatttatcatatatttataatgttttcctttatattatattttttctgccttttttcttttttttcccctcaaatttcaatttttatgggccacatgtactagtgggccggctaccagcccacggtccactacagtagccgtgccggcccggcacggcccagcacctccttgggccgtgcttgggccgaggccttggcacgtgggccggcacggcacggcccgctacaggagtcgtgcctaacgggccgtgccctagtgggccgtgccgtcagtgtgccgtgccgtgctgggccgggccgcccgtttggcctgctatatccgccacactccggagtacgagctgacgaaaatggctgtcgccgacgccgatgacgaggagaaggggcgagcgggagtcgccaatggcgtcctcctcgcgttcctcgcaccagaggaagcgctcgcgctcgggggcgaccacaatgaagcgctccacggcgagctgcgcgtgcgccagggacacgaggtcgacgcgggcggggacgacgatgacgaagcgtggcgcggcgaggtgcgcgctccccagggccgcgcgtacgacgacgacgcggccgaggacgaggaggggctgcgcttcctccccggccgcgcgcgctacggcgtggagacgcgcggcttccgcgcggaggacgtcggcgacgaggggtgccgcggccagggacacgaggtcgacgcggccggggacgccgacgacgaagcgcggcgcggcgaggtgcgcgctccccagggccgcgcgtacgacgacgacgcggccgaggacgaggaggggctgcgcttcctccccggccgcgcgctcggcgaggaggtgcggggcgtgctcccgctccgcgaccgcgcactgcgcctccgccgcgaccgcatgggctacgatgacgagggggatgtccttcgcctccaggcccgcggtgacgcggaggacgacgaggggctgctccgccgccgcgcgcacggcgaggggctcccccttcccgcattcggtgtcagcggcgagaggcgcccgctcggcggccgcgcgcgcctctactacgacgccaacgacgactaccaggggctccgcggccgcgcgcgctacggcgtggagacgcgcggcttctgcgcggaggacgtcggcgacgaggggcgccgcggccgcgctcacgacgacgggcacgagcgacaccgaggacgcgggcgcgtgggcggcgagaggcagagcagctgcgcgaacgacgacgaccaaggcctccgcggcggcgcgcacgacgatcctgacgagccgcgccgtggccgcgtgcttctcacgctccgtgcccgcctcaaggacgacgacgacgaggaattgatgcgtgaccaggagggcgccctcggggacgaggtccaccggggcgcgaacggctaccgcgagggccatcgctccgcgcacgacgacggcgagggacccccgttcgccgcgctcgacgacggcgaggagcgcccgctcggcggccttgtcgaggagctgttcgtttgccgcctcggggacgacgacgaggtccgcgtcggtgcgaaccacaacggcgaggggcgccgactccgcggcccccgtcccgatggcgaggaggcgcgcgtgcgctgcggccgcgcgtaccagctcgcgccccgcgcccacgcgcaggaggagccgcgcgtacgccgcgaccgcgcgcaggaggacgaagaggagccgcccgttcgccgcggccgcgcccgttcgccccttcgcctccaggcccgcggtgacgcggaggatggcgaggggctcccgttccgcctccgcgcgcacggcgaggggctcccgctgcccggactcggtgtcggtggtcgcgcgcgcctctacggcgaggggctcggtcgggaggacgacgccgagcggctcgaggtcgcggtggacgacgccgagggtggcgtggaccttggcgccctcgagctccaggatgaagagcctgccggcggcaagaaggtcgccgtcagcgccgccgttgcggctgcgcgcgccgttaagaatgccgccggaaagaaagccgtaagttcctgtgcttatgaattcaacatttggattttgggcgataattcttttttctaacgattgtcatgcaggctaaggaagctatggtccggtggggacagagaaaccccaacaagaacacccccaagaaaggatcaggtactgccaattgctcgatctataaagaaccagttgaagttggagctttccagtccaatcagaagatttatgagccagacaagagatttatgacgggaaatgaagtcactgacagcgaatacattgagctagtcgggctttacaataaaatgaacaatctccaattagagaccaaggacatgatcaaggggaatgctatgaggagtgacatcttggacaactgcttactgatgaggaacttagttcggaagatgcgatcacttcgtgcgatgatcaaaagaaaagtcgaaggtgaacctcctataatacctcccaatctattagaaattccagatatctcttagtggtgcttggtggtactgcatttgcattcttctgagcctagaagtgcttcttttagtggtacagcatttgccgccttctgtctagagagcctagaggtgcttctgttagtgctacagcatttgcgttcttctgtccgaaagtgggcagtaaatttgtactccttgcagattgactctcatagtattgattgattggctgtagtactgtagctttgaacaacagaagttatttttttctgtgccattgctgccatgttctgctagagcggtgcaggggtggtggtgttatgtcatttttttttcccaggcaaatgattcacatgaattctttttgaggcatgccaacttagaattctgggtgcaaatgattcacatatggtggctggggcaatgtcctaatagggactttgggtgtgtttagttcacgccaaaattgaaagtttggttgaaattggaacgatgtgatagaaaagttgaaagtttatgtgtgtagaaaaattttgatgtgatggaaaagttagaaatttgaagaaaaagtttgattggttcagttgtttgatggaaatggacttgcaccagggaatacaatgcagaaatccgtgtatttcgaacttgaaatgaacttgaaatggctaataggtcgcaggttgcaactaaggagaaattcgctaagaaggcggccaaacttcccattgcaccagaaaaacagagggatgaactggtttcttcagatctagactggtgctagtcacatactccctcgtttcaaaatgttcgacaccgttgactttttaagtacatgtttgaccattcgtcttattcaaaaaatttgagtaattatttattcttttcatattatttgattcattgttaaatatactttcatgtacacatatagttttacatatttcacaattttttttaataagacgaccggttaaacatgtgctaaaaagtcaatggtgtattttgaaacggagggagtattagagagaaggaaggagttcattcactccgattccaatgaccctaacagcatttcgtggataccttcatatagtgcaatcaacaaaacctcacccacagcatttcgtcgaagcattgtgcagcggtagagttctccggagcagctgccggtcagctctgcttctcaatccgcacgtcagggaaagaaactaagagccaaccttgcaaagcttcctactcgaccagcgctatgtcaaaaaatcatgctgacgggaaaatccttcccatcgggcccccgcgcctcccacgcctcgcgtgccacccccaccacgtgtactgttgcaacaaatcacccgcatattacggaaacgttctattaggaggatccatttcattattttgttccaccaacaatatctcagctagtgtactcgtgatgtttcactgtgtatgtaccaaatgtcgtaggggattttttatattgttttaataattttatcttgaaggacacgtggtttgtttatgtatacaaggtttaagtgttgtaatggtttaaaatagtttgttgcatatgttgaaccaaattgtttcatttagtgactgaccgtgtttcactttttttaagaactgtaacattctttcgctatttactgaatattgttttaagagaaaatttgattcatggaacaaaaaaaaaattggtaccaaataatagcacaaaatttttccccaataaactagaagcacatgcctctgttttttcttcgatttgtagcactcccgtcacatttgccattcatttgggtggaaaaagactaatttgcccttcttctattccatatttcccttctcttcctcccgtcgatctcgccagcacatcggtgggtggctatggtgcaacacggctaagcgcctccgacggtgatggcgactgcgcgtggcgagttcacgggcatggcgactgtgcgtggtaagttcgtgggcatggttgttcggcggtggaactcaaacttatgggtgacggtgcacgggagcgaaacacgagatagggggcgactgtgctggcaactggatgcgaacccagggcgacgggggcgttagcggaacacaagctcgggcatggcggttcagcggcagaacacgatgacggcgacgatgggacacgagcatgcaaggagtcggcgccaaacgagctcaggtggggatggtggcagcggagcttggggatggtagtgcgacggcggtgaatgagcttggggatggggactgtggcggcgggatgtgagggccatcgctgtcagccaccccaacaccgccgccacaacctgcgcctcctccggccacctcacccacccatacttttcttagaataaagggtaatttcgtcttttgatgctcctaatcatggctaaccaatggacttggacggaaaatgtgacggaagtgctacaaatcgaagaaaaattagtgacgtgtgtttctggttgaaagaggaaattttttgtgcttttttttaccgttttttttccctgtgctattgatcgaattttctcttgtttttatatagggtgaaacaacgcccgatttttgtggaaaccgttgtttgataagttgttgcaaaatgtttcatgagatagtttggttgtcttctagttttttaaaagaatgaaatattttcgatttacttggtgaaacagcgtccgatttttaaaaatcggcgcccgatttgtatgctcctcaatgctgatgctgttatgtactactgatactggccgattttgtggatataaacaaacagaatttgtgcccagttcatttgtgtcaagaattagactttctgttagatgaacatatttaatattcacgacttgggagaccaacagcatcattcatcgtgaccacaaaacgtcatcgcaagtttgcagcgacaaatgtcaaagtaccataaattaggaaagattgctcatgtagtcaagaatcacataattaagacttagactgatcgtgaatcatgaataatgtattctcccctcaaaaaaataatcgtgaatcattattcccttacatgttttttttttcataatttctcgtatccatattacttcagagatcaccatctgactctgattcctgatcatgtggttcatcttcctcttcatcttcgtgttggtgttcgtcatcagaaacagcttcatcatcgcggtccccaaactccccgtctttgttctcccggagcatctgagcgaactctctcccgcaattctcccagacgagagctcggttctcctcctgccgatcgaagtagccgtcgtccacctcgacgaacccgttggcctcgaactcggcgcgcacccgcgccgccatctcgcagaacctggcccagctcgccttcctcctctcgacgaacccccgctgcagcgccagcaggtcgtcgaaccacccgctccgcaccagctcgtggtcgtcggtgtagagctccctgcgcgccgcggccttgtcggcctcgtcgaacgacggctccctccggtgaaggatccagctgatgtgctcctgcggcatccggagctgcttcgacctcgccgccgccgctgccatggtttcgaattcgattcaccaagttgggagaagcgtcggcgatttatagcgggccgtgtatgtgtcctagtaagagtaggaatcggagaggcagaaattggctccaaattcgttcacggtttggccgaattccagcaccggattcggaatctgtggtggaaaaacacgagcaaaggcacatttctcaaacacatacgtaccaaccaacaacaaaagcggcggcgctggggggtcgcgccggcgagctccgccgacgggaaggcaggggaaagaggggcgaaacggagagagcggcacggggaacccatttcctccactcgatttgggagatgtgcaatggcgccgacggatttcgcgattttgaaacgcgcggggggacgaaaccctagaaatttgataggtgttcaccgagggacgcgaccgtctactcgatcggtgagtaataacacccttttccacctttgcattgctgaattcttaactggtgatgacgtttactgggatgtaaagaaacacagtgcttaataaaatgttgagatagccatttctcattatttaatcttgcaattaatgcaactaaatgtattgacaacagcctaatagcatcgggcattcaacgtcaaaattatacacaattacatccagacagacattagtgatgtgatattggcatgactccacccataactataagagttcaaatcctgatgcccagaaatattacccatatacatatatgctttcaatagaattttaataagaccatggatacatcgtttgtttccgtttattaaagtgtgtgcgagtgtagtgttaagtgtatagtagtgtatgcgcgtgtctacggtgaatctcacactacatgggggaatgaagagcatgcagttcaataaaaaaaaagacggggggggggggggtttcaagggttcgattcctggcctcctaccatcaaataattgcttttatggtgttcctctcccttagcctttgcttacgtttcttttaaaattttaaatataagaacataaattattcaatattaatcttgaaagccttttggcttagtaactataaatttcacatatgttcacttttattccttccaagttcaaaaatgtaaattataattattgagctaagtatttttgctaagactaataacattataatttaagttcgtaaatttgtccatttcaaattaatgtacatcaaataaatttacaaacaaaatatgtggtcgttttggaaaaaaaatatagcaaagcattcacggcgaatatgtaagaaaaaagctgaaaaaaagatgcactgatgggttcaaaaccagaaattaacctgcaactaaaaaaaaaagcctaaccactgggctagatttccttacagtagctcggcgtgattttagattgtacataaggtcaacgcgagctccttcgatgaatttgtgccacgtcgaacaagatctcagcaccaacgttatagcacgccaaggtcatgcttcatcattctttacaacaaacccttctttaaattagttttcgttcaattaagttttctagaaggtccgtttgtcaaaatttcggatgttttcttatccagtgacccccgtgtgcggagccgtacgatcggcagaagacagttgagatgcgaacgtgccgccatctgccgtgacacgggcaggggcggcagtgattactccggttcggtttcggcaatactaaaacggaaacggaccggcccgtttttttttttttacataagccactgaagtactgaactgagagtttgttcagaaatttatcgccgcggggaaatcatggcggcgaggaggaggacggcgacgatgcggctgtcgcaagacaacatcgagtggatcctcgcccgaacggagctctgcaccgacgacgccccggacatcgagaggtacatccccttcgtccccgacgccgacgtcgacgaggaccacctcccggagatctactacgacgagccggaggcgctgctggtgcacatcaacggcatcctgaaggccacctgggccaagttcagggacttccagagctgggtccgcgtcgagtacggcagcaatggcttcgtcgaggtggagtacgacgtcgacgagttcgaggaggcgcagcggctgcaggaggagcggaggctgtggcgtgcgcatgtctgggagaaaatcttcgccgatgatccgccggtggaaggcgagttcaccgagtatgtcagcgtatatgatcaagagacgagggcattcgtgatgagaccgaaggaattggaggtaggtacaagaacgattgctgttttcgacaaggtcaagatgaagcttgtgttgaagaaactagatcagtgatctagtattataaaaacttttgtcaaatagtcgtatatggtgggaaactattctgatccctcgaggggacgtcccctcattggttatgaaaaaaagtggagaatatgtattaacatgtgatatacttcgtatcactccataaatatgcaagttcaaattcaacttctacatctcgcaactagatagttaaggtatattcacagtcaaatttgtttttttcgttgtgagatgtataagttgaatttaaactcgcatgtttgtggagtgatatatcatgttaatacatattcttagattttttttcaaattttttcatacctatttcagtaacatgcaaacaacgaggaggcatctccttaagggatcaaaatccactcccgtgtatgatttatcttcagttagcgcaacgcgttgacgatgcatgtggtgttcatttgttatcatcgggattcaaccatgcatgtcaatggtctgatgctcatgcatagagttgatttgcgatgtttcaatcttgctttgatatttattgaaatttttaatcctttttacttatgtcatgtactataatgtttgtttatggcatttatgctggtctcttgtataagctttgtaacctactggcaatatatatcataattattttgtttcagcatgcccctaaatataccccctttgttttatattataaaatgttttgcgaatcctaaaaaacttctctctcgcgtcgccctcccctgggcggcatgagaggcgacgcctcaccgccaccttcctccccccgcttcctcctcctcttccctcgttgttgcctgagcgggcgccggcaaagccacgcagacgcaaggatggcggcagtggggcctcgtctcgcccaccccgcgctcggcggccgggggaggctatccagggtggcggtagcagtggtggccagattcgggccgagtctggcatgatctggccggtgggtggctggcggcgggggctgacggtggcggcggcgacacctggtagcgaagatggcggcgacggtggcggagccccatccagatccacgccaccctgatcgaatctggtcgggtggcagctagcgacgtgtaagatctcatttttgctcccgtttaaaatcttattttaaatacaaaattattttcaaaaatttggttcttatttgaattctgggttgtgccattaacgatctcaaaatccaatcatctgaagtcctatctaccaacaaattcctaaacctattattagagtccacagtccctttacaatctttgaacacaaatttcactctaattccacgtacaaagtccccacaaaattatagtcccaatgtccatttacagttccatcaaatactctccaaaagtccatctctgaaattccctagaaaaattaagaaagatccctattcctttggaccacctttcctttcccgtagtccaactccctcggaataagatcactttaggtccctctatttgtcgcccagtccgactttcgtccctgaaccccaaaaccgggtacgacccgtcccccaacttatgaaaaccgggcacataagctcctaaggcggtttggatagcggttttggttgacatggcgcctacgtggctggtttgactaggtctccgttccacgtggtattgacgtggtgcttacgtggcaattatatctcgaaaaaataataaaaatcatgggcccacatgtcagctaaaaaaaattcaaaacgatggggcccacatgtcagccacacaacaaaataaatatggtggggcccacgtgggccccacatgtcattcctctcctctctctcggctctctctcctcttccccacatgccatccttactcctctttcttctctctatcccctctccctctctctctctctcgccctgcagtttccacggagaaggccggagcggtggccagcggcggcacgcgaagccggtggggtgatggcggccggtgcggcggcacgatggcagccggagcagcggcggagagcccgcgggagtcgacgggagacaggagaggagggagcggcggccagagctacacgacctcagccccgccgccgctgactcctcctgctacgccgccacatcgatttgcgccgccaactcccccttcgcatgtcgccgtctccgcctccgcctccctctccgccggcttcgcgcgccgtcaccgccgcactcacacgacgcgcatgggagctccccccgccgccgcctccatccctctccctcgcgttgccgcgtggcggtcggtgaggaggaaggggaggtggaggcggtggcgaggcgggtagagaagaagcctccgcggccccgacgccacactcaacctcccctcccgcctctgcgtcgctcccgtcccgcctccgccgccgccgtcgattgaggagaagaagccgctgctgttcacgccgccgctgcctccgaggaagaaggcgttgctgtttccgccaccactgcctgccgctgaagaagaaaccgctaccaccacctctgccgccgctgccggagaaggagaacacctcgttcccgccgctgcttctacctgcaaagaagaagccgatttcgccgccgtcactgacggcggcagcaaagagtccatcgagctctaggcggcagcgccgccgcctttcgtgccccagccggtatggcccctgctggccgacggtgggaagcgcaaaaagctgtcggaccgtggtggccgcatccccgccctggcgccctcaatacgttgacaccgccgtcgaactccgtctccgtctcgagcgcggcggcgatggaggacgacggcttcttggcgcgtactgtgggcctgtggcgacgatggggaagagaaaaggagagagagctgagaggggatagggaatgacatgtggggcccatgtgggccccaccatatttattttgttgtgtagctgacatgtgggcccatggttttcattatttttctgagttataattgtcacgtaagcgccacgtcaatgccacctgggacggagacctagtcaaacccgccacgtaggcaccacgttagccaaaaccactatccaaaccgccataagaccttatgtgtccggttcttgtaagttgagggacggctcatacccggttttggggttcagggacgaaagtcggactaggtgacaaatagagggacctaaagtgaacttattccaactccctctcctctgtcttttcctccttgggccagcccgccctttccctcacccaggccggcccactccctctcccccttgaagtcagccggccggccgcacgtgcccgccacctgctcgacgaaatgtcgagccgggcgagcagcatgccgagacgcccccacaccctccgcacagtcccgtgtgccgccccgagccgtgccgcactgctccgctccacaccacgatgaaatccggtcgcgttccctcctccttgccctagaagcttccgcccacagtggcaaaacgtcgtcgacaccgtccttcacacgccgtggcaacgccgctgctcccagtccacaccgtcgcctcctcgcgctcgagctcccgcagccgtgcgtccacgccaaaagcatgcgccgggctcatgctcctccacgacgccgccgccctgtgcctggctgctccgagttcaccgccttcgcgtgctcgcgctccgtcgcccacagccgcgcgtccacaccgaacgtgtgcgccgcgttcacgccgttcggcgccgcccagaccaccgccccctcgctcctcttcctctgtttctctcaccatggccgccgccagtgcacccagtccactgagccaatcgacgcgccacgagagcccgtgtctgtcgtccacaccgaaagcaaacaccgagctcacgccgccacaccaattccgccaccgaaaccaccgtcgccgccgtcttcatctctctcccggccgatgtcacgccgcgtcgagcacgcctcgcgcactcgggccagcgcgtcgctcggtcgaacgccgccgccgccgtcgcgccatcctccctcccggttcctgctctccaccagcgcctccaccccacgtcgccgcctctgccttcgcccggccgaaccgccgccgcggtcgccgcctcgccgagccgagcgtggctcgcgtggccgccgctgccgcgccgggattcgtcaggcccgcggcgccctcttccatctcgccgccttcccccaccgccgcggcagccgcggtcgctgtcgccgcgccggccgcgcctcgctttctcctgctcgggcgcgcgcgcgtgggaaagagaaggggaatcggagagaacgaggaagaaatcgagagaaacagaagaaaagaagagagacactgtcaggtgggacctacgtctacgtttgtttaccatgtacgcaggctctgttggttctcaaggtttgtttaaaaatatcatattgatcctttatttaaaaaaaattagctaatacttaattaatcacgtgctaatggtctgttccgtttttcctattgaagggttgtgttcccaaccatgaggaaagaacacagcaattagcttgcacatcaatatttcagatggactgaaggattctcagtagcaaaaggaagggctcgccctgccaacaagacgatgattgtcaacatgacaacggataagatcaggtgtagacctttcagaggtataaaatattactccctccgtttttaaatatttgacaccattaactttttaatatatatttgaccgtttgtcttattcaaaaacttttgtgaaatatgtaaaattatatgtatacttataagtatatttaataatgaatcaaacgatacgaaaagaattaataattacttaaatttttttgaataagatgaacggtccaacatactttaaaaagtcaacggcgtcaaatatgcaatttgtggctcaaataggaattggtaggtttgagttatgtagtgggaatgggcatggggatgtgaatgaatgtgcgaaccctttatttggcccgtgctatttaaaattaccaaattcattctctacaagataaacacaggtggagcttcgatgcacaactgcatgtgcacatttctgcaatcttgcttatataattccaatgtttgttaatggggggctattgaatcacatctgcttcaatactagatagaaagatacggatgatttaatggtgtaagataactaagtttgctttgagaacctccaaattttctaaaacagaagcacgtactaaacaaaatcctgagatataattatgcggggtattcatttatctggcctattcattctatattctttctgcaaaaatctagatgcactgctgtacagagcatacatgtttttttccggctctttgctgcttttataaaatcatattgtgtagtataaccacatgattttcatgagcgcatggaaatcatacttgttggttgcacatacctatttcaatatttgcttgtcattactaatgactgtctgggaaaatacttctgcaatatttcatataaagctcccatttcccagtccacatatatacggacataccacagctgcatacctgatgccagtgtacttatctcttctgctgtatgtgatgcagcacatctcataattccagtgctattgtcctcgcattgctttgcatgcaggacattaaattgttgttgcattcattccttaatgccactccaagatgctccttgcatcacattcatttctacaatcttggagattctatccctagcttaattatcttcagaaggagtactccgatgcgataagagtgcattttgtgatgatgagattgcgagaaatctaatcagcaaaattaaccacattttacaaaatcactcaattcattggcgcaaagaaactagacttcacaaggctgtcacaccagggattgaagaactcgcgcgccctgatactgcctgcgtataaacatcaacgtggaatacagcttttcatgcttccatacacggaaaacggagcggtccattaacacataattaattaggtattagctaattttttttaaaaatggatcaatatgattttttaaataacttttgtatataattttttttaaaaaaaacacaccgtttagcaatttaaaaagtgtgtacgcagaaaacgagaggggagtgttgggaacttacctcttgcaaacatgtacaccagtatcttcatctctctcacagtgccatccaccccattgtttccatgcataccctttttgtgaatggatgcaaaatgatgaaggtggtagagagttacgcttcaaacatcactacctttgagttcgacaaaaaaatacatcactacacacttgacttctcgtgtcatacagtaggaatgttgggtttactgcaacatccataaaaggttggatttaccgcaacatcccaaatgttgaaaaacatggaataccatcatagaaactctgaagcattacataattatagagtaccccctccgtttcataatgtaagtcattctagcattgcccacattcatatagatgtcaatgctagaatgacttacattataaaacagaggaagtagcaatgtacataaaacagtacacatcccataaaaatacgttgaaaatatcttaaaatcttcttcaaaattgagtttgaaaaatcaaatttcggttttggatttggttttggcttattagtgtactacaatgaggttgtatctcttaataggtcctcaaactttgattatctttctcttgtttcttttcttgatgcctcttgttcactctattaaaatgtaatttttgtgacacaaatggtgtattggtaaagcaactcattcttttgatcttgcgttatcttacctgttgttctttgtatccagtactttatatatgtatgtacagtgcactgagttggaattgtcttgggtttgggataatctatgtattaaatatgttccccctggattcacatcctcattataggcacttacttgtagggtagtaggagggtagaactcacataccagtgattacaataatgacattatggtagaggatgtgacttagtaacattatgcctaccctcgtcaccgtcgtcacggcctcctcgtcttcctccccatctccttcctcctgagccaccgtatctctacttcccctgccttttcctatccccaattcacctatggatggttaggggtggaatatgttggaaatttggtcataattcggcatattttaatccaaaataacaagataataaacatgatatttacaataggatttgatccagtgatagtggtgaatgtaatcaacatgagcatgcttaacgttgaataagcatcaacaatcacataatgacacaatgttgacattgcgatgaacatttacagtaaaacttctaattgaaataatgtaataaggttataccccaagaatggtcctccgctggagtttgaggcagtattgcctccgttggtgttgacaggagtctccttctccttgtctccagtgttcgacacgttggtgaagatgaagtagatgttgacgaacagtgagtagtcgcgccttgcgctccccaaaaacctgatcgcccgcccgtctgtgcaaacgtcgcagcaacgcgtggtttcggaggcctactctcccaacgcgtgtgcacacactcgtcgggatgggattaccgtagcagcaacagcttttgaaaatggatgaaagtgtgtcttcttcttctcgcgggagatcaaatccattctcattttataagaggaatggaagatgaagagtaagagtcatggaataggaagaggaatggagcaactaattgtcatcaactagccatgaaccatcctccactacacaaccatcaatcaacaatcaattaagagtaattgatgtaagttaccaatggaataggaagaggaatagagcaactaattgtcatcaactagccatgaaccatcctccactacacaaccatcaaccatccatcaattaggactaattgatataagttaccaattccttaatcaaatggattaattctcaaaactcttcatcccattgatatcccatagaagaatgaattcacatgaattcctagcataatgagccttgaaatttatttgatttaattgatttaaatagattaattacccaattaaatctaacagaatacacgccatccttcctgcgcacctccccaacatcatcctcgtcggcgtcatttgaggtctgggaggactaaatctggtaattgcagcatttgaaccgacggccacggcaacgacgacgtgcactcctattgctcctctccataaccagctagcggatgctaatttctctcacgttttcaggtcatgtgcgattattcagcatgagaactctacagtttgattcaaaggtaaattgtcaaaactgacacaaaaatctatttaaatggggatattatactgcatatgttctgatgattggtcttaacattttgcagttaatcaaaaatgttgctccattagatggattttacatagaaatttttacaatgctgatgaagataaaatgatgagcagttactgtaagctactacataatttgccaagtaaattaatgaaattggtaccggatgcctaaaattactgattaataagaaacatgatgtcaaaatagttgtcattgagtaaaaatcagatcgacacatgacgtatatgtacctattttgatatactcaatacattcctaggcatttgatgtgttcaacaaaagttcagatggcaaatatcacagcaagcataataaattgtcttatattaacgttgtatcatatcatatcatggtagaactgtcttatattattatacaaaaagggtagaactgtttgatagatatattaggcagcgttaatattgccaagttcacagacatacaggttgactaatattaacgctgaccatgatacgatttttttttttggataataacaacgcttttcagataatgaccagtatatttgtaatcaccttagcttactatgtacaatgagtcatcagattgcctcattagcccaaggaaactaagagcatgtatcaagtacaatctaccaaggaatttgaaattgataatttttttccaacggtgaggcagttgccgaagttttatataaagaagaagatgtctcattttaaacagaaaacaagatcaaaccttacaatttgaaactgatatcaggaatgtactgcaggtgatagctacagtagagacccaaggattactgcttctcacagaaatattttatggctacccaagacaagccccggcccccacctcttccatgaactgtgaagctggtggcagtgctcctgcaatgctacatgactgccgcgaatagcatgcagtaccgtaaggtgatcaaatccttctaataaacatttttactgtatgttgctattaccactcgctatgaccaaatttaggtaacgaagaatgcaagattggttcacaatttcctcaaatctatggtcgcactgccctgtttctgaatttgatattttgattaaaatgacctgccgttagcccattaacctcaagaatttatgagcgtgaaaagacaccacctcttctaattagttggaatgtgcatatttaaatgtttctttcacaaccatggattttaatacgagaatgatagctaccgggcgaccggcgcgggggagccggatcggacgctccccctcctgatgcgcattgtctccctcctggccccaccatgtatctccaccatatactccattgcaacaaatcacacacatattttggaaaccctctattaagggaatttggtttattttttgttccacaaaaaatgtttcatctagtgcactcacaatgtttcactatgtatagatctaatgttgcagtgaactgaaatactccattgcaacaaatcacccacatattttggaaaccctctattaagcgaatttggtttattttttgttccacaaaaaatgtttcatctagtgcactcacaatgtttcactatgtatagatctaatgttgcagtgaactgaaatactccattgcaacaaatcacccacatattttggaaaccatctattaagggaattcattttatttttttccaccaaaaatgtttcacctagtgtacttataatgtttcactatgtatagatttaatattgcagtgaactgcaacattttttcgcctatttgctgaaacattgtttttatataaggtgaaacaacacccgatttaaatgagtgaaacattttcgatctacttagtgaaacaattccgatatatctggtggaacatcgtgcaacatttaaaaataattcaatagtaggctaatttttttttcgtcggaatatatccatgtgtagtcttgttttgaagatttaattgcaacaaatttagtggtgcaatcgaatcatgatttggataagtaatttaagagaaaaatcagtttaaaatagttttgcacgcatgcgtggcgctgacgtcatgctggcatcaacgcccgattttaaccccctctcgtcagacgcccgagccggagtcgcttccattttaataactgagactggtattggaaaatatatacatggaatggtcattgaagagtgaatcatggaaagtcttaatagccattacgtatgattcatctgagattgtatatgatgtactggtgtttttaagctgaactgcgtacatctttatcttagattaatcaagatcttcagacagcatcagcggcatgcatgaactgcatcatcctcagattaatcaagatattcagacagcatcagtggcatgctgaactgcttgctgcaagcgtcacattgccacatatatatttgttgttccatgtgaatggagaaatggaatatatgatagttgaaactttggatgcctgatgaacagaagtacaaggtgcaatataatcctttctcatttccctgtttgatatgactcttaacttggaggactgattaatattctactagcataacagaatttgggtaagagaactctttgacgcttgaatacaagcagaaaagatcagcataacaaacagcctgtgacaccgtggactctaggtttacttattctagcctcttagtagtcaatttaatttgcttggtatttaaagagcagaaccagtgtttggaaaataccattgaaattgccctgttttgaggatggcttttaaacttcagttttaatgtattatgtaagttgaaatatacaggatgaaatgtacctatatgcacgagctataaagcagatgcaccaatgaaaactaaggggagaacaagggggtcatgtaacatcggaagaggtgaaaacgcggcgactggtgcagcggtgaagacaatgaataataataataataataataataataataataataataataataataataataataattattattattattattattattattattattattattatgtaaacttagtttatcacgtggatgtaaattttgcaataaattgtggtgaattaatgattttttatcatatatttaaaaaagtaaatcaagctaaataatataaatataaatgacagttgtggttgcgcaaatgtgtgactataatgaaaacaaattcttcttcatctaatatcgttaatatattttcatataaataatgtatagtaggatggttacagacttacagtcataccaatgcacaacttcatatgcaatttttttgaacggggaaaggcgtatgacaaggttattgcagtttgtgctgatgatcacgagtacaagcattacaatattgaaatcaaggtgatcccacctcatcgcttcaactggatcaggcgcttcactagattacgtaatactccctcgttacctaaatgtttgacaccgttgacttttttaaacatgtttgactgttcgtcttatttaaaaaattttgtgaaatgtgtaaaactatatgtatacatacaagtatatttaacaataaatcaaatgatagaaaaaaattaataattacttaaattttttttaataaaacgaactgtcaaacatttttaagaaaagtcaatgacgtcagatattttaggatggagggagtatctagttatgcattctaaatgaattctacgaagtatgcaataacttatgccctgaccttaagcccgcaaagtactattagaaaatgtatttgatttgactcattgcagattccctaactcattaattaacataggacgctaccaatatcttgttcccgtacatgcattttctgaactcatgtgtcaactagggtcatgcaaatttgaaaaaacaacttgcctcttagattgaatggtttctttaaccgagacattattcagacaagaagaatgagagaacaaggaggttgctgtcaacgacttgcgtcttaattaagaggcaagcagcactccatgtgagtaattaactcttctaactccggaacgtacaacacggaaggcttgaggaggtgtacgtgtgccacttcctggatagaccgagaggatgttgacgaaaactttggagatactatcatcttatatgaactgctgtggtaatatccggtattaatgacatttaaagtactaacagcacaagtaggaacaacaaagagccattaaatattccatttatagccctcacctcagtgccactatgatacattggcgatacctcgaagtgtattctattgatttttttttttgttatctgtagttctgtagtactactaattatttgccaatgattgaccgagcacaaagacctgggtcgtttatctgtgaaatgaaaagcctcctcggttgcccatattccctaataagtcaaaacggcttattagggaataaaaattaatttatatttaaaacttatatatatttgttcgtagcgacttaaaaagccaacgctaaaaaaattacgttgaaaatatcttaagattaactccaaaatcaagtttgaaattttaaattttggttttttctttgacttattaagctaaccgatgaggctcaaagaaagaaacgccagagccaaggcacaaaatgtacatgaaacagtataatttcaatagaactagtgggattttcgcccatgtcaacataggacataaagaactttcttaacacaggaaccaattttaaattccagtatctgcattgttgggagcatctgtacattcaatctgtatgtgttctaagaaaaggcatttgtatgtgcattcgttctccaaaacttagtgtttatcagactaagagagctaaaaccatgcattaaccaaagtggcatagtaagaattatccaagtatgcagaaatcgagtaacaaagaactcaacatctgcaccagttgatagtcatgcacagaaatcataggcaacattttttttttatcaagggctgcatggccccatttccattactacaaatgtatcatagagtttttacatgaaaggagtaaaagagtgcagcaaaagagagagaatcatagagggtctgggacagaactactggagcagaccaccctctgctagccttggtaaaaaaacccagccaaaaaaactaccaggaatcataggcaacactttgagtcagtaactaaacaaattcattcatgtacagaaatcaggacacaacagaaatcacgacagagagccgaaacctcttcacgaagaatgtttactctaagacatctctgaatagaaactctggtggggtatttggggctttgccacccatcactcttatagtctgacggacctttcttatctcgtgaatagttgatttcatttcacgttcgaggtccttagaatcttcaagtgacagaccatgttcaacggcttccatcagagagatcatttggttgaataaatcaaccaaacgtctgtacttgctatcactgtcttcattcccagtaaggtaggaggcctctacatcaaatttctgaaaaatctgaaaaggaaaaacaaagagtcacatatgactcaaaacaatggggaaggaaatatgtctcattttatccaacgcaataatttgtaagccagcaatactttttattatacttttaccttttctttagggtcagcaaaccttcttttctcagaaggcgagggtgaattggaattgcaaccattgttgctaccatttaagttcccgcgctcccaaagttttcttgcttctttagcctgcagcagaaaatatcagctatgccaaaacaaaagcgctcgaatacataactaaacaaagtgcagtgtaaagaacaatccaatttatccaatgcacggcacaaatttatccgtgctcgcattttttcaagaaactgaaacagcaaaaatgttgctcacatcttaagagtacattaacagagagaagctaccaatgaaagagaacctacaaaccaagccatcaatccaaagggtgtagccagaaatagatgacgcctagggcatttcttacaaactttctacagtaatgagatcttaacagaaaacaaaagggacaaaatattctacacagtacagaaaaataccaaatacacatttcagacatcacatggtgtcaagttaacaaaattaagtagtcactgtaaacaaacaatgatcaagattccatgcaaacaggaaactacagatgtggtacatgcatagataatatgttataagaaagagcgaggaagaataactcttctgttcttagtcatgaactgcagtttaaatcatcagtatagaaagtcaaaacataacaatataacaacatttacaactaaaacaccaactaatttctaagagcattaacacaacccaaattaatatatcaaatgctataatggtcagaaaggatgaaggtttacatgagcaacgttcacgaacatttcatttcaagtttacaagaaaaatttttgactgactgcccaaattacataacaatatgagcagagaatcagtaattaagaagagcataaacaagctaaaacagagcacaaacattagacactaaactaatttacagataactgcacccttccatgagtccatcaagtctttaatagacaaaagattgtagcaaatacaaatttaccaataagtacacattaattcccctcatgtaaacacttcagtttcacaataaaaataagaatacacgtgagtaaacagtatgacgagattattcttaaatagagcaggcaagagatacaaattagtgaaattaccaacaaaaggagcagaagggtgctatgaaaaattaagagtccacaggtagtagaagaaaccggtggactatcaacaaaacaaaaggacagggcaaccatttttgggccgaaattttgttctaaaactgatctgacgctaccaaacagatacagaaacagattgaatagaaatgcaatcccataagccatcaaaacaaaaggaatcacaaaaatcctaatgcgcacaggccgctccccaacacagcaaatttactagaaaaaaaaaatcaccatcggagccaacgaggatgcgcatcctacagcaattcatccaaatccatgttcatctagatgattcgaaacgaacgaagcaaaagaacgcaagatactgaccgctttggcaccctccatgttcttgagagcgcgagcctctaacacggccgcgcgtacagccgccggaacgggagcaccgagaaccaagcccgcagtagcctccaccggctcgtggtccagtacaacgacgtgctcgacgtggacctcctcgccgtgctcgcggcggacctccccgcccggcgcgggctcgacgtggacctcctcgccgtgctcgcggcggacctccccgcccagcgcgggctcgacgtaggcctcctcgccgcggaacaccgcggtgagcgcgcagtcgttttggccatcgagctcctcgacgaggacctcgtcgggtaactcggcggcgcgcttgaccttgacgtgggcgccgcagagaacatcgacggtgatctcgcggccgacgtagtcctcatcgccgcggaggtagttcacggcatctccgaggtcctgctcgacgtcggcctcgccgaagacctcctcgctgggcacgcgctcgacgtgggtctcctcgccgcggaacaccgcggagagcgcgcgctcgacgtggggctcgccgcggacacgcttggacttggaggggtcgttgtagtcgccgccgctgccgtgcagctcctcgcggacgggctcgtcgtcccggcgcccgccgccgtcggggtaacccacggtcccggaagcccccgccgcgcggcggacatccgcggtggcgctccgcttggcctccacgctggctatccccgccgcgcggcggacgaccgcggcgtgcttgtccactgcaccggaacccaccgcctctccattgctccccttgccggcgccgccgctctccggcaccgccatgacgcccgcaatccagacgagaagggggattagtcgaaggcgagaaggggagggaacgagccgtggacgggggtggtgggtcagggtggcgccttggcggtggcctttatatcctactagtaacgaactggagaaccctgcctgaagcggctcttttcaccaacttttgtcaatttttgggcaaatattgagaaaacagatatttgaatataaacgttccaaaatttcatgacaaaaacgaatttagactaaaaggccattcgacagactgacaaaattgatcaaaactcagtcggtctgattgaaaattgaacggtctactcaagattctttcatttctgcacaaaagtgttaaaaaattgacaagattcgtggagaagtgagatatttcatggggaaatgcatggttggaaaaaaaatgtgatgaggaaagtttgggagtaaaatgtgataaatttggtagtagtggctaccctacctgtcacacaggtaaagactaatagtgctaacaaggcttatgaaatggtggtgtactaaggtactactccgtacttgggagtctaggacaggtttttgtcatgtggtgatttgttacgtcatgtggtgatttgttatgtactactacctcccaatttttttaagggttaattcgatccatgcaaatacaaattttctatttgtttaattattcgtagccttgctactgaaattttacaaaattataaccgtatcactctcgttacattttccatccatctcctcctttgcacgtgggacccacctatcagatttatcttcttccttttaccctcccttatcttcttccttccccatcttagtgtcacagtgaggagcgaggagcatagggagaacacctcgatggcacgggcgacgaagcttttgttctagtggaggtcgcaagaggtggtggcggcggcgaaaagggaaggagaagggatagcagggaacccgacccaccggtgcaagcctattagtcgtcgtctcccttgaggaagttgaatggcggaaatggtagaggaagctgacgaggccgagcggctgtgagggagagctctcccaagtctccatcaagccctcaccttcatcttccccctccctactttgctcctcttcatgtcgctgtcgcttgaagctaacagtcatctctcacaccaaatctagacaaagcttaggcaaggcggcactaccggcgatggagcttcggcgggttccacggcagggaaactcctccgtcaccgccttcctcaccttgtccggccgcctgccccacttcctctacacccctcatctccgtatcgcccttccccgtcgtctgaacagtgaacgcacaagcaccaaaaatctttgatgttctaatatggaaactcttaccagaatcagttatgaacttatcatcagatcaggacgagatctttttaatgttctaatatgcattctgacttgcgatcatagttattagaactggactggaccagcggtccgaccagaaaaaactagaaccagggcgccggccggtccggtccagctaaaagatcggtctgcaatcaaaccggcgagaaaccggttgaaccgggcggtttactgcagaaccggacaaaaaccggtgtggttcgaccgctggaacgcgtcgcatcacgtgaagttggagagaaatacggaaaaagctgcagaacttgtgattcgaacccaaaacctccatgcttccatggagagcctccaccactagtctatgcggcttgttgtgaaaccaatataacaaacatctatttgaacccgtttaaaccggcggtttgaccggtccgagcaataaaccaatgacccgagtgccttaccggtttgatcaccggtccggtctaataactatgcctgcgatctgtccctttccagggtttttggaacggatataggagtaatcagttcatggttatgtgggagatgccgcgtgatcatgcatcgtgcatgcgtgcacgtgccagtgtgctttcttcctgtataccggtgttaccgtgaccgtgacgcggaccttgtttgtgatggcgcccggcatagcttctccgtccgttgcgttagctttcttctgttcgatcgtctccaagtgctagcttctgctgctcctgctgatatgtgatgcttcttgtgctggcttgggtttgattggaaacgtggcaatccaaccaattcttaacagatgcgacggcagcactcgggtgcaccggcgtggcacggtcagaggccggtggtggcgttcttgcctagtaaaaaaggaaaacatggggttcggcgttttaaactagctacgaaccccccttggggctcgatcaggcttttgtgcgcagctgatcaagcggcggtcattgacggcatcagattaagctcgttgtctctggtgttcaagaagcagttagccgcaattcttgattggttgctagtactaatagttcattgttgcattcgtccgtcgtcgcagcgtgcgttcctcgtctggccgtctggtctatttgtgcggttgaaccggctgtcgactgtcgtacgccatgctagtgtgctttcttcctgtacgccggtgtggccgtggctgcgtgggcgtgggtgctcctcgtgtgcatgtgtacgcccgtctgcgggagacgagggtttctgaaccaggagacgcacgacgcggaggtgctccggcgaggccttgatgaggcggtgaaaggggttcggcgaataaaactcctaacgcccttggatctacgcgaccagtgatgagctgagcacaaaatgcgaggggaaaccggctcatgttgaaccgtcgcagggcgaggccacgatggagacggtggcacgggcagaggcatggctgtggtgttcttactgagtaaaacgtacgggcagaggcattgacgccatcgttctcgtttgtgtgggtcgagaagagcgttgttctggacgccagtaccgcggcgtgcgtcgtcgtcgtcggcgcgtggcggttcgtcgtagcgttccttgtcagggtgtgcgatcttgcacgttgcgcggctgcgtgctcatgggatcatggcgcgagcctgcctgagcatggtcgcgaatccggctgtcatgggcgtgcgcggcttgacgtggcgtggcgagaatcaggttcacatcactcgctgacaggatcaccatgacggcagcagccagcagggttggtgcttcttcctgtatgccggcgcgtgtcggtggccgcgcgcgtgggtggctcctcgcgtaccagcgcccgccggagatgagggttccgatcgaagcagggaacgcacgatgcgtctctcggaacccactgcgtccattgatctgccacggcccagatgagcacagtgtgcgattgcagaaaccggctcatacttatattgtatgagtgctatcaatttttttttagaatttttcatagtaattgtttggatggctttaaacaaacgagcgacattctctcgagggatcaaaattgtttcctccatttgcagcttcttcttttaatcatgtatattccctaaatagaggaacggccaatatactaatcggcagtgagaaggatgaaatgagcagaggcaaatcttgggtcgcatatagtcatccatgtgaatgttgttactaccagttagctgcaattcttgattggttgctactatgcttactgtggcgttcgtccgtcgtcgcggcgtgcgttcctcgtcgatctggccgtctggtttatttgggcggttgggctgtgccacggcgagctgcaccacggcgatcatgccgctgcgacgtactgcgtgcgcgctcagggcgcgaaccgggctgtcgcgcgcgcgcgcgcgtggcgccgcggcgtgtatcgctcgctgacgggattgccatgctagagtgcctctttcggtacgccggcttgggtttcctgctcgatcctcgtgttaaatcattgtcataattaatatttatgatgaacaattggctgtgcaaatgattttatcaaagaattggtttgagagatgtgtggatgttggtgtgagtgcgtgtgactaatgtgggtcaggttgtgatatctgtgcccagaaacggttgttttgtctgattgtgtgcaggtgacttgaggtcagccttggtcaatggtgaggaccgggactatgctcagggaggagcagaggtctagtgcggtcgggataccatgtgagaaggtgactagagtctggattcttggaggtcaacttcggtcaacggtggggatcggaactaaactcagggaggagttgaggtccagacggtcaagaataccgggtgacgaagttggatatgagatggcacacggtggatggacaccatgtgggagagatctttacaacgggcttcacgaggtgtgcgtgcaagtgccggtgttcgcgaaggagattggagtgagaaatcgagaaaagggtatatggtgctacagtacacgtggtactgtagcatgcatatggatggtatcgatgcatgtatgttgatcatgcatgtgtggctgtgtgctgtacacgtgtgtttagtacatgcatgtgtggctgtgtgctgagattggatggaaggctatgcacgtcagcacgtgggcttgcatgtccgattggcagttggcctgggaggcacaacacagagaccgagtccggctcggttggcggctggagtttcgctgcgacggcaggaggagtccgacttcggtgcggcgcggctgtagttttcgagaaaaaggaaattgagttattgagttctattgtgaataggagttctacacctactttgagtaggaggttttttatgtataaatagagggggagcgtgaggcttcccggtatcgcttttgagagcaattgagttgctagtttagttagggtttcgagtttagtcgagatttttgtaaggagtgctgttcgtgcactttgtaaatacagagaagtaataaagttgtcatctactttaagagttctttgatttgtgtttcatcgggttcggcggttcgaccggcggcgtgcaagcggttcgaccggcggcgtgcaagcggttcaacccgcggcggcgacaggactacgtcgagatttccatcgatttgagggtaacttttatttccgctaaaagtttttaggtatttggttttccctaccattcacccccccttaataggcttggttacttgtgtccgatcctacacctcgtgtgcgtacgcgtccgccagagacgagggttccgaaccaagagatgcacgatgcagcggcggcgctcggacgaggccttgatgaggcggttgaaggtgggttcgtagaaaaaacaaaaaactccgaacacctttggatccacgcgacggaagcccggctcatgctgatcatcgatcattccgtggcacaagtttccgacgtgaccacgatgggacggcagcacaggcggcccagatcaagcagcgagcaagcattgacgccatcatgctcgtcatcgctggtgtttaggccggaagaccttcgatcgcttcgcttgcactgacgcccggcatagcatagatccctcgcccgcgagcggcgcggcgtgcgtcgtggcgtggatcgcagcgcacgttccccgtcgcatttggaccaacgaaggcggccactacgcgatggagatcactcgcgccgcggctgcctgcctgctcatgccggtggtacgtagtgcgtgcgcgcccagggcgaggtgtgcatgaggcgggggggagacggggctcggagaacaaaactccgaacccatttgatttgagatgtctcgcggccgttagatccgtcctgtgcggcttagatgcagccgaaaaaccgcaccaacacaaggccacggggctgaaatacacgagcacccaaaaaaaaatgatg

SEQ ID NO: 9069 - DNA, 5000 bp, Oryza sativa
gtgcatcgcatccatgggcagaccgaatagactggcacctaaatacatctgttcgcaactgagcatgcaagctccaacctgtttggttctataatgactataagtggtactttcagattcagcatatgcagagacttataacagcaggctagtatcggtctgaaattcatttcctattgatccccaacgagcagaaaagagcaggctggtactttcagattcagcatatgcagagacttaaacgctacgacggtggctgcgagcggagaagggtagtcggcgatgaggggctcgaccccgtcgcaactcctcccgagcggcacgaagggcggagacggagcagcggcggcaggcgtagttcatatatgatatggctcagcgaggattaaaacctaagtgatttccctgaacatcacaactgtaacgtctaagcaagcattttgtcgaacaccttttgggcatggggagcattagcgtattacctgcagcttgcatttatttgcatttatgtagttgcatcgggctagcgagggagctccagtggaagagggcgggatcggcgacgaggtggagtcccgagctgtgccaacgagcacggcggcctcaatcccgagcaccgcggagtagcgcagcgtggcgatgggggcgccggcggtggaggcgtggcggggcgcggcgaagaggtgggaggagtggcgtcggcggttggatagcgagcgcgagcgatgcgggggaggaaagcggagggagcgaccgagggagggggctgcggcgacgtggatcgaggggttgaggaggggagatgcggagggagcgaccgagagagggggaagacgcgtgcgctgatgcggcggcgtgtggagggcgcgacgagtggtggaggcgcgatggcacggcgtaggggtacggaggcggaggcggcggcggggtgggggtgtgcgagagagagagagagagaggaggggcacaacgacggggcgattggggggcgccatttttctcgtctactgcggatccggagaagcgtccgatctctgatcccacggttgataggtcacacgtctacgttggcttcaccatcaccactacggattattttttaagtagtagagattagcttcaagatacatttgtggcgtgtctaaggtctaaagttgcggctgttaagtgttaatccccccaacaagcagcataatttaacccaacctgaagcctttatacctggcaaaacactaaacaaacctacccttctaatttcacactgttaattaggctagttttggctaattaattagcttaaaagctagctaacattgctatcttcagctttcaatgcaagccctgcagtgtagtaagtagctcacacgaattttcagagcgtgttgtcttaactggttttcttgtattgacagggttgatatacatgagattgggtgcttttgtgaggtatgttctgcctagagtttctattgtttatgtcctgcctaaattaattgttcttgagtttcgataatgttctgttaaacagtgctcagatttatatagtactacctctgtcccaaaatacttgtcgctttgagtttttgtttgtaacttttgatcattcgtcttattcaaaaaattatagaattattatttattttgtttgtaacttgctttattatcaaaaatactttacgtatgacttatccgtttttatatttgcactaatttttcaaataagacaaatggtcaaacattgcaagaaaagagccaaaatgaccactaatttgggacagaggtagtactaagttttaagttttactactgtccctgggtgctcagatttgctctgcattagttctagagaatggcatatatgcatttgtaatagagaatgacatgtgtttgttcagagtcattagctgaaataggacagcaagtatattctagtcagttagcatagaatctggtattgttctgattttgtttctgttttgtttttttccctttaattctggtagtttgagtgtctatcaactgctttggccattggatttgttaatacaacacgtgttccacgaaagatgaagatgattattgattcccatgaccctgtaattctgtaaaggatgccatcatttttaggaatttaggatgccccttgtgaaatgcgtccttcactgtggaaatggatcaaaggaatatcacatctccctcttaacagcttcccaggaatatgcaattcttttggttttaaaaacaaacaagagtaggaacatcaattccatctatacactctgaatgtgcttgtgtttcttacccactgactgcattagtgcagtgtatatgttggggacctgctgaaattgagctcaattctgaattctaaaattctgaaattatggttcaggttgctgaaatttagctagaaaattcagtctcagatcatgtgcaggtttgggagtttcagttctctgaaactgattttttttactttgatgaagagtacaactgtagattgtgccatttttcctttcaatgtgctttttttgattaattcatagaccaacaccagatctttagaagtgtataaatagagaaatcatgcagttgatgttattcccgtaattagacactttttaggtgcctgtcatgcagttgatgttttcgatatatgaattgtctattggacgtagtttttattaacctgtagcttctgttgactgctgctagttaagctatttcaatggggcttaaacatgtggtttagcaactattggttataggagtagctattatatgttgttgttgtgacacaatattcttcttttttgtacataatacatcaacatgtgtataccatagactgatctgtatagtgaggatgatgtattctttcccttttgcaggtaattggaaatgttcacagtgaaacctgaattattcatggaacttattgaacctctggaactaaataacctaaaactttctcgttattggaaatatgtggctgttgaccatataggggcatattgatcagctatttttcggcctttgaattgtgcagttttctttcaagtgataatccgtctcatatgttttttcagggacttctgtttgctgcaccaagaatgttattgtgatgtacctgagaaatatgctgttctgttaattgaggaactttacaagtagatattaatgatttagcttcaatttatgtaatttaatccctgctacttattactgtaatagagatctacatgtgtgaatctataatcttagtgtgcactaatattctaatatgaattgacatttttttctagactttgtaataatcacgacataaattgtacagccagtcttcgttattttcccttttttgtttttttttctcattttttctcatttttagatttttttgggtggtgttttgaattttctgcaattttgttggtgacaatttaaaatttatgtaatgaaatctttaaaccttagtccaaataaatcaatcccaccaatcccttacctgtccaaacaaaccaaatgataatcccgtggtgaaagggattgggtgggggattgggtggtgggaggggatgaacccaatcccctccggtgaccgttttacctgggtataattatcccttggtgccgaacgaggcctgagtttaaatgctgattgtgcttctccgatcgatgctcacccgttgatatagagatggcgcgagggctggacaccgggcagggcgaggcggctgtcgtggcggcggtggagggcagcggcttcgggcaccgcgctctgcacatggcggcctctggagggagcgtggacgtcctcaggtacctcgtggaggacctctgcctcggcgtcaaccagttcaatggcaaaggtcttgcgctctttgccttgcctctcttccgttctatttttcagctcgctcttatacgaatcaagatgcattgagtattctttttctcaagaatgatacaataattcatgctttgaatagtcctcgtgcaagcattgaacatcccctcttttgtgtacattgaaaaaccacaatttagattgatatcaaactccaaattcggtggcttcaatttattattaagaaagattatttaataggacagtccctactgaactatctcgtggaaaaaacttgtcatagcaattaacaaattaaccaaaaatgaaacaaattgctcaacccctcaccccattcaaccacacaatcatcacacagaacgagaacccaaaacatatcacgtaattaagcaacgcggagagtcttgtcaatgtgggtgctggaggtcaccactttgtggaccagaagctggcatggaggagcaatggtaggagaagagctgtaatgtgtttgagaagtagggtgactggggaggccatgtcttgcacagacagcagttgcagaagtggtggtaccgtggtggagatgcgtgacagcgtgagaggctagagagttgacatgggttgggtttgactgtgtgagggtgttcgtgattgtgtaacaccgcagataactggtttcctgtttatatataccttctctgagatttggacttgaattgtcaattccaatccctgatggcagacaacaaccttgtcaatggaattggaatgtgttccttggacttggaagtattctgagcagtaattgtgcattctaatttcctattttccttgcttcccatacttttcacggtaatcatttatcacaaggagtcactggtactacattagcactagccagtccagttgcacattttatctttttaacaaggagtctacttaaccccctgaagaaaaaaaaggtacatatcatgtgccctgaagtatttaaaaatgtacaaataacaccctgaggtggtttcgccatggtaaacaatatgactagtgggtagtgatgtgatgatgacttagcagatgaatataaatctgtagtaaatgccccacttcttgaaacaatgtttcattcagtacttaaattgaactttga

SEQ ID NO: 9070 - DNA, 8894 bp, Oryza sativa
acaagtccacaaaaaaataatgatcgttccattcagatatgattattcccgttatgactatatttacccccattaatgatcgttctgaatctcttgagaaatttaagatatttaggactaaacaagaagatcaacataatgccaaaattaaagttgtgagatcagatcgtggtggtgaatactatgggaaacatgctccatttggtcaaatcttggtccgtttgccttatatctctagcaacatggaatagttgcccaatatttatgcccgaagaacctcagcagaatggagtagcaggatgacacaaccgcacactcatggatatggtgcgcagtatgctaaatcattctactccgtcaagtaaattgtggattgaaggcttaaagacaactacccacattataaatagaattccaagtaagtcagtacctaagatctcttatgaattatggattggaaggaaaccgacattaaattatttacgcgtgtgggattgtcgtgcaaaagtcagaatatttaatccacaactaaagaaattagacccataagactatgagccatcatttcatcggatatccagaaatatctaagggataccaattttattgtctagaccatatcgctaagtttgtggagactagacacgttgtcttcttagaaaataatgaagtggagagctcacaacataaggagattaatcttgaggaaattaaaactaatgttccaattatgaaaatccaagagaataatattccatttatcaaacttgtgccatagaatgtagtgcgccaacaacgagtaattctggaccctctggccctacaactgatgttgaagaaagtgttgatgaaaataatgatgaaagtaatgagcatcaatagaattatgcgacatagaatgaagaagaaatatccaaaagaagatgctcaacgacatgtgaacaacgatgaaaatcagcaattaagaagatcacaacaggtaaggaaatttgccattcccgattatcatgaagtttatatgagtgaagatatagggaaggtagatggccctacctcatttaaagaagccataagcagtaaaaactcatccaagtggtttgaagaaatggaagatgaattaaagtgtgggatcagtagaagttcctaaggaggcaaaacaataggctgcaaatgggcctacaaaactaagctggactctaaagggaacatcgaacgattcaaagcaaggcttgttgataaatgtttttttttgcgtagataaggaattgattataatgatacattttctcctgtctctaagaaagactcatttagatatattttctcctatatctaagaaagactcatttataattgtcagggctttagtagctcaccataacttagaacttcatcagatggatgcatagactgcatttctaaatggtgatttaaatgagaatgtctacatggcaaaaccagaaggttttgttgtggaaggaaagaccatttagcatgcaaattaaataaatccatttatggacttaaggaggcatccagacaatggtaccttaaattcgatgaagtaattaaaaatttttggattaaaggaaaatgtgatggacaactacatttatatgaagaataaaagtggaaaattcatcatactagtactctatgttgatgacattttgttagcaagcagcgataagaatttgctgcgagaaagtaaagaaaatctgtcatctaaatttgatatgaaatatcttggttaagcatcttatgttttgggcatggaaattcaaatagataggtccaaaggattgctaggattatctcaagaatcatatatttccagagtgttggaaagatataatatgagcaaatgctctacgacacctgccccaataataaaaggtgataaatttggttaattctaaagcccaacaaatgacttagaaactaaagaaatgaagacgaaaccgcatgctttgactgtcgaaatcagatttggcgttcgttactaggatgcttggtagatttttatctaatcttggattggaccactggaaaggagttaagaaggtcctccattatttgtaaggaactaagcattatatgctcacatataagaggtctgataagcttgtgatattagactattcagatattgactttgtagggtgcttaggtactaagaaatccacttcaggttatattttcactcttgtgggagagctatttcatggaaaagctccatgtagacgattattgtatcatctacaatgtaggcagaatctgtggcatgatatcatgtaacggggcatgcagtatggtttaagaatttcatcccaaaattaagagtggtcgacagtatagccaaaccactggcaattacttcagaagcaaaataaactacagcttactagaccgaggttgcatcatttttccccaataagcatcaatgatcttctgtgataaaaatagaaaaacaaaagagcaattgtagcgataaaggctatgtttcctcatgatgatggtaactcatgctcacggcaccagaacatgaagttaacgactcaacagtgattacagagaagtctgtcatcaggtgatggcaatgaaactaaaatcgattgtttctgtttagggtgtgtttaatcagttcacgccaaaattgtaagtttgattgaaattggagcgatgtgatagaaaagttagaagtttgtgtgtaggaaagttttgatttgatggaaaagttggaagtttgaagaaaaagttgggaactaaaccaggccttaattctttgctgaagttcagctttagtttagggtcatgcatggcactaaacattagtcatcatcaaatatattcccatcgcagcgactttatatttaaattttgtcctaaaatattagggttaatttgatctatgccactgcaaatttgtctattaagaaaaatgccattacaattcgtctattcgtaaccgtgccactagaattttacaaaattagaaccgtgccactgccgtcacgttttccatccatcccctgccttttccgtcttcttccttctttctcccatttcttcccggttctttctcctatttcttctcggagtcatgccggcgagctcggaggagagggagcttgccagcgacccaaccatggcaggcggcagcggctccttctttctcccatttcttcccggagccaagtgggcgagatctcgtgcgggagcagcggcggcgatgccaacggcggtcgtccatccatccatggccgcagcgagcttcgacggtgtcggcggtggagccaacgtcgatggaaacaacggtagatctggcgctgcatggcgcgagcagacccaacagaggcgatgaagactcgaagacggcggcgaggtgctccagctacttgcggagctcatggcgggcgacgaggaggcggttggagtctcggagaggtccaaggatgagtagtgcggggagagcactgccgcgagggagagcggccggcatgaggtgctcaccgacccggaggccagagcgggagccgaggttgagcagcaacgcggaagaagagagtcaccgtcgtcgatcacgctcgacacccagcctaggcctcagctggttccgcccgagtcccgatgccaccattgtccgacgccgccaccgccggattcgccgaccacgccaaccgcactcgaggttgggttcgttcaccttgccggcgagctccctctccggcttgactccgggaagaagatgggagaaggaaggaagaagacggaaaaggaagagaatggatggaaaatgtgacgtcaatggcacggttttagttttacaaaatttcagtggcacggttaagaatagatgaattgcaatgtcatttttctgaatagctaaatttgcagtggcatggatcaaattaacccaaaatataattgcctatagaataccaagggatgtttatagtcattaaatattcaaagataccacttatctgacaactctcatccacctcccaccaccaactagtgtaattattgaatagtagtatagattttttacttctcttcttaggctgagttcggaaccctcactcccaacaagcaaaacagagagcggttagtgcatgatttattaagcattagctaaaataaacttgaaaatggattaatatgaattttttaaaaaactttcctatagaattattttttgcaaaatacgtaccgtatagtagtttgggaaacgtgtgcgtggaaaatgagagaggtgagttagtttttgatagctatattttggggtggagtagtagataaagaggttttgatttttttttcggtgactgccattttcggtctggagttagcctgggccgagttcgctgtgacaaaagtggactccaatccccaatgttgcatgaatgtgcatagaaagcaagcacgcgctcgagacgtactactggactatgatgcactggatcgaggacaagcatcgccaatgccggccagtgactcctctgtcatggactattgtagatggaagtatggaaccataatatataatcttagctagagcgatgatgctttagacacccgattggacttactagataatttggaaatgcaaatgaatgactatacccgaagaccaaggggaagtgaagtcattgcaattgtgggaaatcatcattcctctactggtgaaatggtcatcatggacatatttacaaaggttctccccaaaacattcgctaccacaatgcacaagcacaactgccccgcaatactcattatcactaaacacggtttttccgcaaggtcgcacaaaatggttgggaggaatccgtgtatttttcttttgttggcactttcttagctgaatgttaaacaacatcttaatacaaagacgtgcaaatcttttatgtacttcctaaaaagaatttcactacgaaaatgcgtgaacggattgttccagctgcatcccagatttggtgacagaacttctgtcgatgtatattgtaacttctcctaatcttaataaaatttggttggcattatttttgaccgacccagaaaaaaaatacttgtgaacttagtggtttctgtagcaatttgacaaaagaaaagcattatctcaatatcaaacactgaacattaataatatatttaattttgagattaccacacatcacacaagtcaagtacaacatattgcaaagctcacatgaccaaacaagtacacagtagaagatttagatttcaacaaatgaagccatcatttacttatccaagtatataattgacgacagattcttgttcgatgcatgatcggtcacaccaccatcttttatgcagccggtcctgaagcagaagggtccacatcattgtctctatgaaatttcatcacagcgcccaagattgggctcagcacagttctctttctcttcttcttctccttctgctgaatctgcaaaggtttacaaccagatatattctgatatacgccaaggaaccaggaatttagtacacataattttcataaaagccatccaaaccttgtttatcgcagctttcttctggctgttaaacatgtccttgttttgttctttgtactgcttcagctcttggctgtccatagcttccatcctgtccaactgaatcaagaacaattgattatatgatacaagtctacaaatgataagagtctagctagttaattgcatgctcatctgccagaaatttacagccactgtgtacagcctctagaaaaatgctaaatctattcctgcaaaagctaaaataaagcataaatataattattattaaaattgaagacaatatatatcacccattactatgattttatttacccaagagttaaattcatctgcttgtcttcttatgtcctgtgcatccttagcagcaatctctttgttttctgcctgtggcattgccttcttgccattgtctccttgggccattgaaatactggatgactgaattttagtactcagtactctgaagtgagacaacttgtagtttggcaaagaactcaaagggttatcaagcatatatataggcaagcttcaccactagatagtcacacgcaattttcaaataggtgtcaaataaacaagtcatggaacttgcttgacctttggcttgttgtaacgtgtgaatggttgccaccaagctgtttgcaaatgtaggcagaattacatgaggcgattcacaagtctctcctaatcaagaatcaaaagctaaaaacggttggtttataaaggcataatttatggaggttcacatctatcctttatatagaagtcttctagtagcagccttccaatgcagataaccttttgctgaatactataagaagaaacagtagttgattctttttctgccacattgcagtttctcttactggcagttacaatttattttcctcctattatatgcccatatttcctgctaaaacggctgacctgccttggaaatgctctggcatttcagttctttaccctgaaatgagcgttactgtttgtctccattttattgaggggaaaaactccaataattcaattttacaggtcttacattaaactgccatattattgaaaattgtacttttgataattgatttctttcaacaaagttattttccatgctgcatatataagtaatgttatataacaatgaaaccatctgtactacatgcatagaagactaggacgtgatcacaacatacacaagttgtagtttttcaaatatatgcatgctttataaatgtggaaggagacgcggcgaagaggaattcttcttgggattctgcttgggtagaagggcgtaggccaaaggacctcatgctgttggtctatgcaatatcaaaaaagaaagagaagtccttgcatcaggaaaaggaaaacgatgcttggattgatgacttagaccttgaagccaacccaccaattttagtggaacttattgttcagctagtcgccttatggaccgttgtgcgaaacatccatataaacgaggaggagcctgatcaaattgtttagaaattcacttccatatacttagcattgttggcttaccaggcatagtaccttggggtgccaaaaacggtcttcaattcgctcatctggagagtttgggcgccagagaaatgcaaatttcacgcatggctagtcatctaatatagggtctagacctctgaccgactggcaactagaggatggcaaaataatgggatatgccccctctgccgtagagaaggcaaaacggttctacatttcgttgtcagctacagatacatgaaaagaatttggagcctggtagatgcctgggtggcttaccaacagctagaccctaaacaatgggagacgacctagaccgtaaaagattggtgggaggctctagcaaatacgacaggagttcccaaaaaggggttgcacaccctcatcctcgtcatcctctgggagatctgaaggagaggaaccaacaaatcttctagcaaaacgaggccatgtcgtcattccttttcaccaaaaatcaaggatgagacacaagcttgggcgatggcaggagcaaagcgctcacatgactttttgccccactctgtatattgtatagagctttttccctttttcttacttcttggggttcttagggttgtatttttgtgccgctatatttaatgacaaggcacaatcatgtgctgtgagctgttttctttcaaacaaaaaatgtggaaggagggagcgtgagccttttttttttaatatgtccaaaaccttgctatccatatacaggaaatgaggagtatcagggtatcacctggatattctccacaagtagcacagcacacggacgcagccaaatggttctgtttccaagccccgacacccacccctgccaacggagaatgcgttccccgccgtcgacgctatcttccaccgatccaccgaccaacctctcctccccaacacttgaatccttctaggccaacccctccccacccgacgtgaccgcccctgagcgtgagcctttagtgcatcttagggctcaaggtaaggctatagaaggaagtgcaggccacgcaaattcgcagatcaggtttcaaccgggtgcaacttcaaattggtgctgctctcctccaccggcaataatggccccttcaatcctccaccagccaatgtcttttcaaactcaagtgcggtgaagactttcaaaccaaccgatggtacaggtgcaggaggcaaattgctagtccataaaagattgcttccagccgtaagcccgtaagtgatcttcctcttcccttgagcgccctagagtctctgcatctagtagagtactcacaagtggtgttacttccctctgagagatcaagtgaaacaactccttctggttcccaatggagacaagctgaaggcagcccatcccgatctcttcgccagttcttccgaatctcggggtcgagattccgtttaagggggtaggtttgtcacgtcccaaaacgaccctaaaatatatcctttaaattatgcctagaataattaaaatccgtgtgaaagcctccaaaaattaaaatgtgcaaagtaaaagtcaaataaggcttagaggatttttgtatatttcctaaaagcctaaaatgtgtaaataaattttagtggaattttcagagcacaaataataattattaagaaataaaccaagttaaaaaggttttataaaaagaaaaaaacctaaaaagtccccttccctctaatgggccggctcggcccatctccctccccctctcccttctctccccgcaccccactcggcctctccccgcgcgcgcgccgctgacgggcgggcccgtccgccaccctcgctgacgggtggggcccacctgtcat

SEQ ID NO: 9071 - DNA, 10449 bp, Oryza sativa
ttaattgtacacataattacataaggcttttactccattgcatcacttaggtaaaatgaaataaaaatgccaagacattaatgtgcataaacataatgttccactctacaataccgttgggccaaaatagagtgaaacgacatgattgaggtaaaatacgcacataaataaaattctaccccataatgccataaggcaagatgggataaaatcatattaggacatgaaatgacaattgacgcgcacaattacataagatttttaatttatctcaccatagggcaagaaatgagaggctacatgtaaaaaatgtcaccaagattaatacaaacacaaaattctacttaatgatactattgagcgaaaatgaagcaaaattaacattagtatcttaataatggaaaatcctatatcgtaatttccgttgggttgtgtcacgcccggaatttctatccaaaattctaaacgcttacatgtgtgtgaaccctcgtccaggaatcagccgaggcacacaataacaaattgataatagagtacaattattactctaattaataagcgaataaaatatcattacagaggtaagcagcggaaaaaataagataaacggcgcagatgactccactccacaggcagcttgaccagggctacacctaatcctccacaccatcagcatcactgtagaactcctcctttgatgaatgattgcaaggtgagtatatgacatactcagcaagccacgaagcaaatatgcaagtgcacaggataacaaaggatggcatagtagggtttcatttgcataaacagcatttaataaacatttcagaatttaataaaatagttaagtaataattaaacaatattaatccaacgctatacaacataccctgttgcataggcccaaccattctgaacaaccatcctggctgcacagttctatctccaaaccaggaattaaccattccaaaccaggagctaatcaaattattaccagttatagcatcttttattatgatgagaaatgtgagactaatcacgaaagacattgttagacccgcccataaccgcgggcacggctattcgaatagttttactctggccagaggtgtaccactgtacccacaagacacagccccacaacatgtcaccatgtgcctcaataccaccacggtaccttggaaaggagctgtgacagtacccctcgcacaacacaatccaccacagtgcaccgttcctagatcataatcacccctttataaacaaggcatggactccccagcgacccccgtgggcttatctccgccacttctcagtctggtgctccgcaatgaaccatgttatacaaaaggtaaagccattgcccacgctggcttgtggttggcacggttaatgtttcacaaccgaaactcgtgaaccggtccttaattgtcatgagcacgaccatcaaaaccatgtgctcacaacccaccattatcaagttttagttggcaatttaattaattaaccaatcacgattgaccatcgtgaactatcattaagccatcattaaataatagtgaatcataagttatcccaatagtgtgctaatgtttctaagcatggctaagcaattatgtctaacatctagctgaaccaatatataaagctaaactagtcaaattatcacccaaggtatcaaagaatagagtaagcaatgcaaagtggtcataacaaaggaacaggtccacaccactcggtgacattcgaaaataaatgcacagttgaaataaatagagaatttaaatataggatcaacatgctcaaaggattgtttgggatctgtgtgacttgccttgctggccttggaacacttcaaattcttctcctgcgaaaacggactctccggaaacgtcggaatctaaacagaaaggagcaaaatcaccaaacagcacataaacaagcatgaacagtatatgtggatatttttaacatgtagatctcaattttagaaaaatttagagacttgaaccaactaaatccgagctaagatgaattagttatgaattttcaaagattaaatcagattaaatcatttatttagattttaattgaattatgacgcaataatgaattatttttgaaaaggaaaaaggggtttattgcgtcagcggctagggttcgcggtgaaccgggtgcacggcggcggctcacggaaacgaacggccgagatcgattcatccaaaatggacggccaagatccatcggtccatgaccgggccacggggaacgacgacgatgacgtcagcggtgacgtcatcaccggcgacgactcgggcacgcatgcccgccggcgaacgacggcgcggcggcgcgaacggagagcaccaaaatgatgcgggcgacgtggcgaactcaccgatgacctaaacggcgacggacggtgaccgaatgacgtcggcgacgaggaagaagcggcggcgctcttcggcttgacgacggcgacggtgttccggcggtcgacagcgacggcggagggacggacgaggactgcgacgacttggcgaccacgatggtgacctccccgagcgacggcgacgaccgaagcgacggcggcgcacggctggagcgacggcgacgacggcgacgctaggctgcacggggctagggctctacgggcgacgagaggcgaaggcgagggtggcggtgggtagcggagacaccgggggtccttttataggggctaggaggcggcgtcggaggcccacggcaaccggtgacggcgaaggaaggtctagggttcggggagagagacgaatccgattcgaaatcgaatccacggatttccaaacgaaattagccaacgattccataagagaaaagatagaggggatcccggggatcatttcccctctattaatttcattgaaaacggaaaggggcgggcggatttggaaggagatggcggcggcgcgacgctagggctcgagcggcgggcggccggaggtagacgacgacctgacaggcgggccccacctgtcagcgtccgagggcgcgcgcacgcggctgctgcgggcggactgggccagcttgggccgtggagagagagaaggttttgggccgactttcggcccaaagccaaaagaggattttaaaaacctttttcaatttaaattattcattaaatgcaattccatttattaaaaatacttccctagctcaaataaatcccagaaaaatctagaaattatagaattaagcaaagtatttaatgaaattttatctgaccccattttatattggaatttattaattaaaactagatcttctcttctaggcttttaaaataaattctaataattccaatttagacaacaatttatatatttggaatttttagggtgtaacaggttgaaacaataaaggcaataaattaaatattctagccaaatttctagttggttccatttagctagacatgatcttatttgcataaggatacttataatgcaattttatggcatcaaattatggcttaagctgattaaaaatgcattcatgtaattagaataacattgattcgggctaaaatataagaataaactaatttggcccaagtgctggccatagcccaaaattgcatccggccgacccattatcgtgcgcggaggcccgtacagcccatgagggagatcaagatcgcacatgtgtggcctagcttgcccacaggcccatgagcaggctcggttggatctaatcgatggacatgatcacccagggctggttgatgcggtgtaggtgcagcgtcgaccgtccaattccgatcagacgactcagctcaaacgtacccggaacaaaagcaccaccggtttccaaaaccctaaccctaaccattaccctctctctccctgatttcaccgacgcaaggagcgcacgcagcggcagggatgccggcggagtggtgacgttgagacgcccgtgcgcagagaggttgatgctgagcacgtctctggcggggtccagtgggttgccgtggccgtaataagtgcccatgcgagctaaggctggtgacatagtgtgaaggcaggtcatggactcatggtgtgtggcggactaataccgcgcgtaatcccttcttccagcttcagttctcctctccagcgcggtgcaagaccacgccgagacaagcctcgacctcaagcggaggactgatgcgggcatgaggccggtccgaggcgacggcttaggggatgcatagcggcagtgaagtcgtgtgccattcacatgaagacgatggagaactcggaacgatcgcgcacgacggactcatgccgcatatggcgaactctggcaacctgagcccaaaccgtgagtcttcttactcccaaatccttggggtttctgattgagttgggatttaccggttgggttgcacttaatttgggaattcgtcatgatttagggaattgaatgatctgagtcccctccttggctccttctaattgctacccaagttgaacttgattagtaatagcaatctaattaatacactaaaacttagctctaattgtgatcaacagaacatgaataataaatttgacttaatttcaacatgaacaaaaaaacatacactgaacataaaccttaaaactttaagaagctgacacttagggaaaacttgatgcaacctttggcttcaatcactggagtgatggaacatgcatagtcctaagaaggctcttataccagaatattggagttaattcttaaaatcatgaacttaggctatgcttgatcacctcattaagcttacgagaaatttggtgtactgaccggtattgggagaagccattcggcgttgtgatagtaggacaccggtgataggatcaccgtgcggcagtagtgacaggaccgctgcggtgtggcaatggcgatggaacactacaagaatcctattaatccgtgatgaaaaatttctgtcacatatcactaaaaaaccgtcaccaaacaacatctgtgatggtttcagaaatcatcacggattgagcatcatggattgatctgcgtgacggtttgtcgaaaaccatcacagattaacagaatcggtgatggttttaaaccgtcatgatggagaccatggtctagttagtccaaccaagcccatttcctgtgatgaaaaataaccgtcatggatagctgccacgtaggatatttttctgtcacagattagctgccacataggatatttttccgtcaaggatttgaatcaccacgtatgtgccatgtgttcgccaaggtggacgctgatgtgtcatcgatgccatgtaggacttagcccacgtgttttgtggcccaattctttttccaaggagctttcggcccatttatgacctgatgatttttttttgttttgggccggtttttttttggagtgttttttcggccttttagtcatcattcagcccagttcaaattgggctacagctagattttagcccaactaaaattcagttgctgctaaatttagcaaaatacaaatatttcgtccataattttagcaaaattaattaccgatcaattaacattctctcatcatcagtaacaaaatagttattgatcagcacataaatattctaaaaacacattacaaccttcacatctcatacaacataattttttagcatatctcatacaacataattaaaacctgttcaaaagcacatgacaatacccaacagccaccaaagcattttggccactccatcaaagtcgcatatgtttgagcccagcaacctgatagtacaataccatgtgttagattatttttttatgctctagagaaacaagaagaaacaatctaccgatacgatattagtttttgaatgatagggctactttgcaacaccaatcttatgtcccataatacattgcactaacaaaactcaatgtccccatctacctcatttcattggccaagcaagcaagcaactgatgctatagattgaaggagaaaataaatgtggtccttttgcaggacagagcaagaaatccacagtttctgaagcaaagaaacgcaacaaaacagaactatcaaagatttgtgttatgtacaattaatctttaaacatcttacttcaggaatagctctacatatcacgtactgacaaaaacctctgtacaagaaactaaaaatcaaggcagtgcacaactagttcagagttgttctgagttcagaatgctatttgaatgaacaacttggcattcacggccaagcagataattcccatccaccaaactatagatagattcacaaacaactaaagtggttagagatatacacagacaaattctactgactagacctgctcatcatggaagcaaaaccaaaaatggcatttacagccataaaacgacactgctagtttggctccttttgcagcttaagaaagttatcaagtatatacatcaaacaaatctacttggtttatttgcagattaagaaaatgagcaaggatatacatcaccaaatacttgtacttactagccaaaattattatcttttgcaaatttacagccataaacaaggggttgatagcaagttcctaactcatttcagatataatgaagtgcatcgaccatgttgtcaaattgaaaacttcagtgcattcatagaactgatttcaatctgaaagtaaaaaaaaaaaaacaaattcagtagtagatacacgtctgggatggaactgtaaagacgggaagaccgctgcaactatgacgaggaagtggatgacgacggccaggacggatgggaggcaggcaggacgtgcttctatttgcactaattcaatctatttgaaataagagaaagaagggggaggaggatgggggtaccgtgggatggatctgccgccatcgctcgcctcctcgccgcctagcgccggtgcaccacaccaccgccgctcacctcctcctcaccgccgcacaccgtcgagccctcctcactgctgctgctgccggaggatatctctcgcggtcgctgccgaagcggttggcggccatgaggatgcgcccccgatggcgccgagcaccccgaacacgaggagagcggccgcgaaggcgatctccatgatggacgtgccccgggcccgcccacggcgccgccgacaaggtcgtcctcatcggagatggagaaggagtggtccacgtacgccacgcatggctaccctcgcctcctcctctacatctgcctgtcagtgccggatccgatctatgaactactcttccccacctcctccttcctcgctcgcagcctcgacggcgccacctccaccatcgataccgctggcggcgggagaaggaggcatacctccgcgtcgaacagggcgtactcgccgccaaaccatctccgccggaggttgaggaggaagaggttgcggattcagatggggacttggcggcggctagggttggggattgcttcgtttgattttggatcggctagggttggggaacatgggtatgaagcaacaacggatgcgattttacaagaatagccttggtgcatgtactagcttctgacactatttggacatttcacgtcaattttggcttgaccgcgcgcagtggcaccgcgatgcaaacctggccggaaaattttggcccttgcagtatgtttatttttggcaaaaaaaaactaaagatcttatggtaatttttaattttaatttatgagaactttaaatttaattttagactgatttttgtatttcaaatgaaaaaatcataaataacaaaattgtagaactcatcgaaatctacaactattgtattggtcctttctacaaataagttcatttgaacaatttcaattttgaattttcagaatttgacaacttcgaataaaaattggggttaataaatgattttaaatagaaaagtcaccaaaaccaaagatgtagaactcatcaagatgtaaagtttttattttggtcatttcttcatctgactctatttgaacaatttgaaatttgaagttcaaagtttgagaacttcaaatagaattttttattagtgaacggcttcagctgaaaaactcatcaacaataaagttgtataattcatctagatctacaaattttattttggtcatttattcatccgacaaagtaattttaacattgttcataaattttacatatctccaatatggtttcataaattataagagagatgtgtatattttgtaaacaatgttactatcactttgtcggatgaaggaatgaccaaaataaaagttatagatattaatgagttatacaacttttttgttgatgacttttttagttgaaatcatttactatttaaaaatattggttgaagttatcataatttgaaatttaatttgaaattcaaatttaaattattgaaacaaagtcatatagcaaaatgaccaaaacaaaagttttcgattttgacaagttatacaattttgttgttgacaattttttcatttgaaatcatttattcccgaaaaattatttgagttgagaggagggatgtaaaatggacttctcggcaagggaggagcaaaaagggctggcggcccgaagagggaggaggagggagagggaggctgcgggctgagggagggagagagtaatacttgggccgaaaaaggcccaagtatagagagatgaattttaatttgtttttttatttattttaataggttaaatgaactttgtgatattaaaattagttattgcgctctgaaaatttatggaaaatttcagaaaataatttagaccacgtagaatattaaaaaaaaattccagcaatgatttttaaagaaaaattttagtttcctcgttaattcatttgattaaattgctttaatctttaatatatttttctagtaatgctatatataaatatatgacgttttcttcaactataatacattatagaatcctattagaacacaccaggcaactagcgcagtggtaggatgggttatcttcaactagaggtcatgggttctattctcgttgggcgcacgttatgagttattttttccttctttgaaacgccaactctgagttgctgggccaactcgagtgacattgggacaaataaaaatatttaagtgcacattgggacatctagaacaagtggttcaaagggtaagacacattcctaccttctagctaagttgtgggttcaaatcccacatgctgcagatttttacccatgcgcaccatatttttttagtttgccatattatgcatcatatacatgtaacaaattaataaaattattttgttcaaatttaacaaaccgtattttgcgtttgattcttcttgcaatcacattttttatttttctttgcgctaaatatgttttattttttattgctttgggctaactagagtatgacgaatttaaaatcatacattgtgacagtcttgataaaactgtcacgagttagcaggccgtgaatatccactgggctcatccgtgacgaaaaacaaaaaatcgtcacgattacgtttgtcagtgacgatctataaatccgtcaccgaaaatccgtcatggattaacaagtttcttgtagaaattcgcccttcgatccccttcaacacgccttaggatcggtagtctcaaggttttgggaatggcttagcgtacgtgtctcgtcactcgtgcacagggttaagattccctttatatgtatcttgtggggatcgggggtgattctttcttgaggaaaacggtgtatccgatcatagcgttaaggagagaaacatgcatgaggatgcgtgggactcgctcttcaacgttagagatcgcgtgggcgttggtgggctgagcccatcgctctcctttctggctcggtggtcagagatcaaccaacaagtactaccgttaggatttttgttttttacttgatgaaagattgggaggatggacaatactaaccttaggatttttgctgtttacttgatttaaaattaatacatgatgattataggcaaattttgctacatgacaccgtgacttcgtggttttagctgtagggcactgcacgaagtgatttttgggggaaaacacttccaaaagttagatatttggtggtagtcactgcacacattaaagtaataatttccggttagagaggagagagaaatcgtgtgaaatgtcaaaaatgcccttgggcccacatgtcaactctcctacctctctatcccctccttctcttctctctctatcccacatgtctgtgacgttggtaggcaggcgaggttcggcggcggcggtgggccggcgagggtggagtggccgagggcgagggcaaagcggatgcgaccagtgacgcgcggaggagcgccggcgccagccagcggtgcgcccgggcagcagcgcaggctggccaacaggcgaggttcggcggtggcaactgcgtgtggggctgcagga

SEQ ID NO: 9072 - DNA, 5641 bp, Oryza sativa
agcattgtctaagcttgtagaagagagtttttcacaaggagaaggaaactaagtaaaatagtcttgcctttaagaaggactcattaagttggcataacactaattgtttcgatggatggatatttaaattccaattattatgttgacttgcattagttaatttgtgtacatagcatgaccaagaaattggttgtggaaggcaaggcacaaaaatattgtggtcttatgaaattcatctatgcatatcgattagatgtcaaaactattgtcaataataatggtaccttaaatcccataaggtcatcggtaaattcaagtttaggttgaatgagatggataattgcctttgggtggacattaaccttactagtactctgaaagggtcacttaggcctagagaggggtgaatagactaatttcaaaacttaagtaaacgtagaagcaagaattttcagaaattccgaaaatcacaaagtgtgcgcacgggtaaagaaatgctagatctaactacccacgagaatgaataactagcacaaacagtaactagacttatagcggcacaaacaagtaaagctagaggagggggagagagatttcaccgatgttcttgtaagattaggtgttcccgaagttcaaatccttgaggggattctagtctctcttgaggagctcagaaaagccgggtcttcgttaaccctttcctctagaggctacgcaaagaattacttccagtagtgctatctctttcctttcggctctttcctttcggaggtgagatccgacattcacaaacttctcctggccagccacaagtagatcagtgactcaagagtgacaatttttggaaattctgaaaattttttggacatattcgaaaatgacctaaaccaaaattgcttgcagacattttcgtaaattctaaaaatagtttttgaataagtccgaaaacatcctgaaccattttggtcgctcagccattttggtaaatttcaaaaatgattttcggacgtccgaaaatttccaaaaccgagttcgacttcacagccatttttggaaattccgaaagtggaactgtactactattttctcaactcagacaactttcggaaattccgaaaacacatttcggacaagtccgaaaaactccagaactgatattttgaggagacactttgaaaaattgatttttgagcacccaacgcattcctcgttatcaatgcatcattcccctatatagtacgccttctctaatgacacaaacaaaataaaatttacattataccatttgatcatatgctgcatcacatcgttttctcactttcgccgggttttgtattgaaccatgctttaccgagggctaacattccttcgcacatattcaaataatttgttagtcccctctaatcacattgttattaatcaccaaaatcatttggggcctagatgcactttcatactctatatgtctaatgtcccattagcaagcacataagtaagagatgcatcagtgaagggatttacttttaagtttaagtccaaagaagtactagacttatttattttcatacagtggcagaaattttgggatataatgtgaggttgatttttcacgtctgctctaattagggggaattagttaatcagataaagttaagttgattccctatgtttttgtcgtcggaagcaaaataagccctatgtttttgttgtcggaagcaaaataagcgctaagcctggatgcatataggttttgtgttatgtatcgggaacttcggtagatttaagttcagagtaaaagtatctactaaaatatgaggatgtcttgcatattgtttgtaagtgtcttgcatattgtttctaagtgattcgaagatatgttcacaataagaaattatgatgacttttgagtgaagttattcagatattaattttcaagggtacgtgaataatatccacgttaagttatgctcttattcctgtataaggagcaaaatccatggttaatggaaccaaatattattatactacatagtcgacaatgcaagctaagtttgtaacattaactagtcgacaattcaaactaagtttgtaacatgttaatgagcaagagtatgacttaataatacttttctgcaactaagagtgatagattgctttctaaaccacttaatgtactacgataatgagaatgcgcaacattataattcgcagtttgctattcaagtaacaatgtcatgtgtttctgccgaacacattaacatcatgttgtgaaagataggtcccacgatcaaactaatgagcatattaatgtgaagttcatgctcatggatccacactacatagacttataacttaatttgaagtaagattatgttgctagccggtgcatatgaaaagtaatgcctttaacaaaatcctagatataggggcataagaattaattaacacccaataaaagtaagttaattcctaccaaggtattatgatgactataggtattgttgtcatagaagcattatgttgactgctataacacattgctttggtttactattttactaagattggactggttaggcttaacccatgcaggagcgacaactcacgtacgctaaaccattcccaaaaccccaagactaccaatcctaaggcgtgcttaaagggaacaaagggcgaatttccatcgccaatgcaacaccaccgtgttcctgtcactgctgatcccatcaccggcaacctactaccacaacaccaacgccgacaaataactaccggcaacctactatcacaacaccgacgccgacaaataactaagggcgacactaatggcttctccaaacaccggatagcacaccaccaaattccacatagtgatcatacatagcctaaaagttcatgattttaaaaattaactccagtagtagttctatccatcctcctaatatcctctcttgtaggatttctagagctgatcttactagccaaacactatcaggcaaactccatatcgcacaggagctagttcccactgaagtcagggttaggagttagaatcagtgagttagagccccttataaacaggatttgcatgtccaatttacagcaaggacggccacaaatccatcagatgatgtgggcatgtcacgcagagctatttaagcaggcaggaagaacaatgactaccaccccaactaagctgccacacttacaaactaagctacaagtggataggcgtaaaaaatattaaaatgggtaaataacactccagtttccgtgccaactttagttcacaaaagcacaagagttttcgtggcaaaaagatgtactggaactagcaacagagcagaagctcaacttctactgacaatataagccaagtcactgattattcttaacgcaccggtcattcttcacggcctgaagcgctgccctacaataaagaaaatgttttcagggtaagcattagacagcataatttatagacagcttttccagctttgtgcgggcaatgtttcatggagtattaaggaactatcacttcataataacaaggcaagcaacaagcagacgaaatactagcattccaaaaggatgtaacatttactattcatagaagcagcaaatattcctttactcaacccatcacagtgaagggtaacgagacttgccacaacgaaaataaagaccaggtaccttagagcattctcaatatcaacatttgctgggtccagcttcaagccatctgaaaaggcatcacaagcattaccatattcctatatgcacagagcaacaactaatcaattttatgatcaaaaaaatttgtgagtaatatgttctttaataacttaattattccctaaaaaaaccttaagaagcatgaaagctgctccttgccgatagcaggcttttatccaatgaggccggaacattctgcacatattagcatcagcaagagcttgttttccattttccaagcgcaaccagcagagactcctatttgccagcagagttgcagaatcatcaggactaggtccaagtcccagtgcctacattacaccaggtatacagctttcagcaataaccaaaaaaacatcacacaaatgaagctatgaaagccttccaaaaatcatttttaaaatcatcgccaatattaatactaaaaaacagtagtactgccagtaattatgaacagtgtcagatagatgacttgtttatcttcttcatctcaagtgtttgcaggtttgcataacttctttctgttgcatgcataatgttatcgtattttttgaaacaccgcatcgtgatgtattttctaacgcaggctcaggttcccccggacaccaaaactttactcagtaaagctacagtcataagagagctataatgtttgcaatgagtcaggggatgatgatacagcccatgactaccagcactatacaagctgaccagcatgtgggtatatttctctcttaaatgactccactttccaattcaggctcacccttttttttcctacccagatatttgtcctgacaaaagcacatttagttcattcatgaaatatatcttttcaatatgaccaacaaattaaaaaaagtatattcatttttttagagataatctacatctgttcttgtttctcagacaaaaaaaaaataccatcagaatacccccatgcctcaaatccacccaagtttcatccaacagacagcggaacaaatcctaccagatgcaaggcacatgacattggccagaaagaaccttcaattaataggtgtgatttaaagacaatttacttggtacaaagaaatcaacaaattatctttatatacaataactttttgtaaatagtcaacagagctataaaattgatacaagtcatctccacacaaattaacaatccatttcaagacataaagatgttctgcaatgccttacacttgtatagagttgtgccgcaagtaaataatcctttctcttgaaagcctctttaccttctactttcatttgagctattttctttacacaaagatcttcaggctgagaacaaacttattgttagagcagcagtacatttaatgctgacatgaagatgcattcagaaaactacttcggcagtttcagtatatatggatgttgctttagattacacatgttaaaacttcaacaactttggcccctaatatacaagtagctgttcttgatcaaggaaaacattttttttttgcaaaaaaaaaaggtgaagtaaaaaaatggcaccatcatatcttcaagtccaagtccttgtgaacatcaggagcaattacaaaataaatgatcgagagtaataaagttggagaataacattatggaaatacaaggatggaaaaaaaaagataccaatggcttcgaaccaaagttttttgcatgggcaaagattccatcaatactccaatctggcaccgttgaaattggtgaagtcaaaggaaataacatctcaacaatttccctatggacttggagagcagcaacttcaattggaaaaacaccaaactgcaagatgaaaaaaaaaagttctttcataatatatcatgactagtacaaatgccaactataattgcaaagaatttgaaccaaattagaaatatttcgggctgcagga

SEQ ID NO: 9073 - DNA, 35641 bp, Oryza sativa
tgccaaagtagatttctcctatgctcctcagtattgcaatactgctcatgaactagctcaaaatggagccacccagatcagtctgttgtttggactgatcccctcccggagtctgtaaatcgcctggtggcttgtgattacactgagccaatcgagtaataaagaggcatgtttgacaataagaaaacaactttgactctagatggggcacaagtgttggaggacatttttttcattttttttttcattctaatgtgtcatagtccaaatcagtgatactatccttaaaagtttaataagtcaggcatttctttttgaaactgataggtcaggtgtttcttttgcacagatgagggagcaacaaagaaactgatgtcttacatcagcatgatgctccaataagatcttcatcgtgctatgttggccactaatcgcagctgccagcaatggggtcccagcgatagaatataaatccacatcaactccttttgaaagaaacaactctactatttcgcagtgtcctgcaaaagaataatttatacattactaacaagaacaaactagaaaacaatgtttatcataggtatagaggtcttcattggtagatatatgttgaaaatggacttggaacaaggttcagctcaatcaggaacagcctagaaacaattattaatagtgattcggaacagttatgttttcaaaaggagtctgttggataacagtaaaaattggattttaagttttcataattttattatctaaaaagcttagcttgaacaaaattcaacatattaacagcaaatatgcttataatcaggacaacaataacgaagtataggaactaaagttgttgtccagaaacatgtagttgtttctttttcatccaaatcatcaatcaaatgagaatcagagccatgcaaacacccaagagagaagcatcattcaagactgtgtcattgtcagaattctatattcgtcaacaattttaagtactccctccatcccaaaataagttaacctagtacgggatgtgtgcctgtccagattcatagtactaggatatgtcatatcccgtactaaattaacttattttgggacggagagagtaacaaactacaaaacaaacttactagtgacaaaatactgatgcaaggacttagtctctacgtgcaatttgccatttagttgaatagttgtgagaacttgttgcaatttttttcacgaaataacaaaaatccagagtcatgactataatatagtgatcagtattttatcacaaggagtgcctctcctgaaacaaccttgcacatgaggggaaaacattctctggtttcatctagctactggccaatagtctgtgcttatccattttaagttttgagttcaaacaatagttcaaattttgatagaaatgttagaagaaaataatggtgaatccaagtgaagaaagaattcacttgcatatgtatcaaatatattgttcaaaatatatgttggactctgtgtgcgcggtgtgtgagaaagagatagatagacctttcgttgcagcagcatgaaaaggtaacactgatttatcaatcgtaggatcagaaccgtgatcgagaagatatcttgtagcagcagctctcccatgaattgaagaaaggcacagtggtgtttcacctgccaagaaaaatatggcataaggaccatagggaacccgtatggtcatatggatcgagccttcaacaatacaaactacaaaggtgcataatgtaaaatggtattgtctaaacaaaaaaaaaaatctattttaccacttagacgtatgggagctcatctacttacaggctgtttagtttgactaaccaacacatctaggacgggttatcgatcacatgatcatcccacaaaatttgaaaatgactccattaattcttcatccaatagcttgggacattatgcagtgcaaacctggaaactactgtaggataaaaaagggacgtctgagatttgtccacgtcatcctcagagtgtgatagacaaatctcagatgtccatattttgatcctacgttagtttccaggtttgcactacatattttccccaatagcttagcatgtactttttagattgaggtggtgatggcccattccattcctcaaatcaaataatgtcatcaaggatcaagtggtgaattcatcatcatcccacttctcaaacctaggtcattaaccccttacgcctttaagtataaaatttggtaccgtatccctagtaggtattgaaagccatctaaaaaaacccctgagatgccaatataccaaatgacgtggagtcgcggacaacaatgtcgcgatggtctgcatcctaaaaatattttatgtggtgaatccactcatgcgagggtcaagtttatcttttgcttccaaagttaaatttatgtaccggcatgaaacattgttttaagaagtggggcattttattactgattttatattcatctgctaagtctcactactcactagtcatgttgtttaccgtggcaaaaccacctcagggattattttgacatcctatgccatcttcctatatagttggtacccactaaggggcatttactcctataaagcaagatatgccaaaagccacatcatcagcaattttaagccatcaaattgcattagtacaaagataatagccattggataaagaagctacttattatccatctaactcaatcatttattagtcgtccattcacctccctttgctccacctcaaaggcacacataacattgttacctacttttgcacataacaccatgttttttcctcccaagtcctgaaagataatgctaacttatttttttcgaatacaactcaaattattgtttaagatgtgagttttgttttattatgcatgcattagatagcatacaattattaggcatcattcccgaacccattttcatatgctttgagagaagtagagatgtgcaaacaatctaattgcaatgatacctagattgtgcatgaaaataatattcatatatcgtaaaaatacacaatgacgctttgaaaaataaagcatgaattgtatcataataccagaggatatatataaagccacattatcatatattctgtatatatgtagagttgcacccagccatttaaaattttgattttgtttgacgataaaactaacaaaacatgtggcacggcgcggggtaccgactagtttataagcatttcaggacgcatgataccggtttttcttctgcatgaggttaagtaggcttctccttttcaaaaaaaaaaagaaagaaagatggggtgcacctggcctcagtagttctaatgttagtaccagtgactccacatgattaatgattaccgtaaaaagtatggcatgcaaggaaataagaatgcacaattactgctcagaatacttccagttccaaggaacacattccaattccattgaagaggttgttgtatgccattaggaattggaattgacaattcaagtccaattatgagacaaggtactgtgtataaatatgaaaccagttatctgctgctacacaatcacggacgctgtaactcagttgaattccaacccacgtcaactctctcgcctctcacgcatctctgcaatggtaccactacttctccaactactgtatgtgcaagacctggcctccccagtcaccctaacaactcctctggtccacaaagtggcagcctccagcacacatgatgacaaggctctccgcattgcttaattaggtgatatatttggtctctctttctttgtgatgattgtggatttgtgggattgagtgggggtgaggggtcaagcaatttgtttcggttttggttaatctgttaattgttgtgacattttttctttcgcaagacatatatatagtttagtagggaccagggcttccaatatagatttcagccatttcggttctaccaaaattcctgaaattttggtattattggcacttttcggacttgaaattttaactgaatttgactaagttttgaccaaattcacagaaatttgagaaaaacccaaaaattcggccgagatagtaactccccccccccccccgtttcaaaattgcaataactgttagggaccgtcctatcgaatctttctgagtaataaaaaaatgatgttaccaaatttgatacttgggttcacgatagttttggagtgtgatttcaatgcaaactgtgggttttcaatgcactcagaaaaggagatatgcaatgcttgcacaatgactaaaattaggttatgttgactgagcttaaaccataactaattataccattttttgaacaaactagtagaataaatcaaactgaaaaaatagaacggaagagaggcaatgcaagacctttggcattgaactggttgacgctgaggtggaggtcctccacgaggtacctgaggacatccatgcttcctcgggcggccgccaggtggagagcgcggttcccgtcggccctgcccgccaccgccgccacgacggcagcctcgccctgcccggtgtccagccctcgcgccatctctatatcaacggaaagaacggtgagtttcgatcggaaaagcataataagcaattaaaccctaagagagaaagggctaggaaatatacgatacaatactcactcctgaggaggcggaggttgtcatcgtaggcggcctggaggagcatcttctcctgctcctgcttccccatcgatcaggctcgggggtgaagaaggcgagagagcgggagcggcagcctaggccctagctagcacttgactggaggagacgagacgaagacgatgcggcgccggcgtgggtttggtagagactgcggagtttggtttttggaagggagcggtagtgggatttggatgatgcgcgcgagtcacgctctgggcccccaacccaaccaggttaacaccattttcttttcctattctatcggtcatctgaattcgcacaagggagtacctatacatctttcgaaagatttttatgatcgtatcacacagatttttaatctttagattaaaatctgatagatataataaaaagcaaaaagcaattaagaaacaccataatggacactaaattaccatatcctcaagaaaaagaccaaatccaatacaaaatttaaaatttatatgcgaagatttaaaaattacagtataacttacaaagttacagtgtaagtttcataaattacactgtaacttacaagaaaatgcactgtaaatttgagtgagaaaatcgagtgagagataagaaaaaatctttcgtgtgagatatagcaaaatcgttcgcacaataatcataatttaaagagtagtaaaggtgaactgaattcgcacaataatataaagagtcggttcttaaatttaagcggaggtgttatataggtccgtaaacttgaaattttcacgttaaaattcataatcttgttttaatgaaccatagctagtccaaatgacgtttgactagagctgaacggctatgtggtactccatgtaggcaatagtttttacttatcccttgttgctacagtagtcatcgaaatccatcaaaatatcccaaacccctgcgtccctttgcatcccccagacgctttcgagggagaggcctgagtagggcgaggacgatgccgacgatcatcggtggtgcgaattgattgaggtgtcaatttggatgcgcgactagcagcgcttgataggcgatgcataatgcgccttcctcgccttcagtggagaagatgaatcggcgccccaaccgccattacctcgccgcctccggataccgccgttgtcatcgcaaccctagctgttgtttggaatgcaaagggatgaagggattttttttttggggggggggaggggaggggcgggggatttcagcgactactgtagcaacatggggttaagtataaaattaccaccatatatgtcaagatgtgaagggggcggatgcaaaatgctgcctaagtagagcaccatgttagcggtcagctccggtcaaatgcgcttggaccggctatattttattaaaataagatcatggaccttaatatataattttattaatttttaagtttattgacctaagtggcatcttcgctcaagttgaaggaccgtcaatgtatcttaatctaatctaaaacagttttcggaaacaccaaatcttaatctttctttgattttatctaatgaaattacctggatgttttttaattaagatctagattatttttttaatatttacgagtgccacgttactcacgcaatttctcacaattctaaggggcaagctttaaaacgcgtgatttgaaaaatgtagaaatagaaatagtaaacaacagatgtgtgaaaacacatatatagaaagagaagccctttaattacactgcataataaaataaataagcagagaaattttgcaagaggtataataaatattagtagagaaaatattcccaagaggtatacctcgtacttatttttcaaaaatataaccgcatgcttaattttctactaataatcgtgtacgtgcatatgaattaaatcaaacatacttcaccgcataggcagacaaagtgaaagctttttcagtttatcaaattgtacaaaatcacatccaacggtactatgttaaaataatccaacaaacaactagaaaaagccatttcacaatatcacaataatagaagagccatttcacaaatttaaaatggtgccaaaaggttatttttttctaatatgggagaaaataatctctaccattataaaaatataataagtatggtttccggtttttttccatccgtcatttagctttccgattttgtggaagatttctcatctgattgatcatagcgcataaaaaaaaagaagaagacaccccgtcattttttttaacgactcgcacaagacggtgtgaagttctattaatagaccagaaaaaaattacaagattacaaccctggaaagtcgtaactaggaaaaggaaaaaagtataccaccacccacacaccggcagcgccaacacacaggtccaagagaaggatagcaccggaccggccgttgctaagcgtgatcgatcgctgctaggctgacaacgaaacatggccgagatcgcccaaaacccaacccttacagtcaacacaaacccactctatccaagacttcaggagttagggagagagggtgagagagaagaatagaacacatctccccctaggccctccgacgtggccaacttgtagtgtctagcacaccgcaacaagaggatgaaatctagagcgagcttgcatcaattggttggggggtttcggctaagggatgtctaaacaacgtcttcaagaagagaagcgacggaaaataccaccgccgccgtccgtcaaggtttcaaagagaaccgagactgggctttcgcctgacatccacacttgagggatgagacggcatgacaacgcccttaggaggggaatgacgcttcgaacgtcatcgttgccgaccagggcgagaccaggctgggttttcacccgccactcaccacctgcgagtccacggctggcacgatgccccaccactgtcaaacttctgccggcacgtgggaccactgcaccggcgccctcaccagccagccttcttgcgccgtagaccaaaccgaacccaccggaagctcctcctcgtcgcaccgtgctcgcctcctccaccgccggcaacgcctcgtcgcgccttgcccgcctcctccgccaccaaccgcgccaagccggcctccagccaccggctgcacctcctcacgccaagccgacctccactgccgccggccgcgccacctcgcgtcgtaacgctccgctgctacctgtcacgcctcaaagcatcgtgccaacctctgacccctcctctagccgccgccatgccggccaagtgcggtcgtctgtcacgcctcctcggctaagcgcccgtcgtctgtcatcgcccgtttccagccgacgacatcgcgtccgcacccacacctagtcttctccttctccgctgcccgactccttgatgtgagcaatggttgtatccgtagtagccatggtcacatcatctccgtggcccgatctttcggtgagttgtagataactacactttgggagaaacgttgacgacccgactacaaccgtacaagacgttgttgtattgcgtcttagcgatcgatacacctctccgtgggttgttgatcttgccggtgcagatcaaccttattcctgtaagcaaatagaagaaacaagcaagaacaagataaaagcaatctgaattgcagataggaattcaatacaaatgataaattggggttccgtaacgagcaaaccgtcgatctaaccgatcacgggattacacggcaaagtagcgaagctaaactttaatctaaacaaaacccgagaaaccctgaagtggtacctagctatttatggatgtgggaggacgacctagggtgcctagggtcgtgctccacctggttggggcgcccccaacatgggtcccacatgggccggggttccaaacaaagttacaagcccaaaggcccatgacaggtgttacagcaccttgtttctttatttgcagatggctagggtggaatttggtgatgtggctagatccgttggaaagaggactccgagagctttccatcaagtactcacgggtcaaaaacggaggtcgtatgcagattcggtggctgtttgaagtcagcagtgtagcaggtggccgaattggatcctagcacttggaggacttgaacttgatatcttgttgttcatccatgatgtgaacaatggttgtatccgtagtagccatggtcacatcactccttccccgcctccacttgctgccgccggcaaccatctgcacgatgtcgccagccgctgccgcatccgccgacgtcgccagccgccagacgccgcctccaccgccaccttcattgccgcagccgacgtccgtcgctgccgccgtctcggtgtctccagccgtcgtcgccagccaccgccgccgcaatcacattcgctgcctcttcgccatccaccacctcagcagtcagcatccaccacaacaccgccaccatagccaccgccgccgtcgccagccgccatcgccaaccgctgccacatccgcgaccgccagccgctagccgccatccaggtccgaccgagttggcgcggatctgggggactccgccaccgtcgccgccaaaccccacgctgccacgtccgccaccaggcgtcgccgccgtcaccttcactccccgccgccagtgacccctccgccagatccggctgggcccggcctggatctggccaccaattctgccgctccgagcaacgcccctggccgctgagcgcgtggagggtgagacaaggccccgtcgccgctgtccttgcggccgcacggctttgccggcacccgctcatgcggcggcgaggcaggggaggaggaggaagttggcggtgtcgcctcccgagtcacctggggagggcgatgcgggaggaggagggaaacgtccttgtagtgttggccttggctaatgatttacgtaccccgtcatatattgtactacaccagatcggtttggactggttcatcaatgcatgcatgtcggtttcgtcatccagtcatcctttcccttcgcaagtcgttggtttggactattattagaacgaaatactccgaggatggtcggtgccgcatcccgcatggcgtcactgttgtcgtgcgatgaagacattgccgtctgctgtacatgacaacatgccgatacctgctcaggttcagtcttttcgccgagctcgcctcaccaagagctcgcctcactgtacatgacagcatgccgatacctgctcaggttaagtttcgcgcgttgacgtagccatgcactaagtgcttccatccagcgtatttcttgagccccattgccggagtacgtacaagtacaacgcgcgtgtgtacgcaaagcatgcattctataattaacaaagtaaaactcactagtacacaaaacattttcctggacagggacccatttaaattgcagacaaaccataactgatcgcatctgggaaaatcgttctcccattttatgtgcggaatcttaagagttttcgcgtgcgggcatcttaagaccaccgcacggaaaaataccctccctagctcctttttccctcacaacacttcaaaaaaaaaattccatcctcacatccttatcctcacctcacctctacctctctctctctcctctcctctcatcggcagcgcgcgggcgacgactctgctgccgccgccgccgccgaggtggccaagatccgacggcgcagcgcagcgcctctccgccgctcggatccggtcttccgccgcccggatccagcggcgccacccctctttcgccctcccccgcgcgacagcgacgatgacaaggtggccgggattcggcggcgcagcgcctctccaccgctcagatccggcggcggtgcccctctcccgccctccgccgcccggatccggcggcacgcccctcttccaccgtaccccacgcgacggcgacgacggcgacgatgacgaggtggctgggatccggcggcacgacgcctctccaccactcagattcggcggtggcgcccctctcccgccctccgttgcccggatccagtggcgctgtacctcttccgccatccgccacgcgacgacgacgatgaggtggctgggatctagcagcgcggcgcctctccgcctctccccgcagcgcgatggcgatggcgacgacgagacaagctgtggcggcggtgacggctacgtcggcgacagcggcgacgatgacgagctgcggcggcagctagggtttcgattttttttttgtgatttttattttcttttttggatttttattttcgcatgcgggcgacataaccgccccgcacgagaaaatgtgactttcgcgtgcgggtgtgcctcccgcacgtaaaaatcgcgatgttctcatacccctgcgtgcatgcgggccgcccacccgcacacgaaaacccattttcaccatatgggaaaatcctttttctagtagtgactttgatgcgccgatcataatgttgcaccgtaattaatctgatcagcatgtttggataatttaggttgtgacaaactgaaggattaattagttaacataagtgtaattgcacaagtgctaatcagacacgacacatgtatgtgtaaactattttcaaagttagtgtaagatcgccattccgtccagttccataattcttaatgttttgaataagattgaggccaaactttttgaataagattgaggccaaacttttataatctaacatcctagaaattcatgttaataaaaaccactaaaattcgattttcttaaaacttttgcatcatacactactggagaaaccatctttggtcggtcgaccaaattccacaataatcccggttgcaataaaaactaggactaaatatattctttagtcccggctcaaaaggttagagctactttttgatctatagtcccggttggtaacactaaagatcatttttagtcctggttaaaaaacggcaggtggtgtcagacacctctattatctctatgtatagtcctggttgcttaacaatcaggaaaaaagatcggcatgtgtggagaggatgaggcgtgcgcgcgagatcgatcaggaggaggtgcacacgatcagttactaagttctatctcctagcctccctcacatttatctcttccttctctcctctcctcactcaccccatctcttcctcttcctcctccagatccgccccctcccctctcctccccacttctcaggcggccgagcggcggccgggcggcggcgaaggtggcctcgtgcggcagatccgggaggggaggtggcaaggcggtggcggcggcctcgcacggagggccgtgcccggtggaggcaggcgacggccgacacggagaccagtgcagcgacaggcggtggaggccggtgcggctgcacggatttttttttcttttttctttaatgtgtgattcgatctgtgttgaatgattcgatctatgttgattagatctgtgttgaatgtgtgattcgatcactgttgagaatgaactatgttgttgtgaatgattttgagaatgcactatgttgctgtgaatgatttgggatgaactatattgttgtgaacgatttgggatgaactatgttgctgtgaatgatttgggatgaactatgttgctgtgaatgatttgagataatgggcgtgagatatacaaaatagaaaaaaaaactgggactaaagatagcgatcttttgtcccggattcttactccggttggaaaatcgggactataggaggttatcaaccgggagtaaaaagcatttctccaccagtgatacgccggatggatattgtggttgctagtgcttgccaaaccgtaaattgtcacaatgggggaaataaattaaagatgtacaatttacaaggatagattatttatcaatcatacaaccatctatgcaaaagacagaaagccaaataaagaaaaggttaattattaatttttgtaatataagttatagatcaaatattaagtaactgaaccatgtcgatagcttgatctcaggggaatacaaaaattaaatctaatttgcctagatatattttcataaaacccacccacatgaaataatagttgtcggtgatatgggcccgaggttacccacgttagggggaaggagcggaggagcccttcctcctagccacgtgtaagtagccgagagacgccccacgtccacctaggggcctcggggtaccccgtcgcacccctcggtcccgacgggttgcgccacctcgagacccccgctcagctgccactcggcggctaagtgggtggaggagggggcgccgctggcgtatttatgaacggcgtcccaaccacgcacgcgcatcggcgtggctggtcgtgcgacgccgcccaagtgattgacgtgcgtcaatcacttggaccggtctgtgaccggtggcagatggataggacgggtggcagcgcacccacgccccgccctatgtcaggcggcgtgagggcaggtttgccccgtcccatcagccattagggctcagcacgtacggccggtgcattcccagtagcatgtgcctacaaaagtcttcaaggtttaatgagggaatgacaggggatgtcccccgtgtcagatgggagacggtgctgggacccacctcggagcaagcagccatattgcttccggtctaaggcataagcgggagtagaacccgaggaagagggaccccctccaggaaagatgagacgaatagaggcggtgcatgtggtatccccttgaactataaaaggaagaccttacccaccaagcaaggggacaacttttgatagcctgaactctaagggaagtacagttaggttttcccaggagcccaagatctcttgtaagaacttaagcatagttccacacacagaagtagggtattacgcttccgagcggcccgaacctgtataatctctggtctcactcccggtcactctcgaccaccttggtcaaatcttcggctaaggttggctcttaatcactcgcgccctatcgcctggtcgaactcacaaaggggggtggtctcatgtcctcccgctagagagggttactcctcgacagctggcgcgccaggtagggggaaacccgcgcgtttgtgaaggagccgcttttcttccgccccaagtttccctccatcctcaacgaccatggttgaggtagtggaggaagaggtggtggcgtatactccctcaccttccggaagtgaggacggtagcgggagtcgcgaccctcgccaccaccgctggaactctccgacccctcctcgtcgatgtcccggacggcaggaggaccccaccggttcggaggattagccctttccccgctggcggacaggggcaggttacgccgcgccggggtgcgacgccgcctcaactacaatgatggcggcacaccccacggcacactctaggctgtgggggctctcctgcggcacccttcggtcgttctagagccggaaaccctagtccggcggtggctggatgacgtgacccacttggtcaccaccgccccgcgacagctggccgccgacgccggcgaccggcccgcgaccactggtacttcgcgtaccacctacaaccctctcctcatcggccaggaggagggcccgtcgttccgccatgatctcacggtggttgacggtcccgacgtcatcgaggcccacggagagccacgggcgtcacgacagtctgtacggggaacaggacgctcgcatcaacatcgagcgccgcagggacaagcaccgtgctacccgcgtggggaaggcacctcctcatcaggaatgtcgcgccaccccacacgaggtggccggccccccacgcccccgtccagtgaggcagggtgcaaggctttcatggcaagtctccggaatgtccggtggcccccgaagtttcgtccgaaccgcactgagaagtacgacggcaacgtcaacccctccgagttcctccaaatctacactacgatcatcgaggccgtggggggcgacgatcgggtcatggcaaattattttcccatggccctcaagggtcaggcacggatctggctcatgacccagccccctgactccatccactcctgggaggacctgtgccagcagttcgttacgaacttccagggtacgtaccctcgcccgggagaggaagcggacctgcacactagggatggcaacggggcggggtggggccgggttgggctagaacgcccgcccccgacccccgacttcaccccccgcccctggccccgattgttgatgcggggtcaaattatcccccgtccctgacctctccggggcccctcaactcgaccggggccccgcattgggtagcatctttatccaatcaacaccaaaaatacaagacaatcatcaatttggcaaaaacaaatattgcacataattgacacaccattaaaaatagcatgaatcgtcgaccgtcgcgcccttgcctgtctcgccggccgccgcaacctcgccggccaccgagcccttgccgcaacctcgccggccgctgcgtccttgccgcgtgaccgggcgtccaggcctgtgcgccgccccgtgcgtcgtttgcattgtcggagggagaggtggaggggacgagctcgggagtcgggaaggagaggtcgaggggacaggacgggagcccggaggggagaggaggggaggggaggggagaggccgaccggcgacggcgagatctagaggtgcgcagtgccccctgcgccgcgccgccgcctccgctcacttgtgtgcgtgatgcggacgggaggggagaccggtagatggggataggggaggctggggagaggataagattagggtttagtaattttgtttatatatctcagtttttgttgggttgggctgttttgggccttctatgggctatgtctcccccgtcccctcctcgcccaaatgcgggtccccggccctgactcccccatgggtcaaaaatcacacccgcccccacccctgtaggacgacgagtccctctgctcgtgcatacaacgtttctgccaggtccgcaacactatcccgtgcatcccggcccacgtggtcgtctatgcattcaggggcggcgtgcggcacaaccacatgctcgggaagattgcctccaaggagcccaagaccaccgccgagctcttccagctggcagacaaggtggtttgaggaggcgtgggcctggaacatctctggctcaggcgcagcggcttcggctgcccccgagccctcttcccgctctaagccgcgggacaagagaaagaggaggaagtcggcccgctccgatgatgagggccatgtccttgccgtggatggtgcctccaggcccctgcgtaaggagaaggccaccggcagcaagccgggcgccaccacccccgacgaaagccgttcagcggacaagtggtgctcgatccacaacacttaccggcacagtcttgctgattgccgcacggtcaagaacttggccgagcgcttcaggaagactgatgaggagaggcggcagaatcgccgagagggcaaagcccccgtgacctccgctggcaaccggcaaggggaggccaagaaaaaggcccccacgatgatgatgacgatagcgaggacctggagttccaggctcctcagcaaaccgtcgccacgctcgacggaggggcgtacgctcacgcctcccaccgcagctttaaggccatgaagcgagaacttctcgctgtggcgccaacccacgaggcggcccgccgggcacgctggtcggaggtgaaactcaccttcgaccagagcgatcaccccacggtgctcgcccgtggggggaagttggcattggtggtttcccccaccgtgtacaacgtcaagctgaagctcgtcctgatcgacggtggggcggctctgaacaacatctctccggcggcctttgaggccataaaggccccggggatgaagcttcagccgtcacttccgattatcagcgtgatgccaggacacacgtggcccctgggccacatcgagctcttggtcaccttcatcgaccgtaccaacttccgcaccgagcggctagactttgatgtggcgaatctcaatttgccctacaacgcggtcctgggaaggcccgcgttggtgaagttcatggccgccacccactacgcctacctccagatgaagatgtcgggccccaacggccccatcaccatctgcggcgacgtgaagatcgccctggtctgtgcggagcagcgcgctgacaccctggcggcggcctctcggccagaggaggacggcagagccccggaggcctccacatcatgtgcctccaagaagcggatcacctcgagcgacgaggtgcctgtcaaggagataccccttggcggtgacccgtccaagaccgccaaggttggcagttttctagtctcatcacgaggcatagaagctaatcccgagaagatatgtgcaatagagaggatgcgccccccccaaagcaaacttagggatgtgcagtgcgtcaccggatgcatggctgccctaagtcgcttcatctcgaggctgggagagagggcgctacccctgttcaagctcctcaaccgctccaggccgttcgtttggatggaggaggctgagcaagctctcaaccagctgaaagcttacctcacctcccctccggtcctagtggccccggggccagaggaaccactgctgctctacttggccgcgaccccccaagcggtgagtgcccccctcgtagtggagtgcgacaaagaccatccgtgaaccacaagcgacgagcccgatcatgggaagggactaggggccccattaatcggtgatggcccctcgtctcccgacggcccgagcctcgatgctcctggcccctaggcatgccccgacgccaccatgggggagcaggaggccctggcgggtggccccgaggtcccttgcgcggatgcgggaggaagccccctggggccccaagaattgactgccctgagactggcgcccctgacagcaaagatagaccccgccgaaaggtgcagcggcccgctattttgtcagcgaggcgcttgaaagtgtcaattaggcctagagggagaggggtgaataggctaattaaaaaaaacaactaaaagcggaagcagtaattttcggatatttccgaaatttttggatatatccgaaaattttcggagtcagcacaaacagcaaagtaaatcctagatctggttgcctacaacaagaatatgctagcacaaacagcaactagacctatagcggctcaaacaagaaaagctagtggagagggaggaagtgaagtcaccaaagatgaagctcacgaggttgttcccgaagttcgaatccttgaggggattctactctctgttgaggagctcactaagagccgggtcttagctaaccctttcctcaagaggttgcactaagcactcctccttccactaagggtatctcttccctttcggagataagatccgaccttcacaaacttctcccggccaaccacaagtagatcggtggctcgggagcgacacctagccgcctaggagtcctcaacctccaagagtaacaaatgaagcaaataactcccggagatgatgcaagtgctcacaaatcttcacgaagtcaacaacaagcactcacacaaacttgaatccacaactctcacacacacaccaaatccaaatcgaacacgggtgagaggggaaacaagaaagcaaggctcaaaagtgctagagagagagagcaagccaagggcacaaatgattggaatggaaccagcagccctcacaagtaaggggagggggctatttatagccacagcccagattctgcccgttgtgcacaataattgagattttcggacatgtccgaaaattccaactcagcaccaacagctatgtcaacgaaggatttttcggacattccgaaaacttttcggacaagtccgaaaatttccagtaccaacaacatcgttctggatgttctcggaaaagtccgaaaataactttcggacaagtccgaaaattgactctactaaagattttcagaaaaatccgaaaatcagtttcggacaagtctgaaaatatacagaaccacttttgccttcgcagtctttttcggaaagtccgaaaatcactttcggatatatccgaaaatttccagaagcgaaaatctggttctgtgtgttttcggaaagtctgaaaatgagtttcggaaaactccgaaaaaatccagaacacaccaaactgaggagaaacactttttaaaaatagattttgagcactttgatcactcctcgtatgtcaatgcatcatccctcttaatagtgcggctttcctagaactcaaggaaacgaaaacgtacaaaataccgtttgctcatttgccgtatcacatcacatcaacgtattcggcgggatatgcattacgctaactcattgaggacataacaaccttcacatctgcttaaataaaaatgttagtaatctttaatcgcattgtaattaatcaccaaaatcattaggggcctagatgcactttcagcgctacgggacgcaaaaacccgataccctcaagctcagaaaatgctttatgcagttctgatggcctcgaggaagctacgccattactttcaggcgcatcgggtttccgtggtaacgtcctaccctctcggtcgggcagatcctgcacaaccgagagggtactggacggactgtgaagtgggccatcgaactagcggagttcgatctgcacttcaaaccacgacacatgataaaaagtcaagtcctagctgactttgtcgctgagtggacaccaatggacgatcccgacctacccctcgacccttccccctccgaaggcggggaggacccgaacaccgacatcggggtaatgcactttgatggttctttgaaccttcaaggtgccggagccggagtcacactaacctcgccaagcagggacgtccttaagtacgtcattcctctcgatttccgagcaacgaataatatggcggaatacgatggactcctcgcgggattaagggcggcagcaagaatgggcatccgcggcctcctcgtcctgggcgattctcagctagtggtgaaccaggtctacaaggagtaccagtgcaccgacctgcagatggacgcctacgtccgtgaagtgtgacgcatggagcgccatttcgacggactcgagctccgacatgttcccaggcgcgacaacgcagtcgctgatgagctatcgtgtctcgtgtcagcgcgagccccactccccccaggagcctttgaagaaaggctcacgcagccgtcggcgcgctcggattccccgagggtgcctgatgccgaaatccccacccgacgcctcgcgagccatagtcctcggggcccgagggggtcaaccccgaccccccacgtcaggtcgcctagatggccgacatctgggcatacctcgacaatcgcactcttcctaaggatcacgcggaagccaaaaagctcgtgcgcatctccaagcgctatgtgctagtataagggaccctctacaggtgcggtgccaacggagtcctcttgaagtgtatctctcgggagcaaggcatcgagctcatcgccgacgcccatgagggagaatgcagggcccactcggcctcgcgcattttggtcgataaagcttttcggcaaggcttttactggccaaccgctctccaggatgcccaggactgcgtcaggcgatgcaaggcttgccagttccatgccaagcaaactcatcagccggcccaggctctgcagctcatccctctctcttggcctttcgtggtctggggtttggatatcctagggcccttcaaggcggcccgtggcgggtaccaacatctgtacgtcgccatcgtcaaattcaccaagtggcccgaagcttacccgatcatcaagatcgacaagcattcgaccctcaagttcatcagaggcatcacatcccgatttggagtgccgaaccgtatcattacggacaatggcacccagttcaccagtgaactattggtgactactacgacaacatgggcatcaagttatgcttcgcctcacccgcccaccccaagagcaacaaccaagtcgagcgcgccaacgccgagatcctcaaaggcctcaagaccaaaacatacaacgtcctcaagaagcacggggactcttggctagaagaactgcctgtggtgctgtgggccaatcggaccaccccgagtagtgcaacaggagaaacccctttcttcctgatatacggcgccgaggcggtcctactgtcggagctctccctaggctcggctcgagttgcgctgtacaatgaggcagatcaggatgggctccgtcgtgatgacctcgactatctggaagagcgaagaaggcgcgcggccctccgggtggcgtgctaccagcagagtctgcagcgctatcatcagcgccacgtccgggcccagttactgcaagtccatgacctcgtcctccgccgcgtccagtcgcgcttaggattgagcaaactctcaccaatgtgggagggagcatacaaagtgatcggcgtcccccgaccaggctcagttcgattggccacggaagacggcacagaactacctaacccctggaatatcgagcaccttcgccaattctacccgtgatgtcatgtgtcatttcttttgggctcgggccaacttccacacacccctcgggctgtgcgggcttggccgggggctaccaagtgtcaattcttgtatttcgacatcctttctagcaataaatctttctatttatttaaagccatcacgtgttttctcgttcccttcctgagttttatttcggcttgggagtggttcgtgcttactctcatccctaggcggcgtcgggcaacctgaaaagcgccggaggtagcccaaacgtgggccgtgccccgggccgcggcgaaccccgggggctctgaagggcacactcgatcgtccccgacccccggtcgccgcgactccggcttggccagtcccgctaagcggctcccccgaggtgacggctctgcccctcgccatcagggtcccgagtgctaagcgcgagctcctttccccatccgaacaaacccagggggaaacggaaatagcattccacccgctaagaaaataattggcgaacctcccgatttttccattgcaggcattcacagattgaaagagtgcaagcaagacgaggaaataagatttatgtacatactgggggcggcacgaaagcctaaagtcatcaagtgttcatcacaaagacacagcaaaaaagaagaaagggggcagtcatcgggtgcccgggcctccaagtcctgcgccgctgacgacctcgtcccagtcctcgccaccgccatcgctgccgctgtcttcgcccgagggtagtgcgaggttgaaccgaggggccgtccccatgaagatcgacacaatcacatcggccgcctcttgaacctgctcccgggccaccgcctcagtccccggagggaagtcttcaagcatgcaccaggggaggaactagggatcgtgggcttggtagctcgctaggatgagctccaccgcggcccgcgccagggaagccgacgacgacttgaggaccgtgtcaacctccccctgcaacttctccaggtcgaccgccatctcgtctagccagtgtgcgagcgctggactagtagatggtaacttcttgtcccagcacatcgagatgcccacccgtcgtcccgcgcgctccagccgttcgatggcgtcgtggaggaggccgggccccacgtcgttggtgagacgaagggccctgatctccctggcttggtcctgcatcaggcgttccagagcggcgagtgcgtcctgagccgtggcgagccggtcagctagatcggtgtcactgcgctgctcgcgcgacgccagcgccttctccctaacctccagctcggacgcccgcgctgccatcgctgcgcgctcggcccgggcgccttccaggtggcgagcctcgcggccggctacggcctcctcacgctacgtgggatggtcgcccagccgccgtgccgccacctcgcaacgggtgatctcagcctcgcgctcggcaagtgcggcatcacgctcccgccaagcctcctcccggaggcgcagttcctccgcgcgtcgcgcaaccgcggcctcggcggtggtggtggtgcgggcatgctcggcggcggcctcctcgcggaggcggagggtggactgcgcccagtccagctcctcctgctcgcggtgggtgcggtcgaggacctcgacccaccaccggatcgcggcctcagactcctagatggagcgagcgcgcctctccaggtcagacgcgcgttcgtccaaggtcctgccttgggccgccagcgcctcctcccgagtccgcagggaggccttgacctccgacgccggccattcctgggccgcgaccgtgttgaggaccccgcgggcggcctcagcccgctgcaccaagtcctcggcgtgggcctcatactgcaggcggatgtcgcccagcgcctcgtccagaatgctggaggcgacgagggccgcctgccactccacctccgtctcgcgcatgatggagtccagcgtctcctcgcgcgcctggatctcagccagctgagcctggtgcatcttgcgccctggctcgaccagggcatccacggtgcagcgcccctcctccactcgtgaacggtctgccgcgacctgcgcccactcggcctccagggccacacgctcatctgccagggcctgaacttggacgttgagcccctctcggacagtggagtcggcggcggcgaggacctgtagaaatggctccatgctcacgggaatcggagtagagaagggcggggtccaccctcgtgatgacggagtctagctggtcctcccacgggattgcgggctgcgctcggagcccctcctgcgtgtccgaatccgagggcgccccaagtgtagaggggtgtgggtgctctcagcaccctccacctcgggaccacgagccgactcggtctcagccttgggctcgcgctcgggctcagcctcgacctcggcctctgggccgcgctcctcctcgacctcgatttcagggccacccccgaggtcgatctcgggggcgcgtctggcatccccctcagcctcgctcctggagccgccccgagggggacctcagggccaccgccaccgacccccgatagcgtcctctcctccctcaccgggacggtctcagccatggtggactcagagtcggacctagtgtgaggccctcgggccctgctggagggtcgtgtggtgtccgcggtcccggtttggccggcctccggccaccccgacctttcaggcttagatccccggggagactcactgtcgagccccctcgggaggggatttcgctgcaataaaatcccaggggcgcctgttaaaaaaaacatagagagaaaggcaaagctagagtgaagagagataacggaatcggaaggcggcagatgtacctgcgggcggggagggggggcgtttgaaggtctactccggggctcgatgaagctcccccggcacggctccgtctgccccatcttccggagcctcttattcttccgctccggctccgccgcggcgggacgcttgtggctggtcggtggccggtcgactgtgcgctcggcgccgccgccgtgtggatgggaaggcggctcgaacccagaaaccttccgcttccctttcgggttggcggccgggcctctaccagccccgtggctcgggccaggcgccctggagccaccaccgccggaaccgccagcccgaccgccgcccgcggccacattgctgctcccagcgtcgtcgccgccgccgccgcccccagcggcacccctgcgggaccgacctccggcggtgccaaccgccatcatcacggctaggatactctctcggtcgcggtcgctgcagaggggaaggatcccatccgggatcagcatcggctcgacggtgtccaggctcagcacccgacgaaccaccgcccgcgcgtcttccttgccccaatccaagcattggcccacatgggtgcgcatcgggtcattgtacccagtgtaggcccacgcgccgcgggaccattcttgaaggggcgcgatgcggtggcggaagtagtcgccgaacaccatcgtcgccgtcagtcctttgctccgtaggcccctaaggcggtctaacactgtgtcgtattcctctccaagctccgagaccgccagccagccagcggatcgctcaggtgggccggtggggagccggagacggaggtggtcatgcagcgcggtgtagaaccaatccctcttccagtcgtcccacttcttgcggaggtgggtctcgatgtactgccccatcacccccgcgcggggctgaaagtagcatcctcccaccaccgcggactattgcagctgtgggatgaagaagtactggaataaccgcatggacggcctcaccccgatgaacatctcgcataggtgcgcgaagatgaccaggatcatcatggcattgggggcgaggtgcagggcgtggatctcgtagaagtccaagacctcgtggaagaagccagagaatggcgggattagtcccgccatggcaaaggacaggaggtgcacggaccgcttgtaagttcaagtgccttaatttggttttggtgattaatgacaaatctagttatatgagactaacatttttgtgagcttttgtttgactagtctcatttggatatgaaagtaaaaatgattagaggaatgtattaaacttcacatattctaacttggtctctcttgtggatccaaaatatagtgtgagctccctcattgatcttgattgattatgtgcatatgtgttcctttatatccatatgtatgcacatcttgaggaggaggttattctatattttgtttattataagatttctatcttgatttgaaatcatctttcatctcatctctctatattgtttatatcggattattatctatcacaaaagagagaaaagattgaaagatcttggattaaacaatttgtgtaattgttgctttggtgatagatgatataccgatgtttatgggattaacccctcttttacataagttttaaacaaggttatttcccgataatgagatgtggtagatatgcattctttggtgatggaccttaatcatgacaaggatgaaattcatggagataaagcgatatgtatcacttcttatctcctacttttgataggttcatatatatgatttccatgttattgttatataagtgtgagactaatgtttacttgagtcttatcttatttagtctcctttacattgagaacatggagatcatgaaggtatgtgttttttggtttatttttatcattgctacatgccttctccatgtgtataggataaaccccattggttcttcataacttatgcatacacttgcctctcttgtatatttatttgtatgcatatatttagggggagcaaatcctatacatttattgtgcatgttttagatccacgttgttcacctattatttatattggatctttacatttgagcttgcatacgagtatatgacacttgcgatgttaatgaatactgaacaaacatatccatatctttcatatgcaaccggttggtcaccaagtggaggatgacaaccgatttgttggtactaatgttcttctttgagatgtgcaaaggaataggtctaattgtgatgaggctaatggatgacaccttgggttgatggtcaccaagccaagggcatcgccgtgtcgacaagaatgaaatcaagcttgtgatgagaagaaagtcctgacaaatgatggtaaataccttggtataaacatggttgaatcaaatggtcacaagtgttgatctcgactcaagcttgaccccaagatggatggcgcaaggcaaaggtataatgtagctaagaatgttttcttagtcttttcccggtcttggtgtttggtgtagaccggatttgctagataggcggcgtactatcaagaggggtctatgaagcgagcttgcggatgatcttgtgccatattagctcatatgcatgtaggtgcatttggtgggcttgtctagccaagtgtgatgagttttctcaagtcctaaaccaagaaagaagtgggcatgtccaataggagtgagtgacatcttatgggtatgtccggtggatatcctttggagtgtgagccctttatccttgacttaagttgtgtttcttggatggttttttcatgggttggatggtcctttgaataagctttccatagagtccaagaacgccaaattccgagacccgagtcaagagatatcgccgttttactaacggtcggttgagctgaaaagtgacctgcggtctgaccgtgggccttaggccggtctgaccggacctgttagccggtctgaccggcgtggtaaggccggtctgaccgaccccactggtctgttgcactggtctggtttttggtggcgatacagagccgtggacggtctgaccggctactacactacggtcagaccggccaggttgagtgggctcaatgattgccctgtaacggctagttttctagctgttacaaagtagtccggtctgaccggccactctatggcggtctgaccggcggagcacagagttggggattttgactccaacggttagttttggttgttaggggtatatatacccactccccaacagcaagggcaaggttttggcactccattgcattatcttgaacccttgcaagagctctcacacccttgtgcacttagtttatctagtgaggtgttagagagtgagttgagccaatccaagtgcattgcttcattgttatagctagtgtggcacttgatcatcctcggcaagcatcctagacttgttactcttggaggttgccgcctcctagacggcttgtggtggtgttgcccggtgacctctccgaggagattgtggaggaggcccggcaccgtttgtgagtggtttggagttcaccaccttcggagtgaaggaagaactaccccgagtgatcgaggcttgggtagtcctctccgtgggccggctcccgccttgcccaccccttgacgaaggcgacgtgcggtggcttcgtggttgagcggtgaagttgggctcgcctcaatggggattaggaaaccggcgagtttccaaacctcggtgaaaaattccttgtctcttgtcttatttatttgttgcatttacatttgtgctatttacattcatagagacatatttgagcctatatcacttaggtttgcaaaacttaacttagttgcttagttaaccttgcacctcaccttacctagcaacttaggttagttttgtttaagtgccattaagttttaaaaccgcctattcacccccctctagtcggcctccttgatcctacaccgctccgggtaccgcagccgcggccacggctcctccgccctcacgacggcgtcctctggcatgaatttgcggacaaagctcatgtgcttccccgacatgatgcacgaggccggaagaatggcgttgccggcgtcttgtgccatggtgaccgaagagagtgaacaggggttggatgagagatgtggtggttgaggagagagatgtggtggttgaggagagagatgctgggggctgaggtgcaggaatgcgagagtgagaatggcgaaaggaagaagaaggggtctcctcctctcccccttttatactcgcctcgtctgggcctgcctcctcagttctctcagtcgctgctgccgcccccttgattctcgcgcccgctcgtcccactcgccccgctcgtcccactacgtccatgtcccgcattcaatgcggctgacagcggcgtaaccgacgtgaggcgcgcgatgatttcggatgtggctaggcgggcccaccgataatctcgtttcgcgcacctgacggacgcgcgaccgatgcgacgcgaagcgataattccggatgtggccaggcgggccctccattttcccagattgcacgcccccatgcgtggcgcgatcacccatgggcgacctgtcatcatggtgagcacttaaagctgcccacatcggtgaaggctgctcagattccccgcggggcccaccatcacaagacggaggttattaggcaccgcaccagaccgtcccaggtggggtgcggtcggacgtagtaccgggggctgctgtcggtgatatgggcccgggggtacccacgttagggggaaggagcggaggagcccttccccctagccacgtgtaagcagccgagaggcgccctgcgtccacctaggggcctcggggtaccccgtcgcacccctcgggcccaaggggttgtgccaccccgaggcccccgctcagctgccactcggcggctaagtgggtggaggagggggcgccgctggcgcatttatgaacggcgtcccaaccacccacgcaacgcacgtcaatcacttggaccggtctgtgaccggtagcagatagatgggacgggtggcagcgcacccacgccccgccctgtgtcaggcggcgtaggggcaggtatgccccatcccatcagccattagggctcagcacgcacgaccggtgcattcctggtagcatgagcccacaaaagtcttcaaggcttaatgagggaatgacaggggatgtcccccgtgtcagatgggagacggcgctgggacccaccacggagtaagcagccatattgcttccggtctaaggcataagcgggagcagaacctgaggaagagggaccccctccaagaaagataagacgaatagaggcggtgcatgtggtatcctcttgaactataaaaggaggaccttacccgccgagcaaggggacgacttttgatagcttgaactctaggggaagcacagttaggttttcccaggagcccaaaatctcttgtaagaacttaagcatagttccacacataggagtagggtattacgcttccgagcagcccgaacctgtataatctttggtctcactcctgatcactctcgacctcttgatcgctcgtgccctatcccctggccgaactcacaaagggggatctcacgtcctcccgctagatagctagggttactcctcgacaatagtcctttagtatgtgtcatgaaatataagtatacatgaaatgataaccgtgcaaataagttgagctctatctataatatctataaaatagttttattgggaatataattaatttgatatcacatatactgtaccgagtatcaaatattgtagggttccataaaaaccaatttaaaaaggatatgttaaatttaacttgaggattgaaattagatagaattaccctagtcacgtaaaggatgttccatcggaatatttaaaacatatcgtcaagtctctcaggacataaaattcaactcggcaaaataatttgccacacaaataaacggaggcaatgctttattgcctctataatggtcctagttgaatatttaaatcaatataaaaaagttatagcaagtccctgatttcattgggatcaaatctaaattaaattaaggcaaatcatttgtgggaagaaatcaataattcaaattcaagtgaaatatttgaattcctaataaaattttcaaatccaaaatgttttcaatccaaattcctagtctcaactatcaatttgcagtcaagtccctcccttttcgctctattattttccttctattcatctctcagccagcactgttcatggtccaccaaggcaccaacccgttcgatctgggtctacccaagaacgaactctctccccagagcaacccagccgcgccgatactgtacatctcctagcgtagcgtcacctccagaaaacccggcgatacgcacttgcccgcgcgagcgtcctgctcccgtcgcgccagggtcggcgccgcgaccgtccctaaccctagccgcgccgcacccatgtcggacccgcgtcgcactgcaccatgccgctcccgtgtgccgcgtcgcgtccactccgccgcgatcccgctcccctgattctctccggagaatcggcaccacgccgtcccgtcgcgccgcgcgcgttacctcgatcgcctcgtcacatcaccacagtcgcgtcgccatcacccatagcacatcgtacggccgccacgtcgcgccatcgtcaccatgctacgccgcgtttgctggttagaaccgcgcatccctaacccaagaaccctaaccacgccctacgccgcgacgtcgcccgtcaccctcaccatgaccccggcgccgtatgagaataccatcgctccgcgccgcctccgtcggataatgacgcgctctccgcaccagtctaacttctagcccagcatctagctcgactgcccatgtcctagccagtaacttttctatattttttttaaaagatcacattgtttattatttcgagaatattttcttcccactgtgcttgtctcaaacacaacctaatactccctccgtatgcagcaatgatttttcgtgtccaattttaattgtctgttttatttttaaaaaaaataaaaaataaaaatataagtagtcatgcataaagtactatttatattttatcatcccataacaatacaaatactaattataaaaaattttaaataagacaaataattaaagttggacacgaaaactcatgaatacacttaacgtgggacagagggagtattctgcatcgtctcactcggacagagatggcggagaagaaccatcaacttactatcacagtattggatttggaccggtctaaagaagcgtatttgtttaatttctgtcttgatttcaagatgccatcgcgagatgatatatccggaagaggtgctatgagctcttcgaccaaaaattaaaccgaaactactgtttcacgtggcgctgaaaatctaaagcgagcagctgttgtttcgacagaaaaacttaatttcgaagggtacttttgtattgccggtaccaggtttaagagtgagtaagctactacaaattattccccgtcagtataatcggtataaaattatagcgggagctaaaccaaaatgaccaagagcaactaagataaatttagggttgggttacgattttttaggccttcttagcctgttgggccttctaacaacctcaaacaaagtctacattagcccctcatctataaatatatggacccccgcccccacactgtctcagcccttgtgtggaagggaggagaaagaagagagacagagcagatatgtcgcgagtgaaagcgcaagatagaagggattaggtttggaactatagctatagtactctatacctagtacaaatagcaagtctaaaattagggtgcattctttttacggaattgctaaccttcagtcgacatgaaacccatctccaaatcttgcagattttgggccaccggatgagcttcgtgattcgtgccccaggccttctcctctaactccggcgacctcctcatcttctctggcgctgatgacaccctagactccgacagagaactctacggattagggtcccgggttggggtggtgatgggaggaggagagggaagaggggggagttcgccggctttagagggatggccgtaggaggtggcaacccggcggtgggcggtggcagcattatcaaagccgcggggtcgaaagctggcagtgcgccgatgtagatgccaggggcaaagcagaagggcgtgttaggaggaggcggccggtgttgtagccccgttgccggagacggggaagacggtggcgcgccgccgttggcttaaggaaagaagaggaggagagggaggggaaggagaaggggaggaggctggctgggagggggggcggcctcaccggcaccgttggcacctttgggccagccggcgtagtgggcggcagcgcgatggcggtgggggatcgggcggggcgagatggaacccgcgaggggagtggtagtggcggaatgcacgagcttgagaggaaagggaggagagagttagggttgaggttttgcacaaatcttaaaaagcatatctaacggtccaaaatttgaaagatggaaggtgggattttctatcaacatatatgtagacagtcacttctttttaaattatgggtttaggtgattagctgcacacaaaagtatgaaacaagaaacgtgattagcttatagttaattaagcattaattattaaaaatttaaaaaatgaactcattttttaaatcatcctctatatatatgaagttttttacggaacacaccatttatcaatttgaaaaacatgctaaaaaaaacgagaagtagctataagcttaattagctatttaaaacgcatcctagattctcaacgcagcttacaagccaagaagcagcaaatgaattgttggaagaaaagaaaactgatggtgttcaggaggcacgacgacttccacaaaccatgaaatagtttccacatatatagttaacatttaaactctctagtctctagacagagaacatactacgaaatgtgaagagtgcaattggagcttgttaattcgaccacgattaacacgagttgccatctgaagcttgcaagagcacaagcttgtccgttggcggccaaaatgtcctgggttgctgatgaaggacgaacttagctagcaacaaaatagaggctcaacataaggctgaactcaacctctgcgctccattttgtctttcttcatggcctcctcggcatccctgcaaggagaaaaaaaaaagcattgtactacagaaacagaaaaatctctacatgggtcccccttcccacttatagcacgaagcacaggaatcattcaaatggcatgcaagaaattttcccgaaacggtaactaggcacgcatgcacaaaggcaccagggagatcacaagatgctcctttcctgagaagcaaaaaaggcttgcatactaacccgattccacatttataatatacattcttttctactgaatctataatatagtgggctcttcacaggatgaagatccagaataattaccttaaagctttctttatatcttcatttgcagggtccaacttcaagccatctgcaaaagcttcacaagcttttccatagtcctatacacaaaagaacagatcaattttttgacaaataaaatcgaattttaaaaaaaatgctcttttagtcttttttacctttataaacatgaaagctgccccttgtcgatagcatgctttgggccaactgggccgcaacattctgcacatgttagcatcagcaatagccccaatgccggttgacaaacgcaaccagcataggctcctgtttgctagcagggttgccttatcatgagcacttgtgctaagttctattgcctacagtaaaagtacatgcaacttttagcaatacataaaatggaatgtattgtttgtctatattactcacctcaactgtaggtctgtagctattatcatgtcttgttaattaggtaatccaacaatgctagaggtagggatgaaaacggagcggatagtttccgcccgcttcggagaaaaacgaatacggatacctttcgtatcagataattcttagatagttcagatacggatacggatattttctccgtcggatacggataataattcggatatccacataagttatgagacatacccccatttttttataactctatgaccttcaatagacatttttagattttaattgtagttcatctcttatcactagtccacactattaatactatttaaatttttaaaaatatttataaatcatactacattttatataaaatgagctaattatatatgttgatatttgtttctattagaagttgagttggttttcgtgttatgagaaaaatttgtttccgtattcgtgtccgatcatattcgattattactcgtattagagataatctatatttgtttccatattcgagctgtctgtatttgtttccgtgtccggcaaaaaatatgaaaacgaacatggtatgagcattatccgctccgttttcattcctagttagaggtagtatactggtagtattgaaacaacttttttaagggtgaacagagagctacaatgttgacatgaattgtctccaaaaaaacaacacatttaggcactaaagatgtgttgcaatgtcttacgttagtgtagtgttgtactgcaagcgcataatcatttctctcgaaagcctctctagcttgtaatttcagttcagcacttttccttttagacagatcattatcctgagaacaaaggattatcagtaagaacatgcatgtataactaataccaatatgaagctgcatctatgaaacgattggttaacaaatatcacagtcaatgattcacatatcttgcataacctgtaaaatatccagtttgatattccagtactactgctttgaaatcagttactcaactacgaactagtaaatatctgtgcacagcgcataacaaaataacacatggaaagaactctctagctttctataaaagctgggccactcaggccttttatccaaaaaaaacacatgaaaataaatgttccatattactctaaaattgctttaactgttcacattcagtacaacaacaaatatatactgttgtgttgtgctcatcagcctcatcataaccataaccggccacgtcaaatgaagaaaaatacataaggaattaccataataactctcaggggaaacagaagggaagaaaaatacatgagaagctaagtttgcatttgaggtggtatgttactaatatccatgtttgtgatggcactagcctgattttccaaaataattgatggggaaatggacgaaaaagataacaaagctaaaagagttcaacaataatacaaggaaacagaaggtggcaaatgaattggcaagctcatcaaa

SEQ ID NO: 9074 - DNA, 12642 bp, Oryza sativa
tcacctaaccacatttattgcgatttggctgagcgtgtcacgccgcatgtaacgcagtgtagtgcactcatttatccggtctgtgaccagtcacagaccggtcagatcgcgggttaggtggcgacaggcgatttgacgcacgcctcgccccatcccgtcaggacgagggcttctaggcgctcgtccccagctggagctagcgtgttacctcccagagatggcacgttagtcctggtcagatatatgccaggcttcatcctaaccattacaggcaagatgttgtgtgaagaagggcgaacatgtagattgctaagctgacacgtggtggacaagaatgaccgacgtgactggtctgactccggtcatgtcgtcagcagacagtcacgattccacgtcgcatctgctcccggcgaaagtggaggtagttgtgagccgtcccatcagaaggtgactcggacggcaactatacaaatctccgtccatttatgaaaaggtaggggaagtccccacaaaaaaggggaaaatggtgcatgtggtatccccttaagatataaaaggaggaccttgcccacttagagaggggggactggacttttccagattaggaacccagaacaagggagaggctgactcatactttgtagcttcttcatacgcgaatccaccaaaaacacaggagtagggtattacgcttctcagcggcccgaacctgtatacatcgccggcgtctagtgtgcttccggtctggcgaatcttccacagattgggagcttagagtctcacccagggtccccggccgaaccggcaaaggggggccagcgcggtctcccggtgaggagccccacgctccgtcaaaatacatctcatagtaaaaccagataaccaaagcaagtcataaatcaaaagttcaaaattaaaaaaaagaaatattggtagctagccacgcaatctacgtaggccaccatgctagttaacttaataaagtaacagaaaaaggagtctccacatttgctctcatggtctagaaattctcacattaatcaaaagaaaataagagaaatagaaaaatcgaaggagattaggattaggtagaaacgaaaaaaagaaataaaacatctcacgacacgggaaacagacaatgtctttgaaataagtgtgaactggaatactcctataaaccaaatgtaatcaataagtactcgtcatgccaataaatacatctcatagcaaaacacgagataaccaaagcaagtcataaatcaaaagttcaaaattaaaaaaaatatattggtagctagccgtgcaatctgcgcaggccaccatactagttaacaacataatagatatatataccatgccaataatagattcggacaagtacaagttgcatagaaaccgtcaagcagcttcctcctcccagatatcaaatatacatacaaatgtcatgtcaatgcagtgaatctggttcctgtgtttctgactttcaggtgcaactactgcttgacgtttgtggccacccatcagcttacatgttctagctaagatgatcgagacatcaacgaaacagaagtcggcgaaacgtgagaactcatgagctgaacgaatcttctcttgaatgatcaatcagcagtcaaatgctaaataagtaggagtatcaaggaaactgcatccagatcagtggagtagtttggatggaatcctcttcttcgagatgaattaatgcattgaatcttttgtttgctgatgtcatcaactgaatctgaaagctctgccagccagtcgatcacctttgaattaatctttcttcacacaattgacctgaaacttcagtcaataaaaactgtatttcctcgtaggaaattaagcatcactgttgtgtgatggaggtcagcagttctgaatattcggtgcagtgcaacgaagctgatcaaccacacatgccatgaatatatagtcaagctttcaacgagctagctacgacctggcttgctctcagatcgatcgacaaacttgaatttgtaaggttttgggtggcgttccgcggatcggaaccaccaacctattttggaatccaaccgtctctacttgcgtaaattcaaagaggatctcgttgattttggttggacgtatgtgtacattcaatttacccgatgatttgtgcaagcacattttcaacgttgctgtaagatgcggtcgggaaaaacgaatagtaacagctgatcatacctaagacttataatttaattttgtcatgtctgggaagcttccaacatctagcagttacagcgctttcagaacctttagcccccaaacagtttacatccttacgagcaagatcatgataaaatgaaatacatatacataaggatgtaattttaggggcacatgacgtcgagtttgcccagggccctcgggccctcgggccctcgaaaatatagagtcggctttggtgggtgcatcacttgaaatccttgttcattatccatgcatagatctgaattttgaagtccgggtaatgaggtatttcttatttttagcaatggactgcataacaactacacagattgacaaatcccacagattcttgtgtaaaatcaaaggtgtttttaattattattctgtgatgaacaattgggcattggagattattggttttgttatttggaatttattcacgaagtggttttggagatgattggattcacatgtgatcgtaggattcaatatgttatgtgaccagtcagaccgggctctggtagccggtcggaccggcggcatgcgcgcggtcagaccggccaacccgcggtctgaccggccgacactgtgtcggtttcggtttcgggttgtttgtttggatatccgtgattattttatgattatgacttctagatggatactatacgtatgtaatactgttgtttgctactaatgaatcaagttggagatagcttggtctcggaatatggtttctttgtttgttccatgtgtaagtgactcgatgtctcgggagagtatttgcggtgatggaccgagagttggcttggggataagaccacgtccgtggtggtcagagatcatgcaggatacttaggctagagttgatgcacgtggttgatggagattccatatggcatacgatggagttattgtgtgcgtatggaatgcggagtaaaatttggaaggagtccaaatttggtacgattggttatgtaaagtttctttcttgtactagagggtttcctaaggtatctaggactcttagtatgagtttagttcgtggctttaggctgcctacctcatgtataaatagagggggagcgtgaggcttcccggtatcgcttttgagagcaattgagttgagttttgagttagggttttgagtttactcgaaatttttgttaggagtgctgttggtgcactttgtaaacacagagagaaacaataaagtcattatctactttaagagtttttcgatttgtgtttaccgggtttcggcggtcagaccggcgggagcacggcggtcaaaccggcggccgcgacagcaagcagcagctgatctcggcggtcggaccggagatataatctctttcagaccgacggcaaccaggcggtcagaccggcaggacaactttggtcagaccgcgatccgtcgatttcgagggcaactttttttccgctaaaagtttttggtttttgggtatactaaccattcattcccctctggttggcttagttcttgtgattcgatcctacagcttgatgacatataacaacgttgctaaatcatcctagcacatgccaatccgtatgcttatatattaattcttgcatatccacaaaatcaataagaagggaatataaatctattaattaactggacagaccctccatcgttataaaatgtgacaagttacccattctaaggaattgttttcgcatgtaaactgatctccattctcattgatatatttcgtccttaatcagtactccctctgtgttatattacaagtcgttttttatatttgatcaatttttttagtcgtttttttatatttgatcaagtttatagagaaatttagcaacatctacaacgccaaattagttatattaaatttatcatttaatatattttgataatatgtttcttttgtgttcggaatgttattatatttttctataaatttggtcaaatataaaaaagtttgacttgagaacaagtaaaaaaaacttataatatgaaacggtaacttataattataatatgaaacagagggagtaggtaaccctaatttcttgggcatgacttaggcaaagctgtcggggcaaaaaaaaagaaatgatggttgcttcgtagagagtagggtagaattacgtagctagctcccggtcaactataaatgtctcgtccttcacccgcaatattaatgagcatgtcatctttccgtttcaaatcatgtacacttagagtagcctaattaaccttccaaaaaaatgatttctccgggccatatatgcaaaggatccaaaatattgttttcttctatgtattgactttttgtatcggtctttcgaagttgtccgaatgtttgctctttgagaatacgataagcaaaggccgggattgattcaattatctaaaatcagtggcgaagccagaagggttggagggaggaccaagccgttgcttcccctcgagaattcactcataatcacgttgattatgtgatggacttaggtgtattaggcctactttgacttagcaaaccattttctagcatgcatgcttggtttggcatttgcctctattgttaagcacctatttgccaatgattttttaaaactttttatatgcaaaaggttttttttttcgaactatcaacccaaacattttattatttacaagaggattgaaatcaatatttgcttattattatgttttatcatctattcttatatagatacaatccgccaattgcatttaattgcaacaaaagagctgtcgcatttagccgtgtcatcaaacgtatttgcgattggattaaagtgtgtatgagttatcaaccattagatcaatgtttcttatagtaaagtagtttaaaaaccccaatgcaacgcgtcatattcactattgtttttataatcgttatcactcagcaagttggccttcatcaatatcttaattctggcttagccactgtctaaaatatgtgcaaaggatctagaagacctaacaacccacatgacaacattcgtggatcacgagaaccaaaagatgctgtaaacaaagaaataataatgcaaactatacatgtgtacgtatgtcggacataggagacatgaaggcagcaattgtgcgatctttcaggaattgaaaattacatgttttaatcttaatcaactaccattttaacaaattaataaatataagctcaattggttatgtttttttatagtgaaatcgtggctagatttaagttctagactcacaagtgcttacatttacgaataattatttttttagtgacaggtgacacatcagtcgatggtgatatccgtagtgatttcatcaatctcaagatatattggccagtctttcaaaaatgaaatgttgttataggtaggatctacgtatatgttttcatagtagtgagcattcacacgttgtgagcggttgtgtttatgctgtgtattaaaaaaaactaattagtgaaaatagcaactgcaaataaaaatatttcaaggcagttctgtgcacaatggctcggtgcctggcaagggattttggagtctgcttatttcagctacgggctgtaagccaaaaactaattttaaattttagaattatttttagtttttatgttgtttttgttactcggactaaaattaattttctttcatcagttacatgtacatgtcataatttaatttaaatcttggccgagaacaccggggcgtgcaggttggatgacagacaccggtgtttggcgggtcgcaggagcaggagacgacagacactgaagcgtgtttgtttaaaataaaattgagaagctgatgcaagaagacaggaacaaaattgttgcttgtgcccctcaattaggccgtgtacaaaataaagagtccgaggtggactcttaatcatttagagacgaaatagtaaagaccattatttttattaccattctttcctttaattttctccattctcatgcaatatgattaaattttaagagtcaactttgagtggttgttatgtgtagcaactattttttcttttcctttccaatctctttcatatcaccaaatttacttgcatgataacgaagagagcccgttattaaacatcgttttacatgctctagtttcaatcgtatatatatatatatatatatatatatatatgatgaggtcaataataatatgtgggttcaaacttttcataaatatattagttggaatctttctattttaaggcatcaatgagttatcccatccaaagattccccagcttacgctctactccatcggtagtgctttgcaataccacatttagcttgaagtattgccagttcttagttttattttaacaccaagtcttaatagagtattagcaaattggctgaattgttttgttatttagtgatgatcagctaaccaactaactttggtcagagttgtggctagtgagtctatattttgttttctatcgtttacctgagtcataagctagcgcgtttttgtttcgcttatgtttaatataaaaaaatggcttataaacaatttaaaaagataatagtttatagaaattttgcatacatgttcatagcaaaataaaaggaaatgttaaaaaataaactatgatataaaaaccttaaaaccaactgaaaattaaaattaagttttaaaatttaaattcccgattatgcatataagctaaaggctaaaggatgtggatgcagaatttagagccagagaggaggtgcagagaggagggacgcccaatatttctattgccaaactgaaaaccctaaacgcgagccagatcgatcacaagtgctggaagggactcgtaatgcgaaacctaagattggcatctcaaataagcaaaagaggacaaatcagaagaaaagaccaaggtggtttcagtggcatctcaaaatgcttaattttaataccaattatgcataagcaagaaggtgatctcgtaggataaggctcactttacataatttaggctcttaacacatagtacatactaacttttttaagttcaaatatacaaatataggtgcgtcatcttaattgggtgtttttctgataactgcttggagaggttgctgatattttatttatattgacttgatatcgtggaagagtaggtagaaattcaaaatcagcgtgctcatcgtccttactatctctaggacggcctgtgcaaaataaggccatactacaaaaacaaggacaagtccttggtttaattcatagggatggtatttttactatgcatggttctgcctctcatagtgttttcttaaaaatcctaatgcatggttctgcctccgagactgttttcttttttttaaagaaaaatcctaatgcagattccagaaggaaagttaaattgaggaactcttagtagcagagagttgacgaaatgaagcacgtaaaataacaagttaattgaaagcccatgttaggagcccaacatactgcagatgggccagctcagttgctcaaccaagccacagcccaatcaagtcaaggaatgcaatacaaaaggcagtagcagcaagacatccaagtatcgagcagatcgatcagaacgacggcggcggcggcgatgtcctggttccgggctgaaacctcggcgatctctcttctctacatctcctcctacctccagcttcctctccaaggtctataagctttcagaacttgtattccatagtttcttcctttcttttcccccaaaacaattgttacttgtatggtgtatccttgctattgaattggaagaagtgggtttctaacaatctggtatcagagctgctcggttcatgggatctcttgtcatggaggtgttgggatgacagcaaggcaaggtgggggaagattcaggcaagggaggtgctcatggcattagcgcctgcaacctgttcaatggaatgtctagtcagtatgaggtgtccaaggaagaaattcttcttgtcatgaatgagaaggtaactaaggaagaggcactgcatctaatacaagggttgagggatgccaagcgtcgaatagatgagaagctagatcgattattggagatgttcggtgtaaaggtagacggggaagcaatggggttgaggaattcaatgcctctactaaggagctcaaccccaacacagaggctgcaatatcttcatcaccccaggtaacacgttctccgatgcccaccaagtgttcgacgatttgctccaaccacgacaccatgcctcaccgtggctacggtggttgcatgcgccactgcttctgtgtcatccatggagttggtggttagtgaggacgcaatctttgatccctacattggcatctctaaccatcctaaggagacgcacgccaagtgttcaacggtcgtactcaatagcaacaatggcattgtccagggtgtgttcccactcttgcttggcacactagacattgtttcagcaccggggaagtccacaccagtcatggcattgaagacatcaatggaagatgtcaagaattgtccagggccacatcctcccataatagaatcgagagctagtagatgtgagttacaatcagcaccttggccaacaaataggactggcaccaaggtgcaattgatgtctccatggccacaccccaagcaaatggatgttattgtcagcaatattgatcttcagccaatgccatggccttcattcaatttttatttgatcaaaggtcatcaggatttctttgatgcaataggagaatcttatcatctgcttgctatcaaggaactatggaattattctttgcttgggatcttactgtgcacgagaatcagcacaaagagcttacaacttgaaatagcaagtatgttaatggagcttgtctggtttcaagaaggagaggtgctacagtgattctatttgactggaagaagtggaaatttgtgaatcttggaggatatattgacagtgcaattcctatcatgcaaaggtgcctggctaagcaaaaactagatatacatgtagggctgtcaaaaaagctcgaggctcgtgagcagctcgagcttggctcatcctaggctctattcgagctcggctcgagctccatacgagccgaactcgagcctgagcaaaagctcgcgagctttaccgagccgagctcgagcttctactgagcctggccgagcttgactgtgtataatttatattgcatgttcaccttattaatataataaactaatagataaatatatatatatcactatctatttacaaaataaattagcatgtgttagcacaatatatttattttaatcattttatactcttttattagtgtgattagctagaaaataattatacttatcaagatattattattaaaatatatattatactacttatggccgagctcgacaccgagctcgagctcgactcgagcttgcctaaaagctcgaaggtgcaataggctcggctcgagcttgtgtcgagctcgagcttaggcaaacgagctcgctcgagctcggctcgttgacagccctatatacatgggccttggattgcaggtgatgagaatggttcacttgatttattttgggattgctggccccaatttttttcctttcaatggcagcaaaaatggattggtgtgcatgtgttcagttttgtgtatcctgaaggttccttactcttggttaattttatgcaagatgttagcaagaatggcataatttcttatgacattgaaggaattgcagaatgtactcaaataaggtactttgcatcattacttcttgatattgcaatattgcccacagaaataatgctcacagtaaggcattgggcagtgcatttgatgctgccatggcctccaccccatgagaatagcattgtgctcttgattgatgtgcatgcatttgccaaattagggatagcaaatatggttgaagcaaaggaagaaatgaaattatttgttgctaagttatatgtactggacctgagttgtgcaactccttctattggtcactttggaaatcatggtccctttcaactcttagtgtgcaagatttggcctcaattcctgttatggaagatatggtcctctgaggcagaaataaagctgttaattgttgggcatcctaaacagtacatcgaagacacgattctggtgttagtggaagttagtttgtatgatttgggtggtaattgctccttctttgaggcagaaaggggtgtactcactggtaacaagcatttttatggggtgcagttagaatttctatctgacaagctggtgcaactaattttgtctcttggagaagtcaaggacatcctttttataattatgttgtttttataattatgttgagttgtaggggccagctaccatgtaatcattttggtcatggaattggctttgcaaattctgagactttgagcagcctgcttagtgttagaattgccaaggttgggtggcatgagaagatattaagtgaagggagtatgtcttctattactatgacagcaatgatatggaacatgcagaatgatatggaacatgcaggagcttagaaagaaacatatgctaaaaattatagatgcttgttatgaaagttggtccacaaggaagtggattgatgtgacaagaaaatggctgcactggatgctgggaggtggtgaacatgcaagtaatttcagttggtatctttgttggactttgaaagttgatattaagctgaagaaattattgcaaggggcaaacaagattagcagcaagctcaaaaatggaggggacatccgtgaagcttttgagcagtaaaaaatacaagagaaatcaaaggtggaagtttcaaatttcaaaagttcacttgacatcaacttggagacaagtcgaatttgaaggagagggaatggttaggaactcaacaggctacacatgggccggctcagttgctcaaccaagccacagcccaatctagtcaaggaacgcaatacaaaatgcagtagcagcaagacatatccaggtatcaaacagatcgatcagaacggcaacggcagcggtgtcctggttccgggttggaacctcaacgatatctcttctctacctctcctctcagcgatctctcttctctacctctcctcctacctccagcttcctctcaaagtttccagaacttaacttgtattccatagtttctttctctctttttccccaaaaagattgttacttgtatggtgtatccttgctattgaatcggaagaagtgggtttctaacagcccatcacgtggcagagcctcggcgaaattcaaaggtgtgtggagagcccatttaatttcttattttcccctgttttgcgtcaaaatagtccctaacttccagagcttcgtcgctagtatctagcagtagcaggtgaaaatagtccaatttaattccctcaaacttgttcgaatctagtatcctgaacaccaaaacaactctctggcagcattgaaggtgtcgcacgtaggttgagggagttatgttggagtttcttcgtagcagagtacaggccgaaatctccctaaggtttggctgtcgtgcggacctcagggcccaggccgatggccgagcgcgcacgtcccttttcttctaagatcctctctctgtgccacactgccacacagcaactaattaccactccttaaccgtaaatactgataagcatgaaaggatttattttcacaactaattaaccgtaacatttgcatcatatacactggaatgtaaattaacacaacgtctttatttttattttctaccgcttgtttaaccatacaaaatcatcaaaacatgcgtgcatacatggttgatccacgaaacaaaacggcaccaaaccaaagatgtgtgaaacgaagcagcacacaagaagaagatcatggatcgggtgatgggctagtagaaaacaaaagcaccacgtacgtcgatcttctgtcagtggatgagtacagtaactagcagctagctagctagctacttcccttggcgtgccgcagccgcagcagcagccgcgtcgtcgggggtcttgtgggcgtcacggccggcgacggggtcgccgtgcccgacggcgaccttggcaacctcggtggcgggcgtgccgggcctcgccttgtggtagagcaccaggtagccgaggacgccgaagatgccgaggccggcgagcgccatggtcccgggcccgtacggcatccggccgcgctggtgtagcacctcccctgggccgtggccgcgtccgggcgggcgcatggaggcctccaccccggccgcccggacctcctccgcgctcatcttgtgcgtgtcggtgttgcgccgccactcctccgtgccgctcttcgccatcgcgtacgtacgaattgcactctcgatgtgtggttttctcctgg

SEQ ID NO: 9075 - DNA, 19749 bp, Oryza sativa
ccgtcagaagttggcgctgccctgcagtccgaatccaccccgcgcgaatcctcttccctttggatcctctccatcgttcctgagtaagacacgagtgcacgcgtctccggggtataaagaagaggaatatgaactcaagaaagaactcacctgataatttagttgacgtgcacgagcgcgggtaataggaccatcatgctgtacatggaggcggcgtggatgtatcgatggtgtacatggggggaacgtggatgtatcgatggtgttgatgtcctcatcatcctccccttcttgcatttgagtcgtcctcgactcaagctcatcttcttctcccaaatacagcttcaaatctgcaatgttaaatgtgggactaaccctgaaatctgcaggcaaatcaagcttatatgcattctcattaatctttgctaacactttaaatggtccatcagctctaggcatcaatttagactttctcaaattaggaaatcattcttttcgcaaatgcaaccaaaccaaatctccaggttcaaaattcaattcccttctacctttgtcaccagcaaacttatacttagcattcatgcgctctatgttttctttagttgtctcatgcagttttaacatcaactcagcatgttgcttagcatcaaaattcagtttttcagaagatggtaaaggcatcaaatcaattggaggacgaggcaacaaaccatacacaatctgaaatgggcacatttttgtagtagaatgcaaggaacgattataagcaaattcaatatgaggcaagcattcttcccacatcttgatatttttcttcaaaacagccctaagcatagtagacaaggttctattcaccacttcagtttgtccatcagtttggggatgacaagtagtagaaaacaaaagtttagtccccaatttagcccacaaagttctccaaaaatggctaagaaattttgtgtcacgatcagaaacaattgtgtttggcacaccatgcaagcgaacaatttctcgaaagaacaaatcagcgatatgagaagcatcatcagttttatgacatggtatgaaatgtgccattttagaaaatctatccacaaccacaaaaatgctatcacgccccctcttggtcctaggcaatcctaacacaaaatccattgaaatatcttcccaaggaacagtaggaacaggaaaagtcatatacaaaccatgtggatgtaagcgtgacttagccttttgacatgtagtgcagcgagcaacgaacctgccaacatctcttcgcatctgtggccaaaagaaatgactagcaaggatgtcatgtgtcttcttggcaccaaaatgtgccatcaaaccgcctccatgcgcttcctgcaacaacaacaagcgaacggagctagctggaatgcatagcttgttagctctgaaaacaaacccaccattgatgacgaatttgttccatattcttccatccttacaatgcagcaacacatcattaaaatcagcatcatgcgcatattggtctttgattgtttccaggccaaaaatcttatagtcaagttgtgtcaacaaagtgtatctcctagacaaagcatcagcaatgatgttctccttccctttcttgtgtttgataacataaggaaaagattcaataaattcaacccatttagcatgtctacagtttagtttcccttgactacgaatatgcttcaaagactcatgatcagaatgtatgacaaattccttgggccacaaataatgctgccatgtttctaaagttcgcacaagagcatacaattccttatcataagtagaataattcagaacaggcccactcaacttttcactaaaatatgcaacaggttttccttcttgtagcaaaataccacccaatccaatcccactagcatcacattcaagttcaaaagtcttattaaaatcgggaagttggaggagaggtgcatgggtcaacttatctttcaacatgtggaaggcgttctcttgtgatgtgccccaagtgaaaggcactcccttctttgtaagcgcattcaatggtgtagcaatggtgctgaaatcctgcacaaagcggcgatagaaccccgcgagtcctagaaaactccgcacttgtgagaccgttttaggagtcggccaactctgaattgcctcaaccttggcttgatcaacctcaatcccctgcagagttacaacatagccaagaaaagaaactcgatctgtgcaaaaggtgcacttctcaaggttaccaaataaacgtgcatcacgaagagcattaaaaacagcacgtaaatgattaaaatgttcacccatagacttactgtaaatcaagatatcatcaaagtagaccaccacaaattttccaatgaaaggacgcaaaacctcattcatcaacctcatgaaagtgctgggtgcattagttaaaccaaaaggcatcactaaccactcatacaacccaaacttcgttttaaatgctgttttccattcatcacccaacttcatacgaatctggtggtaaccactacgcaaatcaactttggagaacacaatagagccactcaattcatcaagcatatcatctaacctaggaataggatgacgatatcaaatggtaatgttattaatagctctacaatcaacacacatacgccatgaaccatctttctttggtaccaaaattaccagaaccgcacatggactaagagactcgcgtacataccttttatcaagcaactcatgaacttgacgctgaatctccttggtttcctcagggttggttcggtatggcgcacggttgggtagggaagcacctgggattaagtcgatttgatgctcaatgccgcgcaccggtggcagccccggtggcacttccttgggaaacacatcagagtactcctgcaaaatgttagcaacagcagggggcaaagaatgctgcatatcgtgaagtgaaatcaaagcatctttgcataccaaagcatagacaactgaaggtgatgcaatcaactcattaatatcagatttagtagcaagtaagcatttgggtttcaaattgattgtctcaggtttcttgccattagattgggcttttttatcactctcacatttggatttggcagccttagcaacatcatcacgcaaaatatcttcaggagacatgggatgcaacacaattttcttatcatggtacagaaaagagtactggtttgacctaccatgatgcatagaatccctatcaaattgccatggtctacctagcagaatattacatgcttgcatgggcacaacatcacattcaacaacatcatggtaatttccaattgcaaaattaatgtgcaccagttttgttacctaagccttaccactgttgttcagccattggatgtagtatggatgtgggtgcggtttcgtgctaagtgaaagcttctccaccatctcgctgctagccaagttgttacagctacctccatcaatgatcatgcggcaacaacgctctttgacgacacactttgtttggaacaacgtgtgtcgctgattttgctccgccttctccatttgtgcgctaaggacacgctgcacaatgaggctctcatagtgatccgcaaatgcagccccaatgcgctcttccggtggtcattatctgcatggtcagccgcaagcaaagcaagtgtatcatcatcgaaatcactagcagaggagtactcaccatcgtttttgactaccaaaactcgcttgctagggcagtcacgctgcacatgcccaaagcccttgcaacggtggcactgaacatctctcgttcggcctgtggatgccactgaagaagcactcagtgctggctgagcagcctttgtcgctgacttgtcactagatggaggaggtgctgcccgactggttgcgggtgtggaagatggagaagcagtacggccggccggaggagtggtgcgtgtctgccatgatgaagttttacctgcagaaaaaatagccttggcactagcacgtcgtccctgcacttccctttcagccttacaagcaagatgaaacaatcgggtcatattagtgtaatctttatagtctacgatgtcataaatctcgcggtttaacccacccaaaaatctagccatggcagcatcctcagtttcctctaaattacaacgaagaaagcccatttgtaactcctgataatattcctctacactgtctcaattgttgcaacctattcagcaagtcacgtgcatagtaagaaggaacaaatctagcccgcatgacccgtttcaaagcatcccaggtttgtggcatgttattaggatttttcttgccatgttctatccatcaaaccaaagcaaaatcggtgaactcactagtagcagctctaactctagtgttctcaggaaactcatatcatgtaaatttttggtcaacagcaatctcccaagagaggtacgcatcaggatcatattttccatcaaaaggaggaaacttaaatttaattttagaaaaagcatcatcattgttgcgtacctcgcgtcgacggcgaccacccatacctcgtcgattgttgtgtagccgtcgatgatctcgagcatctcgatcatcttgctcagtgtcagcaatatattcatcctccaaattatcctcgacgtactctccgtcaatgtcatcgtcattacccccaccattgcctccagcattgagagcatcaaaatgcctcacaagtgcagcaaggctagtgtcaatgcgggcgaccgctgtctccagccctgtaagcttagtgttggtgaagatctgcgtggactccaattgtccaatcttctcatttgtcacctgcaaatctgtctcaagtctttctgtgtgctgcttcactttccttgtaaagtattggatggtgcctttggtgcgtggggaatgagatgcaccctcctcatctttattctctggacctgccatgatttagaaatgaaggacaacaaaacaatggagtatgtaatgtaagccctacacaactattgggatttagcttttgcaagatgctcactctcacttcactcgcaacttgtctcacaagctcttaccagttcttaccttgcccacaggagggggacagcaacccataagttagcaaccgtggaacgaggtgtatcggtgctgtagcaacaagacctgtcaagctgtagtcgggtttgtggtggagctgttggtgggctgaaagcaatgctcaagagaaaactagaaaccacgttagccaaagcaaattgaataatcgctcaagggtatagtgtacagtgctggtcctaggctagtcgaagtagagacgcgagcctaaccacaaaggacgccacaaaacacaaacccaaacagcaacgaaaacaagaaacggtggtggaaggtggtgacaaagggggaatggtggggtgtgctcgctggatcctcttttttttttgcttgctctctctagtgctgaggagagagacacaactttttttttatttttattttatttttctgatatttttttcacaaccaggagcacactggaaccaaccacagaaaatcttatctcaaacggacaaagtatgaagcttgtagaattttttcaaagttctatgcgaataggtcccgaagcttctcgccacaaaaacaaaattttgcaagaggaatttggcaattttaaatttgccgaacccggcgaagtgggggagaatcggatgtaactttttttttagatgtccgtggatatattataagcctaatttcgagtccgtctgaaaaagatatgactgttttaaggaaggtcactcgaatcagtgttctatttcttttctagtggcggcaagatacaagacaactcacaaaagctatcggcaacagatcaaacacaaatagaaagtgatttggtgggtgactgcgacggcaatgacggtggtgatgacggaaaaattgatgaaggtggcgatgtgcggtggtggcaagaactcgaaactctaatcgcctaacactaagaccagcaaattaacacaaccgatgcaatcgaaaactcaacaagccttaactaagcagtactagtaaaaaaaagcacaatggtctataggatcacgggaaaactaatctactatttttttttgttggccttttctggactataggaaaaaaaaattaatgacgaagggaagggtaaattctctcaccgatgaaccacgctctgataccatctgatgcgaacccgctagggtttgtggcccgatctttcgatgagaggtaagggataactcgattggatgaagacgacgttcacggcccgactacaaccgtccaaagacgctgcgccttagcaaccgatacaccgtctccaatggtcgccgcgaacttgtggtgcgcgtcaacccggccacgagggcactcgtcctgcaagcaatcgaagaacaagcaagaacaagtagaacaagcactgaaattgctagataaagatgaaagtttcactatcaaacacaatatggtggggttccgattacaggcagacgggcggtttagccaacacgcgcgctgcgagccaatagcaagtagctatctctatcatcaaaacccgaatgttcttggcggcgactagaggtataagaagaggggaagaacgaccatagggtcgtgctccaaccctaggacgcgcccctaatgggcccaacttggatacacagcccattgggccaaaagaggtgatgcagcaccatggacagaaaacagtcgggagtaaaatgacaattgcggccgctccagaacagatatggaaatgtagctggatccatttgaaagtagacttgataagctttccatgaagtacttgcacgcccaaatcggagttcgcatgaagtcatggcggccgtcagaagttggtgctgccctgcagtccgaatccaccccgcgcgaatcctcttccctttggatcctctccatcgttcctgagtaagacacgagtgcacgcgtctccggggtataaagaagaggaatatgaactcaagaaagaactcacctgataatttagttgacgtgcacgagcgcgggtaataggatcatcatgctgtacatggggggacgtggatgtatcgatggtgtatatggggggaacgtggatgtatcgattgtgttgatgtccgcatcactttcctaacatggtaaggctgacaggtggtatattggaatagaggttaggacaaatttcactaaggtttctctgctagttgagctgaaatattttcctttctaacctggaattctggagccaattttttcaatgagagggatgaaattgtcacatcttgattttcttcttatgatttataaattatttaataaattattattagaatttatattaaatgttcattaatttacaagtgatgttaaatgtgggaaataaaatttcctaaatataaagcatggctggatttaattttcattaacttctccatggttaattatactctctgaaattttcctggatttttcggagctcaattcctaattttaatgatacacagaacatttcagtaattaatcatatattaaattaatcataaaatggccctcttataattttgctaaatatttatggtgttcaagtactttcatgatttttcttgaaattattcgagcattggaagtattttttaacaattcaaagatcattttggtgattaatttaattggaaaaagtaattaaattcccccttttccttttcgggccgaattaggaaaagtcctctcactctcggcccagtctcctctcagcctgctctccctctctttcccgaagtccattttctatccttcgttcaatcgggccgaggaaaaggaagcccagcgaaagtctactttagctcctcagatactgttcatcttccagctccagacagagcccgagcccgtcctgtgcctgtgaagccgacgccgttttctccacaaatccggcctctcctttcgatcttttccgaaatttgttgaggggatttgtttcacttatcctcctctatcttttcccccaagaatcggactttatcccgaaaaaatcaacgcggaatcgagctcgattcgtgtttatctctccaaaccaaaccctagaaaatcccggctccgattctctcgttgtagggtcaatctctagctctcgtggctataaatagagtctcctccctctcctctttcgtttgctaccctcgcccgagctcgccgtcgcccgtagcaccctaaccgcctccaccctagcgccaccgccggcgtcgatcccacgtggttgccatatcatcgccttttcagctgccgtccttgccatctaagtgtcacgtcatctctcagatcccacggggctgccatctaaaatgttagatcagatcaatccgagccatccaattttggtcaggccaaagttgatctcagccgtctaaaatcaatataaatcctgttatcccttttcaatggcatattagttctttttactatatatcgtctactaaattcattccaataattttcggaggatgctttagtcttatatctcagttataaattatttgtaaattgtttaattaatttggaatagtcttttctttaataggtttaattggaattaatcttgtaaaattcataactaattcatatgaagtcagaatgaggccgttcaagtctctaaattcatctaaaatcatgatctacatgtttgtttactttttatgtattatttatttggtttttattagtctttttctctgttttgcgtgttagcttgtcgtttccgtcgttgcgaaggtttgtgaatgcgtcggaagtattcaagaagattaattgaagaccgattattgcaaggcaagtcacacagatcccaaacaaaatcctttgagcatgttgatcctatatttaaattctctatttatttcaactgtgcatttattttcgaatgtcaccgggtggtgtgaacctattcctttgttatggccactttgcattgattactctattccttgatacctcgggtaataaattgattagcttgaaccttatatattagtttggttcagctaaatgctatatatatatatatatatatatatatatatatatatatatataattgcttagccatgcttagaaacattagctcattaatgggatgaatcatactacattattatttatgattatatttaatggtatctcacgatagttaatcgtgttatgataattaattgataattaaaacttgtcaatggtgggttgtgagcacatggttttgtaggtcgtgctcatgacaattaaggaccggttcgcgagctactgttgtgagacattaaccgtaccaaccacaagccagcgtgggcaacggctttaccttttgtatagcatggttcattacggggtgctagactgagaagcggcgagaagttcatgggggtcgctggggagtccatgcctctggttatatttatagagggggtgattatgatgcaggaatggtgcactgtggtgagttgtgttgtgcgaggggtattgtcacagttcctttccgaggtatcgtggtggtattgaggcgcatggtgacatgtcgtggagctgtgtcttgtgggtacagtggtacacctcaggccagagtaaaactattcgaatagccgtgcccgcggtcatggacaagttgagcaatgtttttcgtgattagtctcacacctctcacaataattattgatgctataactggtaataatttacttaactcctggtttggagttagatctgtacagccgggtatggttgttcaggatggttgggcctgagcagcatgggtgtgttgttcagtgttgaataacattgattaattactctactgtttttcaattctcaaatgcttgttaaatgctgcttttgcaaatgagcctatattacgccattctttggtatccttgtgcacttgcatatttgctgtgtggcttgcggagtatgtcatatgctcaccttgcaataatcaatcaacctcagttgaagaaaaaggatccagaaggagaagacgtttggcttataccccaattgagctgcctatgggagtggagctgaagcaatcgctagaccgttattcggctgctgtttttcttttggtttgtaagtatgtaacgttattattatgatggatttgtatattaaattgtcagtttgtgtacctcggctgattcctggacgaggattctatgcacaacttagttcggaaattactagtgaatttctgggcgtgacagaaatctaccttccatagttttctaaggtgaagaggtaggctaagtaactggttgggaagccttgaacagctcctaggaaatccagcaacaactgttgcacatcaatgttttcacaagcaattgagagaatttgagttttgtgcgcattgttcttgagactagttgctatgccaaagtgttccataatggtttttagattggataattcctgggctgttgggtgcaagaagaaagctacatcatctgcaaagagagaggttctaaacctcaaaggtccaccattgagtggggataagattccgtgatgctcagcttgttttataatgaagttaaggggctccattgctaataaaaatagtaatggtgagagaggatctccctgtcttaacccctttgcacgttgaattgcttggcctgggcatccatttaggatgatcttagaggttgaagttaaagagtgaatacatccagtttctccatctcagcccaaagccaaaagttgttagcacctctattatgtattgccaacttacagagtcgaatgcctttgagatgtcaagtttgagcaacaaggtgggtgttttccttctatgcagtctcttgaccgggttttgcacatacatgaagttgtcatgtatagctctcttccttatgaaagcactctgattagtggaaaccatctcttgtaatattggtgctagtctatttgccaagattttttatattattttagcaaaactatgaattagatttatggtgatgaaccctgagttcctctcgacactcaaggctgttgttggcccgatcttttggtgagttgtgataactacgatttgggagaaacgttgacgatccgactacaaccgtacgagacgttgtgttgcgccttagcaatcgatacacctctccgtgggttgttgatcttgccggtgcagatcaaccctattcctgcaagcaaatcgaagaaacaagcaagaacaagataaaagcaatcttatattgcaaataggaatttaatacaaatgataagttggggttccgaagaacaagcaaacggacggtctagccgacacgcgcgctgcaagcaagtagcaatggcaaaattttaatctatcaaaacccaagaaactctaaaggctacctagctatttaaggaggtgggaggacctctaggtcgtcctccacctagttggggcgcaccccacatgggccccacttgggccggggtcccaaacaaagttacaagcccattggcccatgacaggtgacgcaacaacttgtttttgtatttgcggccaaacaagatggagtctgctgataaagccagatctgttggaaagaggactccgagaactttccatcaagtactcatgggccgaaaacggaggtcgtatgcagattcggtagccgtttgaagtcagcagtgtagcaggtggccgaatcggattccagcacttagaggacttgatcttgatatcatcttgttcatccatgatgtgagctatggttgtatctgtagtagccatggtcacatcatcctccccttcttcacggaaaaccatcctcggcttttccatatggtgctcgccacatagtccattcaaaataacctatttcatccaatcaaaactagagaaactcgatgttgtgtgattagcaataacatgtttctctaaatccgaacaaatgaaaactctatgcaccaaatatattcctctatcattatattcgccaaagatatggaaaatagcattagttggacatggcaaatcagacttagcatataatttctccttcaaattatcgagctcacaaaaatcatcaaaatgaatatagcccaaaatattgaaagaagatctcaattcactctcctctacttcatcatcaatgtgaacaacatgtttaaaatcagcacacaatgaaacactagatatagtatgttcattcactagttgtggcatggatataagtgaagtactatcgcacaactcttctttatcacaaggaacagaatacaaatcaacttgtgacaaaggcaattcagaagtaggttccactaaagtttgctctaggtcagcatggaaagtggaaaaatgtaattcatcagaagcatactcaccttgagtaatttctgcaccatttaatttaccttttatgccctcttcagataatgtagctgcatcagccatctcctcattcgcgagtgatggaagtgacatctcaaacatatcgttcttctcattttggagacttttctgaacttcctgcaaaacatcagtgataggaggcacaagcatatcttgttgctccgttggattctccaaaattttgcactcaacaatgcaagcaagcatgaacaattggcctatatgattatatgtcacattaacaagcccagcctgaatattgaaattaagccctctgaaaaatctagtcattgtgttctcattagattcttgtaaaccactataagtgatacaaattttaaaatcatgaaagtactccctaacagttttgtcaccttattttagatgttcccatttctcaaggagagcacgtctatagtatgaaaacacaaatctttttctcatcagtattttgcattcatcccaagtttcaagcttattccccacagtatgccaccaaaaagatgcagaaccggtacacttattactagcagccttaatcatttgagcattagaaaaatcatactcatcaaattgtttttctactgctagctcccaattaatgtatgcagcggaatcatactttccatcatagaatggtaacttagatgcaacttgtgcaaaattatagtcatgtacctcatatgcatcacatgaagaagtcgtcatatctcgtcgaaggtgtagaagtcgatgttctcgtattcccttgcgcaatcctgccatggttagtagcaaacaagaaacacacacaagaatatgcacgctcctatcaactactaggtagtggtagctaaaatttcacacacactcaagcttttcaccaagctcttacaagttcttaccaaagcaagcggaatggtgacgtacaccgactcaaccaagcaccccaatggaggttggatgtatcgatgccttggcaaacacttgctgtacggctgcaattaaatctgtggagctctgggtaggcttaaatatgtagcaaaggaatagcaaatgctcaaatcagagaacgcaaagttgaataattgttcaaagtcaagtaccggtaccgtgctggtcctaggctagaacgtactagagacgcgagcctagacacaaacggtaccacaaaatagcaccagaaacaactcaagcacactccgatgtatgaaagcaaactcaaagatacaactaatttttccttttgcttctttctttccttttctttcttttctattttcttttctttttcttttctctttttttttcttggtgcggcttttcttctctttttttatgcacctttctgccctttttttctttcttttttttgattaattttttttaccaaaaacagactcaaggacctcaatgtaagatcacagggactcaaatgtaaatatgaaaattacagggactcaactgtaaagtccacaccaaaattaaaaattataaaaaatggaatgctgaatttatgccggttccgtttttccaaacagatctcgaaaccaacaccaaacgaaatttcaccaaggtgtttgacacaactcggaactgagataacgtgatttggagagggaggagggagtcggactgtcacggtggtggtgggtacggtaagtgggagggttcggcctggccctccacaagtggaaaccaaatccaatcaaaaaaaaaactttccttttcttttctttccttttttttctttccttccaccccaccgaatccaaactgatctgctatattcctctattcttcctcacacacatgcacggcatagccaccaaacagaagctatgcaactcaagaactcaaaaactaaccgacaaaaacttctgaaaactacgaaaatagaatcgtggcagcgagccgattccgttttcgtaggtcccgacgacaacagagacacggaggcgacgacgactgtggtataaaatgtgaccagaactcgaaactctaaatggactaaacgctaagaacagcaacacgactcgacgatgcaacacagattcaacaaagcaaaaactgaaaagaacaatgcaatggcacaatatggctaggtaaatgatacaatttttttttgtctggctattttctggttacaggtagaagaaaactcaccgagaaatgaaagctctgagaccacctgatgaaccctgagttcctctcgacactcaaggctgttgttggcccgatctttcggtgagttgtgataactacgatttgggagaaacgttgacgatccgactacaaccgtacgagacgttgtgttgcgccttagcaatcgatacacctctccgtgggttgttgatcttgccggtgcagatcaaccctattcctgcaagcaaatcgaagaaacaagcaagaacaagacaaaagcaatcttatattgcaaataggaatttaatacaaatgataagttggggttccgaagaacaagcagacggacggtctagccaacacgcgcgctgcaagcaagtagcaatggctaaactttaatctatcaaacccaagaaactctaaaggctacctagctatttaaggaggtgggaggacctctaggtcgtcctccacctggttggggcgcaccccacatgggccccacttgggccggggtcccaaacgaagttacaagcccattggcccatgacaggtgacgcagcaccttgtttttgtatttgcggccaaacgagatggagtctgctgatgaggccagatctgttggaaagaggactccgagaactttccatcaagtactcatgggccgaaaacggaggtcgtatgcaaattcggtagccgtttgaagtcagcagtgtagcaggtggccgaatcggattccagcacttggaggacttgatcttgatatcatcttgttcatccataatgtgagctatggttgtatctgtagtagccatggtcacatcatatgggcctgtaatgatctgccaatgaggcatcgcccttctttggcaacagaccgatgtgagcactatttaattcctcaagctagttttgatttaggtcggtaaagaattttattgcattgaacaggtccagcttgatgcgatcccaacatcttttgtaaaaggcgccaatgaaaccatcaggccaggggcttttttagatggcatcaattttaaagcctgttctacctcttccattgtaatgtcatcttcttgatcctgcaagtcaaaactgttcactcccaggttttgctagttgagtgagaaaactctgttatgcaccgttccaagccttttgtagaagtatgagaatattttttcctctttttcctggtttgaggtggcaattccattttcagtttgcaaggattagatgaaattgtcccttcttcttgcactggctttgatatggaaaagcttggtgtttgcgtcccctctcctaatccaagttagtctcaatctttgcctaattttgattttgtttaaggccgctagtcccagcactttgcttttgagagtggaataaaaagttctctcgtctgtggataggtttctactttcctgggccaagtctagttggaagatgacttcatttgcaattgcaagttgaagtttaatgtcaccaacctgcttcgactcccatctttttaggtctcttgctagtctcgagagctttaatctaaagattgccagggggtttgttgagttcagaggcctatagaaggaggggtattgcagccaaaaactctcaaatctaaataccttcactcttgcttgctcgtcctggccgattagaagcataggggtgtgaacaaaacaaaagctggaaaggggcaagagtcttgagtgctgaaacagaatgtcacagtcaggggtgcaaaaacatcgatcaatctttgtttgtgttgggttaggtgcacgtcacgacggctacctcatctgatcaaccccaaggcaaggatgatcaaggcaaagaaccaatatcacacaacgagcagagaaggaagtctgcgcgggagagacagcctaataaattgtataactcgagtgtgtggactcagtgatattgggctgggccactgtaagcgagtgaggcccattagcgcaatgctataagaggccggcatggactggattgaatcgaacaatgtagaaacacttttcctgaaactaattcaaatctctcccaattctattgttgttcttccccaaatccctcttcctctgctgctcttgttccagtctcaattccgattccttcctagctaaaccctaattcttagaagtcgtgacaatttggtatcagagccgtaaacctggagaagccacgctacatatctcgattgcaactccaagtcgaagctatggagaagcagaatgtggatttcggcaaggtgctcttggagattcaggagttattgggggcgctgaatcgtgcacaggtcgagactcaagcggtggtcgtccagcaggatcaaggagttagcagttggagacctcaagtggaagctgcggttcaagagctgcgctgggaggtcgaggagatcaagcaacaattggatctcgccagcaaatcacagcaagcttccgcatcgacgctttcccctcgagttccgtcgacggacgaggaaaggaaggcaccgctgctgcccacgccaccgccaacttctcttctggcctcggcggagggtggaagcaaatcggctcaaggccaccattagcttcagagttaccggggaaagacttcagggggaaacatgaccctgggtccaaccccggtcaagggtacgtatgattcacactccttgcagtttccaaaatttgatagttcgggggttgaaggtataatcaccgtgttccaaagttggatttccctaaattcgatgggttggatccccaggactggtgtatgaagtgtgagcactatttcaatgtgaataacatgtttcctggtttgtgggtgagggtagccaccatctattttgtgggaagggctgcatcttggttaagatcttctagggctcatttgcgttttccgatgtggggggatttttgtgctgctgtgtcggagaaattttatcgtgaacaacatgaaaatttgatcagacagatggatagtattaagcagtcgggaacggtttgggagttttatgagaggtttgatgaactgatgaaccaattactagtttatgatcctggggtgagtgcaaaatatttgactcatcgatttattgaagggctgcgaagagagattcgtaatcctgtactcttacagagaccaaagaccctcgaaactgttttgtctgtttctttgttacaggaagaggtgttggagaatcctcaagtttccagtgtcaaggaagtcaagagaatggaaggcaactctagttttcgatcatcaggcaagggaccttggccattgccgcaaccaccagggaagagtggaagtttctctttgatgaatcgtcctgaagagaaaagaagcactgatactgttcgcagtccgacaaattcaacagataaagtgactgctctcaaggcttatcgccgagcccagggattatgttatatttgcgtagagaaatggtcccctactcataagtgtgctgcatcagttcaactcaatgtggttcaggagttgttcagtctctttctggagggaggagctcaggaaagtcaagaaatctcaattctatcatatgctaaagccggtgaactaatggcgatctcagtgcaggcaatacaaggttgtgagccagatgggactatgcgcatgctagggtaggttcaaggaacagaagtgttaattctagtggattcaggtagctcagggagttttataagttcacaaattagcaacttgttttaaagggggtacaatctttttgtttgacaaattgtctgtcagagtggcttattggtgggtcgcctaaactgttgaacctttgattcctcattgtgagtggcaagtgcagggtcacagatttaaaaccactttgagaattttgccttttatcaactatgacatgattttgggtatggattggctgaaggagcacaatccaatgtcagttaattggtctcagaaaactatcaaaattaacttgttgggagcagtggtgactctaaaaggggtttagtctgaactgtctaggtgtgatttgttatcagcaaaggagatgcagcaattgcaacagaaacaagcagtagctcatatggtccagctttgttctccctctcaagctgaggtatctgaagaaatgccaagtgccattcatttattacttcaggagtttgctactgtttttactaagccaaaggggttgcctcccacaagacaattcgatcacacaatacctctgattccaggggcacaatcggtgaacatgagaccctatcgttacacacctacccaaaaagatgagatcgaagctcaagtgactgaaatgttacagaatggcatcatacaacacagttctagtccctttgcatctccaatattgttggttaagaagaaagacggatcatggcgtttttgtgttgattatcgtcatctcaacgcaattacagttaagaataagtaccccctgccaattattgacgagttgcttgacgaattgtccggtgctaagtggtttacaaaattggatttacgtgcgggatatcatcagattcgaatgaggactgaagatgaacacaaaacagcattttgcactcataatggtcattttgagtttagggtacttccatttgatttgactagcgcaccagccacttttcaaggggtcatgaacagtattatgtcctcattactttaacgttttgtgcttgtgttcatggacgacatcttaatatacagtcgcactcttgctgaccatatcaactatctaagggttgttttccaaattttggtaaaacatggtctgaaggttaaacagagcaagtgctcttttgctcaacagaaactgtcttatttgggtcacagcatcagaccaaatggggttgctactgaagaagataaaataaaggctgttaaagattggcccacacctcagtcagtaaaggacttaagaagtttccttggtctagcaggttattaccaaaagtttgtgcgcaactttggtattttcagtaaaccattgacaaatcttttgcgcaaggatcagcctttcatttggaatactgtgacagatgcagcttttcaaaccctcaagcaagcactaatatcagcacctgttcttgcgatgtcggatttctccttaccatttgtagttgaaaccgatgcatcagataaagggattggcgctgtgttgatgcagaatgatcaccctatagcctttctcagta

SEQ ID NO: 9076 - DNA, 9146 bp, Oryza sativa
cctattggacttcacccaagcggctactttttcttcatgagaccacttgagattttcatattttcctcctcgcccatgtcgagttcttcagctgatttgagttcctcaggaggatcctctcttatggccaagtcgtaatccaacaaagctaagttaagacgcatagtcacccttttttcaatatttttgttttcccctctttggtttttagtctgatttacgtgaagtaatacatgtatgcttcatcaattgtccagatctagtagaaatgatgttgttttatttagttgggtagttgggagttggtatcttgtggatgttttttcatcatgttgttcaatatattattatgtaataattttgctagatagatctagttctttttcaagtttgtaggtctgaatatgtgttggatctgtcgtctcttgtggttggatgcatggtatatggttgtgcttgttgcattccacgttttgacaatgtataatgcatattataaatttgctatttgcatagatggtagatatacgtcataacgttagatcctaatggctaaagctgctggtttagttgttacaatgtgtgcctacatgattttcattatgaggagagctaggcaacgccatcactaggattttctatgggccattgatggaaagggacttaattagacaaaccaacccattttttggctgtcatttgttgcgccaaagagagctactgtgggactcttgttaacaatgaaatttggtaagccccaaagtcatcatcggcctagtgtcactatcggcttcagagtcatggaatcgaccgatgggaattatcaagttgtcaatagtaggattcttattatatttggttaaggaaattaatatattaaagaaagcttatccagaagtggccgagttcaaggaggatgtggccgagttcaaagaaattaatatattaattaggaagaatctgttagtttccttttatctttaggaaagggtatttagtgttcaataaggattttatgttttacttttatctttaggaaagtttctttcttgtccgagaaggactactatctacccatgggtataaatatgtacacccggagtcattgtaaactatctcacgaataaatacaactactctcggtgatcgccaccctctttaccgaggtttttacttatcatccggcgaaacttagcacctgatgcggggttgcatcggcttttgatatccgcgaagggtaagtcctacgttccgccggccctggcaattgtattggcttcatcggcgtcgttcaaggctgcatcagcacatccgacctcttggattgctatggttcggttgatatatttgcctacctatttatcatatatcttagttaatctagtcttaatatttcaatttagccgtatcggccgattctcgctttagggtttatgccggtatcggctaaatcgctttaccagattatattagctaaggtatctaccaccctgaaaatcagccaaaggctttattgtctagatattatgtttcttttcatacttagtgctgcatcagttaagtttgatcacttcgcgcttagaaccgtaatctttagcctacttcttgattgccaataagggtttcatcggggtttcagccgatgagttatctagacattacatcggcttacaaggattgcatacaagttagatttagccgattgcaacaaaggtttcagtgtttatctaatcttgtggattttatgacatcggatattcagccgatgtatgttttaacttacggatcagtgcttattctatcatatcattgttagccgattggtttctactggatattattatcgttttattacattaccattatccgattgtctttatattgttatctacattggacatatagttgattgctcaaaaccctattgacatcggggagtatcgacatcggctggaattactccatcggcttgtctaccgatcggctcaatgatctgttatttgtatatcttgtcagttgtaggatcaaactgactggcatgctcgcatctcaacaacttttggacctgcactagagctaaacagatctcccaggccgttgtgttcgtcgacttagttcgcgccaacacagacctagcaccatcagccgagcgcggacttttcatcaacaactccattcacagctcactggaggaacaggttgccatgttccttctagttgttgaccacaatgttagatttaaggctttacaacccatttttagaaggtcaactgagacagttagtaagtacttcggagaggtattgtatgctgttggtgagctgagaaatgatttggtcaaaccaccttcaagtgatattcctcgaacaattcttggcaatagaagattcaacccatattataaggtaaaacaaatattatccacaagttacgtttttttcccacaacctatcctaacatttttcatgccaattgggattgtattggtgcaataaatggaacccatcttctatgtcagcagcgtttaggggtagaaagtgtgttactacccataatgtaatggctgcggtggattttgatcttaaatttacatatgtacttgttggctgggaagggtctgcacatgatgccctcatacttgcatatgccttagagagatgatggccttagtgtcaataatttagagtgtcaataatttagatcttcaggattttttttttgtcatctggtaatgattgagcacattttatcacatgttaggcctcactactgggaacccatttttactactggttcggcaaccccttttagtctcggttgtacaaccaggacgcacaatccggaactaaagatggtaattttaggcccggttatttcagtcaggattaaaaatcgatctataccaaccgatactaaagatggtagcgactagtggctagtgctaccatttttagtactggttggatctatttgcttttttttaatgttttttttgttgcttgctgcttttttatacatatgcatatatggtgcttgctgcccatatggtgcttgccttcaggcttagccaatggctctgtttacaaacgtggcccttctgctcacatggcaattagcaaggcacaactaatttgcttggatagagtagaaaactcttagggcatgtataacggtctttattagtggtctctctctattgatgcaagtaaatttaatgacatggaagaaagagaaaggagtatggttgttatgcatgacaacggctcagagtcgactcttagaatttattagagcaaatttcgttgtatggtggtgaaagaaaggaaagaagagcaagaaaaagtattttaatacattaatgattagagaccatattgtctctaactgttataggatgctagtctctaaataacgtagagctcgtaactaactctacctttgtgcatgaccttatgtcacaactgtttcatgtattatgtgttcccttgtgtaccttctgtttaccattatttatggtacttccgagcgcagatttttcgatatcctgtgacagtttaaatgctgcctgtaagtgaatatgatatgtcatcgtccttagccgcgaaagtaagaatctgtagttcttgtttgagaagtttggtagcctaagttttagtccctggcagtttaaggagtcccccgcgtcgccccccgcgtcgggcgactcgggcggcgcaacccttgccgccgccgccgcccttccccgccccttcctctgccttgccgccgcctgagcgagcggccagcaaagccggcggctcccaaggacggcggcggcggggctcacggcggccatctcccgagctcctggcgcgggcggacgcagaggcggtggccgaccggagcggcgccggcgtcgaggtgcatggtggcagatccagcgtcgccaccactagatctggcgcacccgcagctagatccggtcgcggaggcgccggcacggcgtcggcgaggcgtgggcgcaggcggccacgacaggcggtggcaggcgtgccggcggcgcaaaaggcgcgggcggtcgggcggcagcgtcaggcgcggacagccgcgttagtcggcggcaggcgcgacggcggcgcaggcgcgggcggccgcagcaggctcggaggcgcggctgctttggccggcggctcgatgcctggcggcgacggcagtggtgcccccagatccgtgcctctcggccggatctggagggtgggagcagtcggcgacgatagcgacggtgtggcgacggcggcggcggcagttggcgacggcggtctcggccggatctggacgccggcggtagttggcgatgacggcggcggtgtggtgatgacggtggcggcggcagtgggccggtgacagttggcgacggtggtggcggtcgcggctgtggtggctgccgtgtcatctggcgatggcggcggaagacatggcgtcgggctgctagctgctcggtggtggagggtgacagcacagcggcgatttgcggaggcggtggttggcgtcggtggcagcggcgacggcggctgtgactctggaggcggtggcgacgtcggcggtggggaaggagtcaggggcgaggtggctgggtgttcggcaaccaaggctgtggtggtggtgaccgtgtatacggtcaccggaggcatggcggtctcggttgactagccaagggcgtgggagacggctgcagctggccggcgcggcatcgttcggtggaggggtcggaaaccggcttggcacaaagaagcgcagccgatggcagcagaggccggctcggcgcgagatgcgcgagcggcggaaatggaggccggcttggcgcgagaggcgcggccgatggagggaggctggattgacacgagaggcgcggccggtggagaaggccggcttggcgcagagaggcggggccggcggtggaggaggcgacctaggtgtgaggaggagctgccggtgggtgtggcgcggtctttggcgcaagaaggctggccggcgggggacgccggtgaaggggtcccacatgtcagcaaagcttgtggagtggtggagcatcggtgcgccagccgtgcctttgttggtctagtggcggtcggccacgcttagcggcggccgatccggtactagccttctcctgggcttgtgtattggcgatatcgtcgtgtgggtggtggtattttttttcttttcctggttacgattctccagggttgtaatcttttattttttttcctgctctgttaatagaacttcgtaccgtctcgtgcgagtcgttcaaaaaaaaaagtccctggcagtttgatgtctggtccagagatgttcatccattgcagcttcgtgcactgcacgaaacatgaaattgatcgatgcatgtatataagagtgggaaaaaaggttgtttggaatcttccattccttatttctcgcttcgcttctctactcctacgtgaatctaaaaaccaatttattttggaattggacggactagatgtgtgtgtaaaaaatcgttaacttaccatttcttaggtgttcatttttgtctaaaattacaaatgcaaatacgtttggtccctgtttgacttatatttgacccgttgactactcggcctatgtattttcttttctcattttaattgtaataacaaagagcaaaacattttttcttactatttaaattcgtccaaaaaagcctatttccagaaaaagctttccatcaatagtagaagccccctaaaacttgaaggagaaggtggaaaataaaagatgaaactaacatgttgtgggagcaagagacgatcgcagccgtccatccgggaaccgcgccgatctccagccgtcgatcgggctccacgaccgtttccccccacgccgcccgggcccaccacccccgtcctccttccgttccccgtttcctccctttctctcccggtctcccctcacctctttattacgctctctcctcctccccgacgacgaggcaacccagcgcgaggcgagccgcggcgactagggtttcgtcgcgccttcctcctccttctcctcctcccccaccgccgccggcgacgacaaggtatgcccgcaagcgcgcctctctctctctgtcccacttaggatcccccgcgggtgtctcctgctacgtggcggtgttggatggccgggtggtgtccccgatgctctggatttcgtgcgaatcctagctagtaatattagaggtttttttttttgttattgttggtgatgatgctcatatgctgtagaggggggttggggtgtgctccatgcttcgcggattgctggctctggatgcttcctttttttttcgtgtgtaatgcatcgtttgcttagttgatcgagttgtggtgtgccctgtcgccagacattgccctaatttctcagcccggctgtatgataaatctgaaatgaaggtgtctaatatgtaggggtgtcaccaggaagtgaactcctcgttttgttcaagttgcattatatattttggaaccttatggtagctctatttttgtgctggagtgcggatgtggaatacacgtgtgccctgttataaactattctattatgatgattaggctgttattggttgaagttgggtgatagatttggaactcaacgcgataggttgttataaactattctattatggttccagctacagtttgcagttgttccctaattgttgaccctttttttttcatctgaattatagattgcactgttctggaactaaaattgatgtggactgtggggtcatctttactaagtgctaatcatactaaaatgttttataatcccaattccaagatttagttttctggatggcaacttttttttgatcaagcagtatgagatcagtttttggttgttgcaatactttgtctaggacctgatacacttgagacatagtactgtggcaaacttttatatggtggtctgtgactttgtgtgctgtaacttatacagaaaaccaactattatgtgacagaagaaaaggacaaggagatatctcagctagttatttctcattagttgataatatttttgtactgcctttttggttgactgatcctcatagtaggtatgttgtatggaacaagttaatttctcagcagaatttggtagacatgaaatgatgaatgctcacaatttgtacacatttttaccaagatttctttgcacatttgaaaggtctactggagcgcaaacaatggagcggtcttctcagttgaatccaaatgccactccctttgtgcctcccccaaggtcttcgtttgaagaaagcttgagcggaaggaaggcctctgagaagcaagtaggtgattcagaaaaggatgagactgctgacaagtcttctgaatatgagctcccagattccctttctttggacgactatggtgaaagcctaggaaagctcaacatttctgcagaatcttcatcaaaaggagctgctagtaccgcgcttgatccatcgcactacgaggaaaatggtgttgataatcatcttgctgtggtagaatctctctcgaagatgttcccagatgtgtctgctgacttcattgttgaagcactgagggcccatgattttgatacagaactaactattgatatgcttgctgatctggtatgtaaattcctatttcgatcctctgtttatggcacttctagttattatcaccaagtgttacatcactaatgttgtccgcacaccttacaaataccatgaaactgcatgctgactgccacttttgttgttgacattatttctggcgatatatatttattccaagggaaacatttctaacaatctttcttgttgaattttccacttcagtgtgaaggtgatgattaggggaaatctgctgaagtgtcaggaaagtagcagcagcagtatcgctcttcatccaccttggcagaacaattactcttcagctacatgttattgaagtcaatcttcgtgacaatcaagactgaatttcgtggcgtacatcttattgctgctgctctaaagaattcagtattgtttaggagccaaagcaacaatgaccgtgttttgggtttttagttccgggtggaacagctattttttcagtattagagtctgcttcatgttgatggtttcacccagcagtttatcgtgtgatctgttgcaacccttttggtgtagctgaacctccccctagctaagcatttaggagtcagcaatagtgtgcaatttttgctgcaatgctgtgctcttaccatgtacattctggtcttgctgcattctgtgtagggagatgaaccattccagattctgttatgatgcattatttgaacagaacagatatgcgcatgaagagatatctatctcattgcagttactgaatggagaattggagaccatatggtcatggttatgacttatgaaacctcaacgttatcttatggatatcgtattgctctcgctttttatgcaagttgttgtcgtcaatatttgtatttcgagacgatgtatatatatgtgcagataacctccctctcccgtttcgatgcagataacctctccatcttccatatcgatgcagatagacgcacgctgcacatgtaatgttgttccatgaggatgcgtgacaatgaagcggcaacctttctgctatattggagacccaggggggttggatcgtgccgattatgttattgtgtacatagtagagcagattgtttagcagatttttgagaaaattaactttcacctatgtatgagaaattcgaaacatattcaggccttataatcaagacaaattttgctacaagacaaacatctgctaaacaatataggtcaaagtaattaaagtaattgcgggtcaaacatatgacaaacatcagcaaatatccaataatgtcaaaaatggatatttgctgatggacatcgctcgcattaaagtaataatttccggttgaataggaaagagaaatcgcgtttttgaaatgtcaaaaatgcccttgtgcccacatgttagctcttctatctcttttctctctctatcccacatgtcagctatgacggcaggcaggggaggtctggcggtggtggtgggagggcgaggacggagcggctgcgatgacaggagagtgacggc

SEQ ID NO: 9077 - DNA, 33853 bp, Oryza sativa
aatcgacaacaccaacattgccaacaaaaaaatcagttagaaaaatagaagccacaccgaatttaccaaaataattttgttagtctttttcaggaatttatgcaccgaaattctcggggtgtttcaatctggtagtctttcttttttaggacaaattactgtatagaaccacatgcaccacacaaggcacacatcaattcatatcaacagacccctactacgagaaccataagccttgggaatttaaatgggatccttgaggcattttggccagggatgcagcaaactcaagttgcttctcctcaggccttgaacctcacctcttcataacctcaatgtcctgaggcacggggatgcgaaacatgagggattggggctggtctggtggagtggaatactggacgcctagtctaataaccttggtttggtgggatggaggaacagactggagactactgaggacccagtgagtgccgataagattttcagttgattcccgtcagtatttggattttgctaagaaatgtccaatctcgcattaatagctcatggcaactgaaaaatgaaggaaatagtataactcacttggtccggaatattaggattagcaccagcatctaataggcatttcatgatgccagaaaaaccataatttgctgccatcataacataagtagcaccattggagtctctaaagttcacatcagccccagcctgtataaatgaattattatttgatcagttcagtttgtgtttcagatgctatccagagaaaatgtccatggaatgaaaatggagcttccaaatacaactataagaatatccgtatcaagaaaggggcactgacttggatgagcagtttgacgcattccaatgatttagaagatatagccatattcaatggggtatcatcaagattgaaaaccttatcaggctgttggaagtaaaatgatggaaataaggatcaatagagaactatcaatcatatgcatgcttgcaaagaaattagacagcatttacataaattctgagcaaataggcatctttatttcattcaaaccagttataatcaagtgttgatatagatggaccacatgtaccaaaggcaaaaacatataagttttctgttatacacctaagaaaggaacaaataaaatgaagaaaatattacatctgcatgatggtccaataatatcttcatggtgctacattgaccatgagcagcagccgtatgcaacggggtcccatagagagaatcaaaaacaataccaattcctcttgacagcagcaattctactatttcacagtgtcctggaagagaacatttgttaaataaaaaaaaaactaaattgcaacaaaatgtttatagtatctgcagaagcatatgatgcagacctaagaaatgtcacatttgattcaaatcaattcccctgtattcaaggaaaatattcaaaatagactcaggatcagggttcagtttaccaaccataaaccacttggtaaccagtaaatagggattacatttttaaaatggctggttggttatttgagttctttgtaattgttataggcatgagagacatccgtcatgttaggagcacatatgtctatacaacactaggaaaaaatatatccccactgcctgaaaaaaggggttggtgtttggtgctcgacagtcccctaccctttaccataaaagatgttttctggattgtataatgtgtgagttgatttttaaatcattggcaaaggattgagttattggcacatcagtatgtgccattggagatctgcataacttcattaagttatgacaccagattgtaacataactttattgtacttatttcacttccccatctcttttaagttgtaatctcgtccggtcttgggcttttgtctccgtagtgctacctctttagaagtacatataaactaagttgggtcatctcgaccttccattgagttctcaggacaaaaaaagaaagatagcattctccagtttcatttggctgctgctcaactaattatgtctttaacgctagaattgacagcctgcagcatttattatgttcaaatacttgctcaaattttgactgaaacggtgcaaattctggagccttgctgaggattttcagtttcgaaatgttttttgccgagcacgcgcaagcgcaccgggggggggggggggtgtcggtctgaaattcacgaaattattagaaaatttcctagtgttgacaaatttttgtgatttactagaataagtaccgaatttttttggccggaattattagaaaatttgacaaaatttgaatgaatttgaataaattgaccaaattcacaaaaaaattgcaaaatgccgaaaatttcaggcaagatatgtgcttgcggctggggggggacgaaatttcagaaataaattgcaatccctggccctgctcaggaaaactaatagagtagataatagaacaaattaaccgatggttaatctaaagtgacaaagtatttacacatatatatcaaacatatttttcaaaacatgcgtagtgtgagagagatacctttcccggcagccgcatgaagaggtgatcctgatttaccaacaatcattggatcagcaccatgatcaagcagatatcttgtagatgcagttctcccaaaaaacgcagaaaggaatagtggagtttcacctgataagaaaaggtagtgaatattaagagcttagggaactcatatggtcatataccattcttgccttcaacaatgcaaactacaaaggctcctgctccacaaggtaaaatatatctgcagttattgctgttaaaacaacaaaaatgtggatttatcttcagtgatcctaatgtaataccactgatttgaaaagaactaaagtgtccaactagtaatgcagaaattttgtgcaataaaatacgggaaaaaaaacatttatatgccaatgacattggccataattaatgatattgcaccccgtttggcacccatgaatttgctctagaatcatggaattggaattcaattcctatgacatgggagtttcgaggacagcaagaatcagattggaaattccagttcaattcttagtcagaatataataatagaaaccatcgccgctgcccaagagtcagttcctttggtaattgtttggtgggacctttctttcttgataaaatcattctgctaaattaaatatcgtctcgtctttaatagtataaaagcacagtggattggtgtgtgatctcatattaaaatatggatttgatgcacatagaaaatgaacatgacccctttttgaaaaagcacaacccgatagaatgcattggtattattgtttggaatcaaattcaaattccattaggatatatataaatttgggtccagctctagatataaacacaatgggggaggcactggtatagttgatatagtaataatcatttgatattccgcagcaattcaagctagaacctgaagtataaatttaaaatgcatacattgcattgcacagcatcaaaagttgcacaagcgtgcaaataacaccacaagctcatatagtacgtaaccagcatgaaaccaactgtcgcaggtgaggaatattaaactatatggacacgcatatcgatctcttccgtttccccgggtaggagcatccaggataagtgaacgattcgtacattagagcgaatggaaggggatcagagatcagaacctctgtcgttggtttggttgacgtcgaggcggaggtcctcgacgaggtacgtgaggacgtccatcctcccctcggtggccgccaggtgcagcgcgcggctcccgctgccgccgtccgccacggccgccaggacgtccgcctcgccgcggccgcgccccgtcgtgaccagcccgcgcgccatctctacgcccagcgataagaagggggaagaaaataggaattaatgggggaaaccctaggagggagagagagggttgggtgggtactgactcctgaggaggcgaaggttgccgtcgaaggcggcctggaggagcatcttctcccaccgctgcttccccatccccttctcctccatggcgatcgatcgagcgggcggcgcggagaaggcgaaacgtccagactccagactccataccgaagtgaagtagtagtagcagcctgcagcctgcaagtagagaagacgagcggcctgagcgggggcgatcgcgttgattctgttgcgacggagatgacgccgctgaccccgggcccatccttccacgtcatacggtgctttcttttccttccttcgcccaaaatactagagcaagtttaagtttaatagtatagccaactactagctccagttcatctatagccaatctagtagctcattcatacaatagttacatactacactattaatatctggtcccacctatcatacacacagtgtcttaaagtccgtgctacagcttgctacaaatctatagcccgttgctcttctctcacctcatttatctccttaaaatatatttgcagctggcttatagcctgctattgtacctgctcttagctgtaagcacatgtgaaatagagaagagaagagagagaaggaaaactgcagcacggactccaatatattgtgtgtatgagagatgagaccaaatattaatggtgtaatatatgtttataggtaactcgttatggttacggagaaggtatatcttctatcctatgacttatagaatatacgaatatgatatacctttgcgtacacaggttgcttccatatacgctaaggtaattcaacaaatattatggaaagtatccttacgagtcgggagactaacaaagtcccactcggaggaggtaaggtgtcttctatatcgtacggggtccgatattttcaagttctacatggaaatgattcacggtgtaaaagggacacctcgggaggggtttcgggtatcgaatttcaccaccaacacatcgaccatagcctacaaagccggagcacgtgaagccaagtcaccagaaaatctcgtcgaatccatcgactacgatctcgtcggtacagccgaatttgcctactcctattgtattatgtggttttccatattaatcccatataaactggactagctattagctgataaggggcttgaaccaatataatccttgtattttttcttgcttgatgtcgtatcgtgtagatcctcgtaccaacgtaccctagtactctactcatctggtctacgggtatcacccattgacataactattgtatgaataagctattagattggctatagataaattggagccaatagttggctatactattaaactcgctcttagctgtccaaaattattactccatgctataaagtgtttaatcacatattaaatagcaatattttgggatgaatgcagtaggaagaaatagaatatatagccacggtaagttttgttctatacttgaacttttaaattattcaaacaagaccttaaacatgatatcatgtttgtacatatgtagtccttccatgtatcatagggaaaaaaacaagaggaaaaaagaaattaaaaaaaaccaagtgattttgcatattaaatatttttcaactatgtacatggcatttatttagcatattagttacatatttagtgttggtagctaatttaacttcgtatcggcatattttgctttttcgaatcatcgttgcacctatatttctatatctatacttctatactaatataaaaaggaggagttgtcccccctccaatcctacaggtgaaatcatccggattaatctgcaccgtccatccgcgccgaatacttcgctcctcctcctccagccacgaagacatcgctccacacgcgaagacttcgcttctcctcctcgctcgctcctcctcctccccgcatgttctgccgccgtgccgccgcatcctcgctagagatcctccccgcgtggactgccgccgctagagctgctgattcttccctgccgccggagccggtgcttcttccccgcgtggactgccgtcgcatccccgccgccggagccgctgcttcttccccgccgcagccagttccgacctcggccccatccgccacggccggagctgactttccgccgccaccggcgccgacgtcctcctcatctgctgctgtgccaatcccttcgccgatcccctccatccccatcatctcttgccgctcacctccttctactctaccacacaacccggtgctctctctattgtcgcttgttcctctctccccttggttaacactgaggagtactaactaattttgttttggatgttatagattttataccagaagtccaaaacaacatccatcggtatggagacgagttgtttcagggtgttgaattgcttgccaatcccccttcaattttctgtatgaaatatactcagatcttgtgtcggttcctcatgtcgattcctgtgtgattttctgttgcggagtatagcttcatcaagccaaatttaatgttttctaatttctcctgttttattattcttacgtgatattacttgtagcagctaaaatcaagatgatgtgacttgggtaggttttcagttgtgtttgtatgcaactaaaagttgccaggctacactactaggtaagctggcgtgatttatgtttttttttgcagtgtcatccttttgagaagtgcttctatgctccttgaaaaaaaacctgcacggaaattaaagcacatcaatggttcggattaaaaggtgattactagggtaaaccgtcattagcaaggggcaatttcgaccaggaagtgaaagcccacatgcagcccaggccgatcgatccatcgatctgggaggtcgacacggcaacagggctagatggtgaagatcaccagatcggccgggcatgtgcgaggaatgggagggcgacgagctgtgagggctattgtcgacttgttgtcgttgcgctcggcgttgagacagattatacagtatgacgagatataggaccagttctcgaagggcagtgtggtgtggaagcggcagaccagatggagaatggccgcatcctctacggcggcggccatccatgatgactcaaactcctgcatggtagaatacccgcttcttgtacctagtgaaacctagatagaaatcccaacgattctcctgttttttgattcagtgattttcgtcctttacaaaagctaatccttttggccgcttgacatagatgatgcagatattatctgaatatcattccaggtgcgtcgcgagggaattgccgttgcgaatcgatcgatgagagatggctgggtatggggtgggtatggatatgaacttttgcgtccgggacgaaattgcccctcgctgatgaggtttaccctgttaatcgctttttaatccagaccattgatgtgctttaatttttgtgcaggttttttttattgaggagcatagaaacacttctcttgtatgaatcatatcttaatttggtaacattaaaattctttctgagttatctcctaatttcataccattaaaaacaatgacttttcaagaatcaagttcactgccatgatacaccgaatatagccatgtgagggagctcttgccatcatattttcatgtgccatttgatgaccgtaaatttggttttccaagatgtgcagcaggtaacactgtcgatgcggctgcctttggtggtgttctctgttcaacctgaactacaggagtaatcggtctgctaacacagacctggtctcaaggtgccatgcaactcgctgattccacaagcttatgactgagtagcaggtaaacattttgtccatccattatctgcaaatccacctgtgcaactctttgcttcccaaatttgattgcatgtgttgcatatttttactgatgcagaatcgaatggttttaatgttgtatgtgcagacactgtggcaacaaatctatcccaagtttcctgcggttttatttcatttgcactctgatttaaatgaattacatatgcagatgtcaatctgatttacctttgtacatgattcaagattcaactacagcaattgaaaatgttcttccctatagatcagaaagaatgaatttttaatggtgaggtataacaaagattctagattatgcataattttcttaccacaaaactgaaatgatgtttgatataattcataaattattctaaaaatttgttttgtagatcggtaaaattcactcggaatcctgagtggtagaatgacatcattggtcttatctgaagcaaagtattcaattccctcttaatttgctataggaagccgtttgatactttgtttatgttggtctattggctcatttggaagggaacgtactgcaagaatctttgatcagaagagaagcacagcagcccaactatttgctgacatcaaggatggaatctccatttggaaggaagctggtatgttttaaaacatcagtgagttgtaccgtgttttagtttggagcaagtttgttccatggccctgttaggcttcgacaacacgttctgttgatataatttatacggaattgctaagcatctatcgacagaaaatgcatacccaaatcttgcaaattttaaatcaccggatgtgcttcgcgattcgtgctccatgtgcttcttctccaactccggtaacctcctcttcttctccggcgccggcgaattagggtcccggggtggggtggggtggaggtgggaggggaagaagggggaggtggccgggctcagagggatggccatgagaggtggcagcccggtagtgagcggcggattttaaatttaaaaataaaccatctcgatacttatttctaaacctgaaccttcttgcccactccgcctcgcctcgcttggctaaacaatagtcacaccatccgcacttgctcatggaaaaaatattcatattcaaaaataagttttgggaaggtttatttttaaaactaaaaatgaaaaggttcaaaaaaattaaaaaatatatatctgtgattggtcatatattacatttttatctgttggacttcatatttctaacgagcacggagcctttcagtatgattagatcaattccctgttatactaccttggagttgtatgcttgtgtcatgctcaaacagctcgactattcagcccatccaattttcaaatgatcttaacgactgattgtcgcagggtagagacatacaaagaacaaacaataattttgtttttaaaatagctcaaaagaatatttagtgaaattttaccagggtgaatatgttgggatcatgagttcccaatcacaaattccctcgccgcaccaagtgtgccccttttcaatcaccggttcttaaaaatatgtttgtgtgttttgggtgacattacaggaaaatgcaataatattttagtgtttttatatgtcgaaaacgtgcattgcacgtgcacgattactagtcttagtataatctaaacatagcaagctaagggacctaaacaagtgctattagctttaaataggtgagtttatgccactatgctgctaattatgctcgttcttgctataaacaaggctgcaaaatgtttttttcatgaaaaaatccatttgctattttatatgtcaaggattgacgtgttccttttgttcatgtttagaaatggaattctgaacattgcgtgctcataggaagggctgcatgtgctcagaaaaaaaaattgggagggaacctcttttttttatagagctaatgttcattaaacacctaaaactcaacatgcaaacataatatttagagagaatcccttatatgccactagaatttgaccagttcccttatatgccactcaaaattggcttcttccttatatgccactagtttaagtttttccacccttttatgccactcccactactatagtgttagttgactgttagttaaaggttagtttttttttcataaatgaccaatatgccctctcaactaaaaaacgtgtaaacttcaaaaaatcataactaatttattttaaatcctttttgagtgaacaaaattttatcagaaccagcgaaaaatgctctttatattaaaaatattgttggaaaactgcatgtttcatgcttatattgaaaatttatttgtgatggtaatggctaaaattgcatgtgatgtagaaaaaatcaattttcatatgttgtatccagtagctatattaatctttttacaatgaagttaacggtcaactgacggcaatggcataaaaaggaggagaaacttgaaccggtggtataaaagggagaagccaatttgaagtggcatataagggagccggttaatttagagtggcatataagagattctctctaatatttattagcactcctaaaatctacaagcatgtcacatcaacccattaatcacataaagttcaacatgcaaatatatagtaattgtctacaatttatttcattctaaaactgaacacatacatgctaaatcatcattctcaaatcattttcataatatttcaatccaaatcatttctttgtttttccaatatctaatatatatcccgcaacagagtgtggggcgatgagagtgcactgtaacaaccagtactctagaaccgcttcaatctattatcagaaaaacaaattatcaacatctagctaggacaccaaactagttccattaaatttaacattaaatatattttgatataatgttgtttgtattgaaaatgttattatattttggtcaaacctaaagaagtctgattaagaaaaaaatcaaacgacttataatatgatggagggagtaggtccctaaactatcaaaatgcagattgaagttctagaatttgtcgaagtatgttatttcgatcccaaattgccacagtccctctgagatcctacgggggactaacgtaacatgccacacgaagataaacatggcatcatggctcactgacaaatagagatccacttaaaaattttcctttttctttatttgttatttttattctctttttttccatttcttctccttctcactacagttgtaggccaccgcggaatgcggcactcatctcgacaacctcaagtcatcgccaacaagggaagggggtgacggtggcctagatgtggctagccgcatggctgaggagatgtgggaagggggagggcctcagcgatggcggcccaggcgtatctagcctgtgagggaggagatgcgggaaatgggagggcctcaaagaaggtggctcaggtgaagcatgctggcatggtagagaagatggggaaatagcgcagcaaggggaaggtgaggggtcatcaacctcaagcttctgactcctctttattgttgctgccttctgtagggcggggttcatctggcatagcctcaccaagcttgagttggtgggcatggaccgggcacaagcccctcgatttgaatggtcttggtccattgttccaagcccgatgtcgacaccttctactcagatccaacaacatgcggcagtgagctccctttcagcctctccatgtgagcaggcaagttctagctttgctttcatctctccgtgccgctgacatcgcccctagttgcctctggtcaagctcaccttggcagctgccctcgagctctcacagtctcatcgtagtttgtacatctgaatgaagaagaagaaaacggaaaggaaaagaagtaaaatatttttttatgaataggccccacttatcagtcagtgtagaattgctgaatatgccatgtcatgatgtcaatgtctatatggaatgccacgtaggatcccagagggaccgtggcaatttaataccggaatgacacaatttgataagttttctggacctaggtgtacattttgagagattagggatctatacgacacacccatataagttgaaggactgtccatgtacttctactcttttggtttgagtagaagatgattgtgtgctgccaatgacgtgaggagaagaggtcggttagataactctccttagagcatgtctagtagtgcccctaccccgttcttattgggattactagcaaaaaaccaactccaatctatactttctatatagttggtacccactaacaattattagaagctaaagctcaacatgcaagcatgccacatcatcacccactagcaattactattctagcccatttaaaatcccatgcaagcatgccacatcttcactcactagcaattactattctagcctttttttaaaaaaattatattctagcctattttaaatcccatgtaaacatgatacatcatcaacaagaatgtgtcaaatcatctttctcacattattttctcaacatttcaactttcatcatttcaacaatatttaacatatactcatccataaatcccgcagcaaagcgcggggtatcacctagcattttctcattttactgccaaaagtttggagttcccatccctttagttttcgctttgtgaggaacgtacaagcgggccttcctgatccgcttccaattgcgtgctcttgccgctcaagtcttgtacccgacaatcatgcaggaggaagaggaataaattgatttttatggttagtttcacatgaggccaacgttttctattttagggagtcaatttttggcaacctcttggagggatatttttttttttcacgcatcaaattatgtttagaatttgaaaaaaaccaaaattttagggatgagatttagccaatctcttggtgttgctcttaggtccattttgaaatagaggactggcaaaggaaggattcaattgcgaaagggcctatagtttactagttacaagagcctcagtaccatcataggtcctgggttcgactggtgacgtcgtgtcacgcctagaaattcacgaaccagaatttctaagctgaatgtgcattaaatccctgtccaggaccagccagggtacacaaacggcaattgttgacatacagatccacgtcttacaaaaatataaaagattacaaatgcagcggaaaagacaaaagcgagctaagcctgaagacttgactcctgcaatgaggtgactctattccacaggcatccttgacggcagtgacaaaaccaacttcttcgagacatctccaactgagaagaacttcaactctggggtgggggaaaagagagcaagactgagtactacccactgtactcagcaagtcataccggaagagaatgtatgatgcagggtataaccaaaggaggctagaggttcatttgcataaagctagcatttaaaagcagtagttgaaagcagtaaaacagttgtagcaattaatcaatattaaccaatcactgtccaatgctacaccaggttgcaacaggcccaaccaaccacctgaactataccagttcattaagctaaactaggggtgagactaatcacgatgaatctggtcgatcgcccataaccgcgggcacgactattcgaatagttttactctgatcagaggtgtacaactgtacccacaagacacagccccacgacacgttaccgtgcgccgacatgccaccacgacataccggaaagaggccgtgacaggatccttcgcataaccccctctaaccgatcgcaccacaccttagggttcgcccccgtcatcagcaggcaacgggcagcccccctttcatgccgcggtgaatccagaagccgatcaaccggacacctcggccgacccaactccatcacgcccaccctcgcctgggtacgtcggctagaggaaagctacactacactacaagcccagccgttgcccacgctggcttgtggtaagtacgataagttcttctagggcatcccgcgaaccgatccttaattgccatgggcacgactagcagaaccatgcacccacagcccaccatgtagtgtattttaattaactaacaccattgcagtggcactaatccaaagctatgccaataatcaaagtctatgcattaatgtgattccccttttgtgtactagttgaactaagcatggctaagcatttcctaagccaacatctaatcatttggatacccaagttatcaataacataaggtaaacaatatatggctgagtagttgggcccatcccacatgatattgtaaaacgatgcaacatttaatagaaatacaggacatttgtaaattgggtataatatgatcaatcgtaatgcatgacttgccttgctctcacactgatgagaccacagcaacgtcttcgagaaaccgcggatcgacgaagcggccgaaatctacgcgacaaacaaagcacacaaggaaaacatgctataagactactgaaacaggaaacaaaaccatttttaatggattctatgcatttttataaatttactgagacttgaatggacttaaacggagcttggatggattagatatgaattttagaagattatctgtgtttttactaataaagaaaagaccttaatagatttattgcgcaataaataaccccggatgacatcagcaaggggggcggcgccgacaagcgggccccgcatgtcagcggcacaagaggaggaggaggtggcctagcgggtgggtcccagcagacggtggctcaaaggggaggaggaaggcggcctggctcggctcggcttcaaggcggccggccggttatggtgagggcggctgcgcgagcgcgtcgtctgcgacgacaatcggcggcgagaggcggcggcgggcggtgcgaaaggcagcggcgaccggcgcgaagggcggcgacgcacggcgcagcccggcgctaggagggagaggaagggagaaaaagagggggagggaggcctcaccggggattcggccggcgtgggtgaagacgacggcggacggcggcggcaagcggcggatggcggggtgcgcggggtggacgaggcggctctcgacgtcgcgaggccgacgacgatgacggagtggctcgacgatggccctagcggcggctagcgacggatggaggcaacaatgggcggcggcgcgtggcttggcgtggggagagcggtgcgacggcggtaggggcaaccgagcggcggccgggatagctcccatgacggcgaagctagcagcggcgacggcgtggcgcagcggcggcggcgcatggccggaggcgtaggcaagcggcggtgctagtggcgagcggcgcgatggaggtaggaggcacgagagagcacggcgagtggggaaaaagagagagggggctcgggggaatgttttataggcgaagggggaggcggacgaggccgagaaggtggccgatttggccggcaacgtgggaggtggagagagagaggggggaggattcgaaatgaatcccatctccaagcgggtgtgtgcgcgtgcgggagtggtgggagagtgggcgggcgatagggacgcggagcacaggcggagtggggcacgggaggagcaggggaagcggcggcgtgggcggcggtttgcatagggcacggcggctggaggttaggggtgaacccgacaggtgggccccacctgtcggcgcccagggggagagggggaggaaggtagcacttcgggggaggggagaagtattgggccggcccggtaaggagggaggcacgggaggcgagttgggctggcggcccaaaagagaaaaagaaggaaaagaaaaaggaggaaaaagaaaaaggattttcctgggattatttattgtggtttaaagtttttaattggttaaaattatttattgagctctgaaaattccactaaaaatcctgttagcatattttgacatgtagaatccaagaaaaattccacatgccgattccaattattatttacatttattaatttagggattcatctctaggttaaattaaatcatttctttggacgatttattttatgaatttaaagcaaggtaggggaacttcagggcgtgacacgtcgtcaatctccagattgatttgctggcccaatcttcgaagctgctcataagggtagggtttgcgtgcgtgcgttcataggggtgagtgtgtgtgcgcgttgtgagtgtatgcgttgtaccgtgtaatttaaaaaaagaagaaggaaggattcaatttcctataggtccttttcaattcacagggggaagatctgttttttttataggattgtattcctatggtcaaacctcttggacagatatatagaaaaataagcacggcgttacgccttagttatattgtttatatagtgtaattaaatggcttctctttccatatctattttcacacatctagtactacgttaatttctatgttttttttctagagtgagtacgcaagtgcttcttaaactttgtgcagttgtatcatctgtgtcattaaactcttaaaatatatttttagatcccaaacttttttttggttgtcctacagctccaaacagactctaacccgattcatacattgacaaggcatgccaccgtggtgcatatgtgtagtgggacccacgtatcagtcatagggaaaaaataaaattaaaaacatattatctccttttttttaattttatcttttttatatgactgatatgtcattcccacttgcaggtcggccccaattgtgacattgtcacgtcagcatttagagtggattggtttccgtttggacctatataataatcaacataaatttggggatccgtaaatacatttcaagggtatagagaggtagatgacataaccacgtaagtttagtaaccgccagtggactttactttttttttctattcatatgtttttcttatatgcattttaaagcgccttaggctgagttcgttaggaacaaatctactggtgcacgggaaacggagtggtctattagcgcgtgattaattaagtattagctattttttaaaaaaaatggatcaatatgatttttaaagcaactttcgtatagaaactttttgcaacaaaatattccttttaatagtttaaaaagcatgcgcgcggaataaaagagagatgagttggaaaaacagagtgctgaacacagccttaaaatcgtgagaaactgcgcgtgtaaactgccaatattaaaaaatataatatatatcttatttaaaaaaactgtttgagtttagattattgtgcaaattggtgtgttttgcaagagcaagttcccaacactcccctctcgtttttcacgtgcacgcttttcaaactgctaaactgtgtatttttttttaaaaaaatagctaatacttaattgatcatacgttaataaaccgctccgttttccatgtatgggatggttcccaacaccaacctccaacttaaccatcgttaaaaagggagaaattgagtgttaaccttggttaaccatcatctatccagtatccacgacctaactatcgctgccttccccaccaactccgcagtctctacaaaactcactccgcatcgttcgtcttcttctcttccgcccctacgtcacctccagtcaagggctaatgcctagggcctaggcttctactagtagcgagtagcacactgcctgccgctaccgctctctcgccttctccacccccgagcgagcccgatcgatcctctctctctccatggaggaggagaaggggatgatggggaagcaagagaaggagaaggtgctcctccaggccgcctacgatggcaacctccgcctcctcaggagtgcgtatcctagccctttctcttaggcctcgttcggttcgagtgtaaaaggccgagatccccggccccttcggggaagcccaccacgcggggaaaaaatccctgtgctgacaaaaatcgcattcggttcggtccgggaaggtgggaatcccggcccattaccccccaaaccctagggatattgatccaccacccagaccggtggaaatccaccacgctccacccgagaggcgcaggcgccgtctctccccgtcgcgcgtcggtgcctcccgcgccgctctccttgtcccgtcgcgagccggcgcctcccaccgcatccaccggcgacggcgcctcccaccgcatcctcctgcgccgctgccttccaccgcatccgcccgcgtcgccgcctcctctcggctctcgctgtagacaccgccgccgcctcacatcggatctgccggagcagccacttgtagacgcatccgcggccgccactgacttccccggcgccgccttccttcctcccagtgcagacatcaggtgagccccttactcctctccctgtcgctgctcgtgtggatgaagaagcttatgttttgctgccatccctccatgcaagatccattggcaattacttctctgttcagtcacctctgtccggacaccgggtctttcccaacaagaacctcctcgaggagcatcttctgctacatcagctaggtatgtcaaacaccatccttcttctgaactccatcgacgattcaagatggcacatgcatgcttgtcaattatcagcattacagacaactagtagggtgcccgtgcgttgctacggggaattttgttgatcacgggggataaagccgtgaactccaggattccaacataatttaattagtgtttcagaactactcgctgactcaaatttaaggagcagcaacagtaatgctcaaactcgttacataaaatgacttgtacgttggcaacattaagagccataaactgcactgatcagaatgtaaccaattttatgaaagaaataacttcagtcttacagagaaactgcatagaggaataccacattacaaaatatcggtagggtttgccctccgtgccgcccgctcgtattctggccttcaaagtattcgtcatgatttggaggagacaatcattgaagtgaaaaaaaactaacttatttcaccagttctggaaatgttttattcagtttcctggtactatcaatgctaagagttgtttaccctggttatcactgatccagaaaaacatagtaccattaatcaactcaaaaggattgtgtgatattttactgaacaaatagaatgcgcttattacataattgatatttcaacctgtcggtgacatgggatcgggagtatcatgactagaggtttgaggcagacacaatcgcccacgtggcctggcaccctcgggggacgtcgggcccgagggtgatgtgttcgccctcctcttagcccccccgagggggtcgagccgcacccgcctcggccccgagggccgaggcgccccgacccctcgtgggttttcgctccgcgtgtatgggttaggtgggcacagtggggctcacctaaccatatttattgcggtttggctgagcgtgtcacgccgcatgtaacgcggtgcagtgcactcatttatccggtctgtgaccagtcacagaccggtcagatcgcgggttaggtggcgacaggcgatctgacgcacgcctcgccccatcccgtcaggacgagggcttctaggcactcgtccccagctggagctagcgtgttacctcccagagatggcacgttagtcctggtcagatatatgccaggcttcatcctaaccattacaggcaaaatgttgtgtgaagaagggccaacgtgcagattgctaagctgacgcgtggtggacaagaatgaccgatttgtgaccagtctgacaccggtcatgtcgtcagcagacagccatgattccgcgtcgcgcctgctcccggcgaaagtggaggtaggtgcgggccgtcccatcagaaggtgactcgaacggcaaccatgcaaatctccgtccatttatgaaaaggtagggtaagtccccacagagagggggggatggtgcatgtggtatccccttaagatataaaaggaggaccttgcccactgagagaagggaggtttttttttttggactggacttttccagattaggaacccagaataagggagaggctggctcatactttgtagctccttcacacacgaatccaccaaaacacaggagtagggtattacgcttctaagcggcccgaacctgtatacatcgccggcgtcttctgtgcttcctgtctggcgaaccttccacatacagattgggagcttagagtctcacctagggtccccggccgaaccggcaaaggggggcctgcgcggtctcccggtgaggacccccacgctccgtcatctggcgcgccaggtaggggactctgcgagtgatcttctgagctctcgcactccttcgtgtgcgccaagcattttcctgttcagcccaatggccgagccagcaaaggcgcgcgacctctccccgagtatgagcggtgacgacggggagccaaacccacgccgttgagctcgtactccaccgccccctccacgccaaagtcctaggcgggaaaaggcgctcgagagggctgaaggatccgcgacttcgacatccacaggaggtggagaagggcggcgagatggggagcgtcgtctcctcgtctacggcgacggcagcacgccccagggcgcgctccaagctgcaggcgcgctcctacgtcacccgcccgtcgcccatgaaccggagtctccagcccaacgttggctggacgatgtggccaaattggtcatgactgcacggcagcgcctagatgctggtgggcggtcctccgccaccaaggcctctggagctgctaccaccggctccgcgtcgtcaagacggagggcacgacgagcggcagccgctgttcgccattcggccgccactcctttgtcgactccttcgacccgggaagatctgcgtggggggccggacgcccgcaccagcatcgagcgccggcgtaatgaccgacgtgctgcccacgcaacggagggcgcttcctcgtccagagtgtcacctcaacacggacgcggggaccagccctccgtgcccccggttggtggtgtcggctgtagagcctttgtggcgagccttcggaatgtccgttgccccccaaggttccggcccaccatcgccgaaaaatatgacgggagcgtcaaccccgccgagtttctctaggtctacacgaccgggatcgaggccgccgggggtgacgacagggtcatggcgaatttctttcccatggccctgaaaggacatgcacggggttggctaatgaacttgccacccgcgtctgtccactcttgggaggatttgtgccaacagttcaccatgaacttccaaggcacatatccgcgccccggtgaggaagcggacttgcacgcagtacagcgaagggacgatgagtcacttcgatcgtacattcagcggttctgtcaagtccgcaacaccataccatgcatccctgcacacgcggtgatttacgcgttcagggggggtgtgcggcacaaccgtatgctcgaaaagatcgcctccaaagagccccagactaccgcggagctttttcagctcgcggaccgagtggctcgtaaggaggaggcatggacctggaacccctccggttccggtgtggcagcttcggccgcccccggatccgctgctcagacagggcggcgtgacaggaggaggaagaagaggtcagcccataccgacgatgagggtcatgtcctcgccgtcgagggcgctccgcgggccacccgaaaggggaggcctggggagacaaaaagaaggaggccggcgctcccagcagggagcgcccgaccggcaagtggtgcaccgtccacaacacttcccttcacgacctcgcggactgccgtgcagtcaaaagtttggctgagcggacgaggaagtgggaggaggagaggaggcaggagcgccgagagggcaagtccccggcggttccttccggcaatcggcgaagtgaggccaagcagaaggcccccgccgaggacatcgatgacagcgatgatgacctaggtttccaagagcctggggccatcgttgccactgtcgatgggggagcgtgtgctcacgtttctcgccggaacctcaaggccatgaagcgagagcttctggccgcggcccctactcatgaggcgacgcgccgggcgcggtggtcggaggttgccctcaccttcgaccagaccgaccacccaccgtgcgttgcccggggaggacagatcgcaatggtggtttcccccactgtttgcaacgtgaagctggggcgtgtcctcattgatggaggagcagccctcaacatcctttcccccgcagcctttgacgccatcaaggccccggggatgatgctccggccgtcccagccgatcatcggtgtgacgccggggcacacttggccgctaggtcatatcgacctcccggtcaccttcggtggacccgccaacttccgcacggagcgggtgaactttgatgtgacggacctcagtctgccctacaacgcggtcttggggaggcccgcgttggtaaagttcatggcggcggtccactacgcctacctccagatgaagatgccgggccccgatggccccatctctgtccatggcgacctcaaagtcgcgctcgcttgtatggagcagcgcgcggaccgcctcgccgtcgtgtccaagcccgagggtggcgacgagaggcttggcacatccgcccccgccgccccgaggcagcggatagtcacgtgcgatgaggtcccggtcaaggaggttgccctgggcgacggcccgtccaagaccacacggatcggtggtcttctggacggcaaataggaagacgcgctcgtctctttcctgcgggcaaacgctgacgtcttcgcatggagaccggcggatatgcccggggtccccagggaggtgattgagcaccgtctcgccgtacggccgggcgcaaggccggtccggcagaaagtgcggcgccaggccccggaacgtcaagccttcatccgcgaggaggtggcgcgacttctggaggccggattcatccgcgaggtcatccatccggagtggctggcgaacccggtggtcgttcccaaggcgaacggcaagcttcggatgtgcatcgactacaccgaccttaacaaggcatgtcctaaggatccttaccccctgcctcgcatagatcagattgtcgactccacagcggggtgcgaccttttgtgttttctagatgcatactctggttaccatcagattcgcatggctagggaggatgaggaaaaaactgcgttcattacccccataggaacttattgttatacaacaatgcccttcgggttaaaaaatgcaggtcctacttttcaacgtactactcgaatttctttgggtagccaaataggacgtaatgttgaggcttatgtcgatgacttggttgtaaagacgcgcaaccaagagaccttactctcggatctagcggaaacttttgagagtctccgctccgcccgcataaaactgaaccccgataagtgcgtgttcgttatacctgcgggcaagcttctcgggtacttggtctctgcccgaggcatcgaggccaaccccgagaatatacgagctatagagcggatgcgccccccagcaagcttagggatgtgcaatgcgtcaccggttgcatggccgccctaagtcggttcatatcgaggctgggagggaaggcgctacccttatttaagctcctcaaacgctccgggccgtttacttggacggaggaagctgaacgtgccctcactcagttgaaggcgtatctcagctctcccccagttctggtcgccccggagccaaatgaacccttgctactctacttagcggcgaccccgcaagtggttagtgcggcgttggttgtggagcgcgatgaggacaatcctcattccgcgcacccccaccctgtgctggcttggcccgggagagagcagggaggagaggcccccgagccggacggtggcccaaggcccccgacgaccggagcaggccctctccccgcttgtcagacggtgccaggtgcccccgacccccaggacggccccgaggccactgcgggaaggccgcacctatcgccctctgaccccgaggctaaccctgtaccgattcgacccgggagagagcagggagaagaggcccccgagccgaacggtggcctaaggcccctgacgaccggagttggccctttgcccgcttgtccgacgacgccaggagcccccgacccccaggacggccccgaggccactgtgggaaggccgcccctgtcgtcctccgaccccgaggtcgtcggcacagaagacgagtgcgccccgcgaggccgcttgggtgaagagcgccccagggatgcagcccctagcgaagaggatcggccccaccgaaaggtgcagcggcccgtctactttgttagtgaggccctccgggatgccaagacccgataccctcaggcccagaaaatgctttacgctattctgatggcctcgaggaaactgcgccattatttccaggcgcatcgggttacggtggttacgtcttaccccctcggccaaatcttgcataatcgagagggtactggacgggtggtgaaatgggcaatcgaactttctgagtttgatttgcactttgaaccacgcaacgctatcaagagccaagccctcgccgactttgtggcagaatggaccccggctcccgagctcgtctcggtccccgaagcaaactcgggcccctcgcagctgcctcacaccgcccactgggtgatgcagttcgacggctccctgtctcttcagggcgtcggtgcgggggtcacgttgacctctccgagtggagacgtcctcagatacttggtccgcctcgactttcgagtgaccaataatatggcagagtacgagggactccttgccggactcagagtggcagctggactggggatccgccgcctcctggtgttaggcgactcccagctggtcgttaaccaagtctgtaaggagtaccggtgctctgacccgcagatggacgcctacgtgcgccaagtacggcgtatggagcaccattttgacgggattgagcttcggcacgtgcccagacgggataacatgatggccgacgaactctcacggctcgcgtcctcacgagcccagaccccaccgggcgcctttgaagaaaggcttgcccagccgtcggcgcgacccgaccccttaggggagacggatgcgcctgaccggcccccgaggcccgtcggagtccaggcctcgggacccgaggggagtgctcccagctcccttagattgattgcttggatcgccgagatccaagcatacctcacagataagactctacccgaggaccgcgaagggagtgaacgcgtccatcgcatctccaaacgctacgtgctggtagaagggaccctctatcggcgcgcggctaatggaatcctcctgaagtgcattcctcgggaaggcattgtgcttcttgccaatatccatgaaggcgaatgcggagcccactccgcctcgcgcaccttggttggtaaagcttttcgccaaggtttctattggtcgacagctctcaatgatgcggtcgacctggtccggcgatgtagagcgtgtcaattccacgccaagcaaatccatcagccggcctaggccctgcagaccataccactttcgtggccatttgctgtctggggactcgatatcctgggaccgtttaggcgggccccgggcgggtttgagtatctgtatgtcgcgatcgacaagttcactaagtggcccgaggcttatctggtcgtcaagatcgataagcactccgcacttaaattcattaagggcatcacggcccggtttggagtgcctaaccgtattattacggataatggcacccaattcactagtgaactcttcggcgactactgcgaagacatgggcatcaagctctgcttcgcctcacctgcccaccccagaagcaatggccaagtggagcgcgctaatgcggaaatcctcaaaggccttaaaaccaagaccttcaacatactcaagaagcatggcgattcatggatcgaggagttgccagcagtgctctgggcaaaccgaactacaccaagccaagcaaccggggaaacgcctttcttcctcgtctacggcgcggaagcagttctcccatccgagctcaccctgaggtctcctcgggccaccatgtactgcgaggctgatcaagatcagcttcgcagagatgacctcgactacttggaagagcgaaggcggcgcgcggccctccgagccgcgcgctaccagcagagcctgcggcgctaccatcagcgtcacgtccgggcccgatcactctgcgtcgacgacctcgtcctacgccgcgtccaaacgcgtgctggattgagcaagctttcaccaatgtaggagggtccgtatcgagtggtcggcgtcccccggccgggctccatacggctggccacgggcgacggcactgagctgcctaacccgtggaacattgaacaccttcgtcgcttctacccctgaggggggggtcgggtgtcaggtttcgggctcgggccaaccccgcaccccctcgggcgtgcaaggttggccgggggctgccacacatgcacattcttatttctttttttttcagtatttcaataaaagcagtttcaatttcctaaaggctgtgtctgtgctgttttttccttttgaagaatcttgacttgaaataggtcactcgtgctcaatcctgccctcgggggctcgggtcggctaaattcgccaaacggggcccagaaccgagccgtgccctggggcgtggtgaactccgggggggaatcggtaaaaacccacaatcgggtcacccataaccctcggtcaccacgttcccggcctggccagtctcgacatgtggatctccccaggcactagccccgacccgcgccttttgaggactgggacctgggcacgaacccttaatcaagctaagacacaaaaggaccacggcacagatcatcctcatctcatacacacagcaagatgaaattgacacaaaaatttcttcatttttgattacagattaagttgatctatacaaaaaagaggcccgaaggccttagaagaaagaaaagaagaaaaaactgaagaatggcgggggtctgggggctcaatccgatgcgcccgggtcgccggcctcgtcgtcactgttgtctgcaccaccggcattgccctcctcgtcggagttgggggcgaacgcgagccgaggggccgagccctcgaagctgtcgacgatatggtcggcggcatcccggacttgcgcgcgcgcgcggtcctcggtcccgggagggaactcttccagcgccatccatggagagaaattggggtccctggtctggtaactcgccaggacgagctccaccgctccttgggcgaggtccctcgaggatgacttaattgtcttctcgagctcctcggggagccgttggagagccccggccatcttcgagaggcgctgggcgagacctccctggttggcggcgtactttacggtccgccctctccagaggcccacttgccgaccggcgcaatctaggcgggagacggcgtcccaaagcatgccgggcccaacctcgcctgccaagcggagggcttcgacctccccggcggacgagtccagcgcgccctgcagatcggcgatggtgtgttcggcagctgcgaggcgggcggctaagtcgctttcgcccgcggccgccccgccgctgcgcgccctcgcgtccagctccttcgcccgcgcctcgagctcagcggcccgttggttcagtgcggccctctcggcgcgggcaccttccagattacggcgcgcttgctcctcctgcgctgcctcgcggagggacaggctgtccgccagctgttgcgccgcggcctcggccccctcgagagctcgctcccgctcggtgagcgcgtcctcgcggaggcggagcgcgagctcttcttcggcgcaggcagcctcgtgcgccgccagcgttgcttcccggatggtgacggcggcctcgcggtccgccagatccctctccacgacgcaggcgcgctcttccagcgccatggcgcgcgcctcaagggcctcttcgcgccgccgggacgccgcttcggtctccgccgcccgctgttctcgggcagcggcagcgtcaagcaccccctgggcggcgtcgagcttcttccctagctccgcctcccagctcccgtattgaaggcggagggtgtcctgcgcctcgttcatcacggtggtggcaatgagggcagccccccgctcctcctccacttccttggcgatctccgctagcaccttcttacgggtttcaagctccgagatgtgccggcggtgagccttacagcccacctccaccatggcctccaccgagcgtcgcccctcttcgacacgcgcccaagcggcatcgagctccgcccgctctgcctgcagggcctccacctgggcacttaacccgtccaacaccgtggtgtttgcggcggccaaggcttgcagaaggggctctgcgctcagtagggcagcagaagggcgtggggaaaagccgcctcggagaagatgccacgcggctcggcccgccgatggacgtgccaaacgcggggatgtcctccggacctggttgggcctgagcgtcgcccgagggagtgggcccaagtgacgcgcccgcagcctcgtcgccagctaccccggaagttgtcgcctgagcgtcgcccgagggagtgggcccgagcgacgcgcccgcggcctcgtcgcgagctgcctcggaagtcgccatcgcctcgtcctagcgaaatccggcttcctcccgagcggcttcctcggccttgtgggctcggacagcctcctcccgagcggcttcctcggcctggtgggctcgggcggcctcctcccgagcagcttcctcggcctggcgggcccgggcggctccctcccgagcggtttcctcggcctggcgagcccgggcggcctcctagacggcctcctcggcttcccgtaggcgatccgcggcctctcgccggtcagattcccgcctccgggcctctgcggccgccggatcctcggcctcaggctggccggacttggaatggcgggagggacgcgacgggatctcgctgaaacaaaagaaaagaccagaagacgaacgagatgggtgagtgaaaactcgcgttgagagaatgaatacaaccacgatgggtgagagacgaacctgcgagggggtcggttaaacgaccactttagggggggggaaatgaggtttccccgagatggttctgtctcccccatcttgcggggccgcttcttcttgcgctccccctcgggctgcgatgttggcgcggccccctccgggcgcctgctgctggcacgcgccgccccgccccctcggggagatgggggaggtgttcctccctgcttcctcttcccccgggcgtcggcagggcggctgctccccgggcccctgtcgcgggacccagaagcacgaccccctctcggggtagattgttccccccggcggctcccgcctgcgccgtcgtggccctttggagctcgctcctctgaggccccgaccgccatcataatggtcaggatggaggcgcggtctggatcgctgcagagggggaggattccttggggaatgagggccgcctccacggagttgagattcagcacccgttggaccaatatcttgaagtcctcaggagcccagtcccatctcactccctggtgagtcctcatgaagtcttcggacccggtgtactcccaggcgccccgagcgcgccgctggagcggcgcaatccgacgacggaggtagtcgccgtacaccatggcccctgtgagcccctgggatcgcaggcccgccaggcggtcgaggacggcgtcatagctatcccccagatctaccggcgcccgccagctggaggcctgagccgggggctggctcggaagtcggaggcgcacttcgtcggcaaggggggtgtagaaccagtcgctcttccagtcgtcccacttcttgcggagggcgcaggggatgtagcggttcggcaccggcccccgtggctggaagtagcagccaccaactaccgatggcggcgacaccgactgcacggtgaagaaccaccggaacagccgaagagatgggcgcaccccaatgaacatctcgcacagatgcgcgaagatggccaatgtcatcaccgcgttgggggtgaggtgcgccatctggagatcgtagaactccagaacatccatgaagaaagaagaaaatggcggaaccagccctgccattgcaaaagggagaaagaagacggaccgccccgggtagtctggcgccgggcgtccctcgcccagcgtgactatctcccggccggtggcagattccggcatgaagcggcgcggcagcccagcctgcctctcgctcacgatgcgggagggcggcagcacgctaccatcgagcagagcggagccccgtgccatggcgccggaaggaagagaagattaagagcgagcgcgtgtggcgaaggtagggcacaggaaagaaggagttagggcgcaagcggcgaagacaaggggaataatggcgaaaggaaggaaacaaatcccttcctcagtgcctttatactcttgccaacgctgtgcccggctcctcgcttctcgcgcccactatttcgccccctcgtttctcgcgcccacgcttccactaatcccattcgcccgcttgcggtgcatgaggtggatatgcggttgtggcggtcgagatagatcatatcgtgcgcgcgttaattacgctcgccgaccgaagcgacgttaccatatctccagatgaaacgaatcgccatgtccagattcgtgtgctactcgagtaatgtggcagtcttgaagagaccgctcattattgacaaccgagttaccattgccgatgtgcgtgatttttgaccgttgggtttctgcccaattgtggagaccggtcccacctgtcaccaggccttaggagtggcgtcacgcccgaccgcttcccttaaggagggcgatcgccctggcataacgccgggggctactgtcggtgacatgggatcgggagtatcatgactagaggtttgaggcagacacaatcgcccacgtggcctggcaccctcgggggacgtcgggcccgagggtgatgtgttcgccctcctcttagcccccccgagggggtcgagccgcacccgcctcggccccgagggtcgaggcgccccgacccctcgtgggttttcgctccgcgtgtatgggttaggtgggcacagtggggctcacctaaccacatttattgcggtttggctgagcgtgtcacgccgcatgtaacgcggtgcagtgtactcatttatccggtctgtgaccaatcacagaccggtcagatcgcgagttaggtggcgacaggcgatctgacgcacgcctcgccccatcccgtcaggacgagggcttctaggcactcgtccccagctggagctagcgtgttacctcccagagatggcacgttagtcctggtcagatatatgccaggcttcatcctaaccattacaggcaaaatattgtgtgaagaagggccaacgtgcagattgctaagctgacgcgtggtggacaagaatgaccgatttgtgaccagtctgacaccggtcatgtcgtcagcagacagccatgattccgcgtcgcgcctgctcccggcgaaagtggaggtatgtgcgggccgtcccatcagaaggtgactcgaacggcaaccatgcaaatctccgtccatttatgaaaaggtagggtaagtccccacagagagggggggatggtgcatgtggtatccccttaagatataaaaggaggaccttgcccactgagagaagggaggtttttttttttggactggacttttccagattaggaacccagaataagggagaggctggctcatactttgtagctccttcacacacgaatccaccaaaacacaggagtagggtattacgcttctaagcggcccgaacctgtatacatcgccggcgtcttctgtgcttcctgtctggcgaaccttccacatacagattgggagcttagagtctcacctagggtccccggccgaaccggcaaaggggggcctgcgcggtctcccggtgaggagccccacgctccgtcacaaccaaatggaccgacaaattttactgaacaaatagaacgctcttgctcagtgcagcatgcattgtgctttggtttttgtatcaacatgctctgcaatgtcaccccattttgcttgcaaaattactaaagcttccaaaagaagcaaggtctcctggtcagtccagctagtaccaccaaagcctggaatttctgcagattccataatgatgaaatcagtttgtgacatgcctgcatccaaatttcctttgtcatagtctgcgtggaaaggtttaagagaaaacaatcagcattcagctaaataaatcatcagacctaagaactatgcttcagtacttttgttaggtaaaaaaattaaagaagaagaaaaaagaaccatatagaagtatcatcagctccatattgaccttaccatgaagctacctaagcaagaaaccaggtgggatcaggtgaagggatgtgaatcaaatggttttgcagttgatggttgttttccagagtcaggtaatagactaataatagagtgttgtaaatagatttgttgtcaatgtcagccaccaggttagataaagcagagttcaggcactggataacttgtccgctagcatcctgcatccaaactcgtagagttgtaggacacaacgacaatgcaaaaatcttcgatttttcatttcctagtataagtagcacataaaaaacctgcagttgatcacaatacctgtaatggtgtatataggccttgccaaaatcccaccgaaagtaatgtttactactgtccaagaaaaaaaacacacgaaatgtttgacttggaatataaaaattacagaaagaatggaatttaagcaagcatattgtggatggttaattagtcgcataatataccttttctaatctgtgaggacctctctatacacaatattttttgtgtatgttgcagcctgtttagacaattcctttcctttcttctcattgtccttcacgccagtacacttagactttttcttttgtttcttgtcttctaccggcatcgatagtatttttatgtttgttctagaggttgctctagacaacgcgacgtataattgaccatgagagaagacaggctccggtaagtagacgcctgcatttggaattgtttgactctgcgccttattgatggtcaatgcaaagctcaatctaaccggaaattgcttcctcttgaagcgaaacgggaacatatcatcatcagacggacatagaggtatacgaggaaggaaaactctgttcgcaactgctattgtgcatcgcagccatgggcaaaccgaagagactggcacctaaatacatctgttcgcaactgagcatgcaagctccaacctgtttggttctataatgactataagtggtactttcagattcagcatatgcagagacttataacagcaggctagtatcggtctgaaattcatttcctattgatccccaacgagcagaaaagagcaggctggtactttcagattcagcatatgcagagacttaaacgctacgacggtggctgcgagcggagaagggtagtcggcgatgaggggctcgaccccgtcgcaactcctcccgagcggcacgaagggcggagacggagcagcggcggcaggcgtagttcatatatgatatggctcagcgaggattaaaacctaagtgatttccctgaacatcacaactgtaacgtctaagcaagcattttgtcgaacaccttttgggcatggggagcattagcgtattacctgcagcttgcatttatttgca

SEQ ID NO: 9078 - DNA, 136236 bp, Oryza sativa
  unsure (1)..(136236): unsure at all n locations
tatctgttctggagcggccgcaattgtcattttactcccaactgttttctgtccatggtgctgcgtcacctcttttggcccaatgggctgtgtatccaagttgggcccattaggggcgcgtcctagggttggagcacgaccctatggtcgttcttcccctcttcttatacctctagtcgccgccaagaacattcgggttttgatgatagagatagctacttgctactggctcgtagcgcgcgtgttggctaaaccgcccgtctgcctgtaatcggaaccccaccatattgtgtttgatagtgaaactttcatttttatctagcaatttcagtgcttgttctacttgttcttgcttgttcttcgattgcttgcaggacgagtgccctcgtggccgggttgacgcgcaccacaagttcgcggcgaccattggagacggtgtatcggttgctaaggcgcagcgtctttggacggttgtagtcgggccctgaacgtcgtcttcatccaatcgagttatcccttacctctcatcgaaagatcgggccacaaaccctagcgggttcgcatcagaaagtatatctctcggcatggaaatcgagaggaaatctcggatggcggttttccacccgttgccaaaatctcggacgccgttttccatccgggattaacgcgattcaatttccataactacatgattacgcgcattgatcggtagcgctaaatccttccataatttggattgccctcgatctcccttagcgctatactaataggagaggccggtgtcgtggttaggtgacgatctctccacgaccttcttctccccgaaaatcccaaaaccctatccgatcaactaagcgctggagggagaacgtgtggtggttccgggacagtgtaggtggcgaccggaaggccgtcgctaccccgcaagtgatcgccggcaacccctttgggatcaagccggcgtacctactgctaccactacttcgtctacaccgacaaggacaaggaccgcatcaatggcttcaaacaacggtcagtaatctaagaattccgcattagggtgatcatgttaggcttatcactcatgtcagtagatcgcataatctacatttggtatcagagccactgctatagcctaatgatcccatcattccgtttagaagccataaaatgcatctaagccctcgttctcatgtcggttttgatgcaatcacattctggttcatgttgattaatcatgttttattcggattaagtttcgattaagcgctgctcaaggctcgccgccatggccccggctgcgcgcggaggagaaccggggacggtgggcaccggcacggcatcagaccgtgcggcatcagcctgccacacggggcgccgccggccgcagccctctccgctgcgcgttgtcaccgcgccgctccgccacctatcgcctgcgccgcccccttgtgcgcaccgccgcatcacgcgccgttgcggcgccgcctcgcgcgcgcgccgccgccgcaaaatcgccgccgccgccgccgcatattgacgagaaagaaggggatcggggaaatgaagtaaagtagggttagggttagaaccggcatgttttatgttttttttttctcaccgattcgagttaaatctaagctgtccattagatcggacagatcggatcgttcctgcatcgggctggcaccgttagcaggccgccaagccccttgggccgccgcaatggaccgcgccacactacacgtgcattatgggccgcacatgttctttaagcaggccgacttattaatgggctgcgctattagattttagcctttttcacttatttatttttagaaattgcattagtaccatttatatcgcttaaaattgctgaaaaattatgaaaaattttatggaggcttattaatttaattctagctaaatggaaccaacgagaaatttggctagatatttgtttttcatgatgtgaatttattttctgaccaacgttgattataaattcacataaatttattcataattatgtttcccaaaattatttctgcccaacggtgatgtaattaggggaatttatttctgtttaattatgtaactaattgagccaacacaaattaattgcatatatgtacttatgtatatttttttcttcatgatttttcagcttttggtcagatccgactcattaagcctcttgatgggtcaaattatgctaagtggaaggctgacgtgttactcaacttaggcatactcgattatgattatgccatcagagaggaccgtcctgaggagccttttagtgttgagcacgattatgaggagaaactgaacttatatcatgagaaaactaatgaatgggagaagtccaataggatttctctcatgtacatcaagagtgccatatcaaatgtcattattggtggtattgtggactctgatgatgttaagacttacttagaaaatattgataggaacttcaggagttcttctaagtcttacgctagctctataattaagcgtctaatgtccatgtgctataattataaagatggtgtgagaaagcacattatgcagatgggtgctatgaatggagagcttaagagtatggacatgggaattaatgatgatcttctagtccattttatcttgagttcacttccttctgattttgagtctttcatcattaactagaataatcagagggataagtggtccattgaagaaatcatttctcattctgttgaggaggaggatcgtcagaaggctgacaaacagaagcataaggatcagctgaacctccttcatggtgctaagggcggtaagaaaaagttctatcgaggggagtccagcaactcccaaaacaagaagaagaagcccaacactccttccactcaggcttctaatggtgcccataagggcaaagctcaggttctagcaggtcagaactctgctggtaagttcctttgcaagttttgcaaggcagaaggtcatgcacagacagactgtgaaggctttcgggcttggcttgctaagaaaggtactaatgttgatattgtctctaatgttgatgaattactttacgttgaattttctcataaatcatggtggattgactcaggtgccactgtgcacgttgcgaactcattacagggattccgttccgtgaggacgctaagaaagggggagtggatcctaagagtggctgatggagctgaaattaaagtgatggccattggggagcttcatcatcgacttccaagtggtaataatcttttacttcatgatgttctttatgctccctctgttaagaggaagcttatttctgtaatggttttaacaaacagtggttatgattgtaatttttctaaggacaaatgctttattaagtataataatattgatattggtcttgttagcgtgcaagacaagctctatttgctctctttggatgatcatattatgaatatattgaatgcctgtaatgataatgagacgtcttcgaaattgtggcactgtcgtttaggccacatttctaagtggagaatggagcgtctcattaaggaagagatacttcaacccttagatttttcgaatgcggatcattgcttagattgtattaagggaaaattcactaagaaaattaagaaaggaactactaggagcacgtgtccattagaaataatccacacggatatatgtggactgttcctagtaacatatgttgatggatatgattcattaattaccttcacagatgatttctcccgttatggatatgttttccccattaaagatagatctaaatcactcgataagtttaaaatattcaaagctgaggttgaaaatcagcatgatgcaaaaattaaggtagtgagatcagattgaggaggagaatattatgggagacatactccttatgggcaaagtcctggtccatttgcccaataacttcagatacatggaataattgcccaatattccatgcctggagaaccacaacaaaatggagtggctgagcgtcgcaaccgtacacttatggacatggtatggagtatgcttagtcattctactttgtgtgtgaatttatggatagaggcacttaaaacagctgcacacatactcagtcgagttccaagtaagtcggtacccaaaacaccttatgaattatggactggaagaaaaccgacattcaattatttgcatgtgtggggctatcatgctgaggcaagaatatttaatccacaactaaagaaattagatcccaagactgtatgctgccattttatcggataccctgagacatctaaagggtaccgattttattgcccagaccgtgtctctaaatttgtggaaactagacatgtcgtattcttagaaaataatgaagtctggggagctcacaggaaagggaaattaatcttgaggaaattcgggctaacgttacaccggaaatccaagagaataatattccaataaatttggtacctcgtgttgtacctgtgactcagaccgtagtagcaccagatgaaaattctggtgataccgactatgttgaaaataataatgaattaaataatgacactcaacagacttctggggcacaaaatgaagaaattctcgaagaaccttctcaaccgctagtgatcgaaagtgaaccacttacaatattacaacgggagaggagatctgccattctaaattattatgaggtttatttaggtgaagatattgggaatgtagatgatcccacctcatttaaagaagcaataatgagtgaacatttatccaaatggcttgaagccatgaaagatgaattaaaatctatgagtcataatggagtctgggacttagtagaaattcctaaaggagccaaaacagcaggctgtaagtgggtctacaaaactaagcttgactccaaagggaaaatcaaaaggttcaaggcaaggcttgtagcaaagggtttttcacaaagagaggaaatagattacaatgaaattttttctcccgtctctaagaaagactcatttagaattgtcatggcgcttgttgctcattatgatttagagctccatcagatggatgtaaagactgcatttcttaatggtgacttgcatgaggatgtatacatggcacaacccgagggttttgttatggaaggcaaggaccatttggcttgcaaacttaagaaatctatctatggacttaaacaagcgtcaaggcaatggtaccttaaattcgatgaaataattaagagatttggatttaaggagaatgaggtggataattgaatttacattaagactaagggtgtaaaatttataatactagtactctatgtggatgacatactgttagcaagcagtgacattactatgttgcatcagactaaagaatttttgtcatctaattttgatatgaaggatctcggtgaggcatcttatgttttaggcattgaaatacaccgagataggtctaaaggagtactgggattatctcagaaatcatacattaacagagtactagaaagatataatatgagtaagtgctctgcaacacctgctccaatagttaagggcgataaattcggatatttcaaagctcgaaaaataaattagaatcagatcaaatgaaaatggtaccatacgcttcagctgtcggaagcctaatgtatgctcaagtctatacgcgtccagacttagcatttgttatcgggatgcttggcagattttagtccaatcctggtttagaccactggaagtttgttaaaaaggtcttgcgttatttgcaaggcactaaggattacatgctcacatataataaatctgaagaacttgaagtcctaggttattcagacgcagactttgcgggatgtgtagacactaagaaatctacatcaggatatctcttcactcttgcaaagggagcaatttcatggaaaaggtctaaacaaactttgactgcatcgtcgataatgcatgctgaatttgtggcatgttatgaagcaacggggcaggccatatggcttaagaattttatcccgggtttaagagtggtcgacagcatttctagaccaattacattatactgcgataataaagctgcagtattctattcaagtaacaacaagtcgagtggtgctgccaaacacatcgacattaagtatcatgttgtgaaagatagaatccaggatcaaaccattaagattgagcatattagcactaagtcaatgctcgcggatccactcaccaaaggcttacctcccaatttatttaaaaatcatgtagccggcatgggaataactgattgcctttgattaagactaagatcctggaaataggggcattagtcctaactaattcccattaagatatagtgaactatatagtgaactataggtaccggagtcttggtaggatatgataactaccctgacgcgttgccttagtaaatctatttttctaagaataaactcatttgcctcaagatcggggggagaatgttaggaaagaatatctcttggcatggaaatcgagaagaaatctcggacggcggttttccacccgttgccaaaatctcagacgccattttccaaccgggattaacgcaattcaatttccataactacgtgattacacgcattgatcggtagcgccaaatccttccataatttggattgcccccgatctccctcagcgctatactaataggggaggctggtttcgtggttaggtgacgatctctccacgaccttcttctcctcgaaaatcccaaaaccctatccgatcaactgagcgttggagggagaacgtgtggtggttctgggatagtgtaggtggcgaccggaaggccgtcgctacccctcaagtgatcgccggtgaccaattcaggatcaagccggcgttcctactgctaccactacttcgtctacaccgacaaggacaaggaccgcatcaatggcttcaaacaccggtcagtaatctaagaattccgtattagggtgatcatgttaggcttagcactcatgtcagtagatcgcataatctacataccaatccccaaatgggccattaaaaggattgataaattaaggagggccttcttatggaaaggggataagccagaaaacattaagcctggggcaagcttggaattctttatcatcgaaaatttatcaatccttggaggccttggaattcattatcttcaaaaattttcttcagcttggaggctcacatggctttggctgagatggactgatccttctaagccttgggaaaaattggatttgccctacaacaaggctgatgtacagctctttcatgcctgcacaaagatcaccctaggtaatggggagaagactctttcctagaaagacaactggatcgaaggcctgtgtccaaaagacatctcaccaaaccttttcaaggtggcaatcaggttgcgtctaaaaaggtggcaatcaggaaaaacaggcatgtcaaaactgaatttacaaacaatgtctggcttgcttcattcagacaaataacagacgttgaagtccttcatgagctggtacaactaggaagcttactacaccatgttgagctattagtgaatactgaagacaagattgaatggacacaaactacagatggcctctactctgcaagaagtgcctaccatgcccaattctttggaactgagagaaacaaatcatttaaaatgatatggacagctgaggcgcagtcaaaacagagattcctgggttggctaatcctacaccagaagactttaacggctgagaacttactaatcagacattggccatgcaattggatttgccagctctgcacagaggcttttgaggacactgatcacctcttcagacaatgcaaagtaacaaagcaaatatggcaagaagtctctcgacaaaagcaaatccctgccttctctactctggaaaacatctaggattacgtgctgaacatcaaatcttcatcatcgaaagtacaggcaaggcaaagacttggagcgcttgtaccaacctggtggcatatttggctcatgagaaacgcgaggattttcagggaccaatcaccaaacatagcccataccatctctgccatcctggaggacatcagagacagagattttgcttttaaaccaccttaattcctattttattatacacgcgatgtcaagcagtgtacccatttgtttttgtttctatgtacccccgatgtaaaactttatttttcctcctaatataaccggcaattctcttgccgtcttctattaaaaaatatatataggaaatgatgcttatttacttgttaccatagctttggtcatggaaaagttgacttgttcgcgctcgtttgtttgtattattaatcaaaagagttgattttactttgtactatgtatatagactaaagttgcaaatacacaatggatgtagccactttcacttaatgccacatatttacaatttattgtataggtatccactgccgctatgctttgctcattcatgtcgttgctggtgatcttttctatcagtgtagaagaactatcggtagatctaatgtgcccactcttaaaaaagaatagtacacgtctaatgacaagttatttatataatatatagaacataatatatagacacatggatgaccgagaaagcttaccaaccatcaacggcaatggttttttaaacttaggaaatcattacatcctgatgactatattctctttatgaagtataaaaatgaaatcctcattacctagaatatgtgcgcacgtcgtcgtcatgagtcatggtattgagatggttataattacaatcgaggacttatggaaggcaagaaaactaagctcgttctagctagatcactagaaaacaagcgtgccgacgcttgtttttatagcccttgcattcgttttcgtgttattaagaagcattatgtttgttgcaaaaagacgacatcctcaaatttccatatcataagctattaaattgtaaatatcatatcgatagatttttgatgaaaacttagttgtattttaatttgtatagatatgtagtttgggaaaacaatgataaaatatgtataatggagtctgtgttgattattaaaatgacattatgttaaatacaaagttaatataaattttgcaaagttttataagaatctagttcaattttttgaaacaaaaagaaggtacattcgaataaaaatttcaatcaatttttaagttaaaatttagtgtagcaaatcacattatttaaaggtgttctaaatgttgtttaaaggagccacaatactcgtcattttttcgtggtaccatatgaaaagttgcaaatctatagaatttgtgccatgaactgtacacacttatttaccatgatgtgcacgggagtgttacctcttcatcttctccaacgaccaggtaatctctccgtcggagagtcttcgagttttctagagatttctgataggtgtatcatgtatgtgtacaggagacaacttccaacgaagcagactcttagctcctcttcatggacacgtggtagttttctggagatgtcttactaaatttttattgtgccacgtggctcaataggaggccagatttttgaccctaaaatcggttgtagagattacgggaggggatgtgaagcttacataaataggataagaatatcttgaaacatacgagaacacatgaaattggattgacccctaaaattttaggccccaaatttttggggcgcctgtgtggtcgggcatcccacactacttatgtatgagccttatgtaaaagggttaatttgtcatcatcatttcgttcttgcttagtgtaaaagagttaactcggagaattatggttggaatgcaggggtttataagatggcccaaacctatctaaattgtcatattggcactaatcccaccacacatgaatatttggcccaaatgggcctgaattggaatatattgatggcccaatacattagagataattggctagattacgctaaatataggcaatggcggaaaaacagtgtttgagggtgaagtgtccgacgctatgtcgtgacctgaccactagaggatttggttagaggtcagcttgtgttttgggttttgagcagctcgttttttagcatggttggaccaaccacatcatggcattctaacttagattggccacaacgaggaattttgtgataaatttctactttatttgtgacaactaacaagtgtatattaaaggaaactaattttagataatctattttgaaccggtcctaaaattaggaaacatagtttgcatgcgcagacagccccttctttctccaatgtgctaaccagagaagcaaaagttgcgccaagttccaaacacaaggatttaaaaccagctgaacttaatggcagttagagacataccaaaaaaagcaaacatggatggccactgctaggtggcacccaaaaagtgtgtggcttcccttcgctagcatcccatcctacgtccgctctccttcgttgtagtatgcttccttgtgctttgctttcccatttgctcctttccttctttccttccatttccattctgatcaaattttaggacaccaattaccagcttgatttcttgtataactatatttcgtgcattctcgatgggattgccaggatagggtaaggtttccatttgcatgggaaagagggaggagcgaatcgtgctgcccaatctctctttcccatccatatcaattgatttttcttcttgttccaattgcaaatttaatcggaaagaagagcgggagattccgcggtttcttgattttcagcaagaggaggagaggtggtgctccaaaagaaattatcggatcatcatctgagtcaattcttttgtgtgggagattgaaaggcttgtagcatggagagtactactacaccaagagggaatgaaacaagtgaattaggagcaaatgatggtgaaagcagctcgaggaacagccaacccaacaacattgaagagactaatcccctcccagaggtcagtaatgatgatgcagtcctgatcataggacaagctattgaattgaaggatgaggggacgaggctattccagagaagggactatgaggaggcagccatcaaatttggcgaggcgataaagctccttccaaaggaacacaatgatatcgcctttctccactgcaacgctgctgcttgctacatgcacatgaatcctgaggaccttgatcatgcaattgaggagtgtaatctggcattggaggcatcaccaaagtatacgaaagcattactgaaaagagcacggtgtttcgaagcactggataagctggatctcgcttgcaaggatgtacagaaggtgctgagcttagaaccaagcaatgtaactgcattggagctatcagagagtatcaaggagctgatggaggagaaagacgttttgctggagaaacagattgtttcgcctgtggctgaggagcctaaggctattttagcaaaagataagatcaagaggaaggtatcccgcaaattcagaaactccatagttgaggaagaggtgtgggaaatgattcatgaagaggatatgcaagaggatgatgaggctgccgaggaagagaaatgcaatgggaacaaccatgtgcagaatgatgcaagacccgaagaaaacgacactgagcagatgcacataaaacaaaaccggagcagcgaagagaagtacagagaggagaccaggccgaagcaagggcagtgcagtcgaggagccagcaacgatgggaagacagtactgcagcattcttcactgaatatggaagagatgtgtgtcaacctgaagcatggtaaagagaagcatcagaagcatcttaaagagatacatgttagaggcagtcatgggcaggaaacccatccattctgtagtggtgtggacaaacgccaaaagcatattgatcagatacaaaccaatagtctcggcatgcaagaaaagcacacggacaagtttgaaaggtatgccaacggcagccgagaaaagcattttctagacaggcatattggtcgtggtgaggataagcaggaaaagcgatccacgctcaagccaacaatccatggtagagacaagcataagaatcacaaagatgttaacaagagggcaatgaagagcgtgaagtttgtttgtggagatgacatacggatcgttgtaattccagaacatataactctgatgcagctgatggacatagctcgctataagtacactcctcacttgaagtcaatccttcttaaatttatggacaaagagggtgacttggtgacaattacctcaactgaagaactgcgatgggttgaggaactagatccactaaagcctgtccgattgtatataaaggaggtaagtcctgatcgtgagatcactagggatcttgtcatgcccactacctcctacagtaagttagaaagaaatcacaattccatgtctgaatgtggaagttctaggcatggcggtgaaaagaattcttatacagatgactggatggtacaatttgcccgtctattcaagtatcatgttggttttgattctgatgcatatgtggatctacgtgacctcggtatgaggctgtactatgaagccatggaagaaaccatcacaagtgaagaagcccaggagatatttcaatccgcggaggcaaaatttcaggaaatggcagctttagcattgttcaattggggcaacgtccacatgtctcgtgcaaagaagcgattacttttatctgatgatgcttcacaggaatcaatacttctgcaggtcaaaaatgcatatgaatgggcatgcgctgagtatgtcaaagctgggaaaaagtttgaggaggcagtggacgtaaaaccagacttttatgaaggtctcattgcactcggacagcaacagtttgagcaagcaaagctttcatggcgttacgcagatgcatgcaagataggaatgggaaccgaagtccttgaactattcaaccatgctgaggacaatatggaaaaggggatcgaaatgtgggaaggaatagaatatctgcgtgtaaaaggactatctaaatccaaaaaggagaaagttttactggataaattgggtttgaatggacatttaaaggagttctcagcagatgaagcgtttgagcaagcttcaaatatgagatcacagctgaacatttcatggggtaccattctctatgagcgttcggtagtggaattcaagttaggattatccagctgggaggaaagtcttactgaagcaatcgaaaaatttaagactgggggagcatctctgcctgacatcagtgtgatgataaagaaccactgtgcaaatgagaaaacgcaggaaggtacgcgttactcaatatttatttattgaaatcctgctaaatcatctactcccaaacatcttgtctatgtaagcaaattttcctgtacattgcaataattagttcgtgaaatgttcagttaacattgctacttttgttttgcaagttttctgacctaacttttggtaaaatgttactttgggtcgatactaaacggttttgttttggaatagctagtgagtaagaaaaattggtgcatgcataattgtcatggtagatgaaaaacaactgacctgtttgtattgttcgacttgtttcttattaaaattacaagttgttacaaacactgggcttctacgactgcagcagtttatgagtaagtaaaaatgtgaatgagtgaagaagcaaagttctctgtaacctttgtatactttgtttccccctcttcttaataaacttcggctggctttcgccagccctgcgaaaaaaagaagaagcaaagttgtttccacctgatttccctgcaattggattcttcacaggtggaagacttaccgagcagggttacaaggctaatgtaatctatcaagaatccattactgagacacaaatgcataagatttatctatccaggttgtagtttacctctagccaagaacaattgtagtttacctctagccaagaacaatcaatttcaataacataaggtgaactatgtgtgcaaaccacgcggtacaacattgcattgttagatatcagggttcactagcataacctgataaactatttatggttgagaaactgggacttcttggacaatttgtagtcaggttatatcatacaattagtaaaacaaacatgtgagtttcagattaacattctgtaactagctataaggttggtacatggatagctgatacattttctttgttctgcaggattgagcttcaagattgacgagatagttcaagcatggaatgaaatgtatgacgctaagaagttaaaaaatggtggttcttctttccgtttagaacctttatttcgaagaaggccttcaaagctgcataatatattagagcacatacattacacttgaggttgtatatctgacataggacttggatgctgtaaacatggataggaaagttgagacttatttctttctgaaaaaggtaatctgatcctttacgaaaaagtatttatttcatgtgattctgcaaagtgagttaacttttaccctgtgtggtatgcatgcatccaaagcaacaggaaattgggttttgagtttttcttttaatctttatccacttatattacattgcaatcagtacagtacatagacttactctgatccttataccgtatcaaccaaaagcagggcagggccaatttatatcttagtaaagaacagtggccctgcagaggtgctaaaacctaaaacatgtagtataaactagtacttacaattctaaaaaacaaaaaactaagaaaagaaaaaaatataaatccctctgtgcatgaaaacgagccattttgtacaatggtactgcctgaagtatagttttcaccacaaactcttatttgtaaaacaaataaactataatattatgatttagtttcaaaagacaaatcaaccaatataattttcatacatctgatctcaatacttttaaaagttcctgatgcttaaattttgaaatttaaactagacgtatctccaaaatagcacctttcagtaattggaggtgatacaataatatgattaccacccatgttgctactagaagtgcaattgtggcaaaattgatgtcagtatgatatattaatatttttcaaaacacaccgctgaaagctctcatatttttcacacacatatacttattaggtttctttaagtcttgttttgtttttattaatgtaacttgagctgccaagtaacatagaacttttagatcctgaatagctagcgtccctctacgtaaaaaagatgatctgcatgaaattatcatgcatgttttccagcttatttgttcagtggatatcattagagcaataagtcatcccctaatttaaaatatcaatgattttgacatgttcctgcagactggttattttacggaactggagtacattcatgcttcccccaccaagtgatcttcccattcaagcgaacagaactgctaggaaggcaaattataaagtgaagatgatatttcactagcttcccacctatttcagatgtgcaaatgtccaagtgtgtactcatagaaaaataggaaggctcagctaaattgtaacttttttgtagatgaaacacgatagtgaattgttcatagttctcaattgcgtgaaagttatgtaatttgttggaaatattttgttatatgcagcagcgataatcgataaataatacatatccaactgattactgataacatttcccagctagtctgagaacatatctgaattgtaccaaatcacttaatataataagtctgaatgattcattaataatactgagtctggaaacatacactatagagaaaatgcctactggtcagtgaaaactgtgttgcgcgcattgtattcatcggtccggccatcttagactaagtttctataagtgtaattgcttaaaattgtaggatcgaatagcaagaacttagccaaccagaggggggtgaatggttggtgtacccaaaaaccaaaacttttaccggaaataaaagttaccctcaatttcgacggatcgcggtctgaccgaagtagttgcaccggtctgaccgcctgaaagccatcggtctgaccgatattgtatctttggtctgaccgccgagatcagctgtcgtcgcctgaagccgccgccagtctgaccgctgctactccgccggtctgaccaccgcgatgccatcggtctgaccgccagtgtctcgtcggttagaccgccaaacccaagcaaacacaaatcgaagaactcttgatgtagatgacaactttattacttatctctgtgtttacaaagtgcaacaacagcactcctcacgaaaatctcgactaaactcgaaacccaaactcaaccctcaactcaatgctctcaaaagcgataccgggaggccacaccctccctctctatttataaatgaggtaggcagcctaaaaccatgaaccaaactcatacaagaagtcctaatcctcctaggaaacctttctgtacaagaaaccaactttacaaactccaatcataccaaatttggactccttccaaattcgacttcgcatcccatacgcacacaatatctccatcgtatgccatatggaatcttcaccaaccacgtgcattgatctttagcctaagtatctcgtatgatatatgaccgtccggatatcgccttatctccaagtcgactctcgatccatcaccggcagtactctcccgaggcatcaagacacctacacatgaatcaaacaaagaaaccatattccgagatcaagctatctccaacttgactcattgttagcaaacaacagtattacatacgcatagtatccatctagaagccataaacatgaatcatctatggatatctgttgtcaaatagacaaccgcttcacgtcgaaaggcgtggttctctcaacaatagtactgcttagtgaaaaatagtatacgcatagtatccatctagaagccataaacatgaaacatccattgatagttggaaaagaaagacaatagtattgcttagtgaaaaatttttggatcaccctattatctggccctagggggctatttatagccctattacaggttccccctattaggatttagactttacaagtgaatttacatggttacctttatgatagggacattattgagggcacactgtgtcctttacatgtatgggcccctattgggcttaaatggcttggcccatctatttgccgaaatcccccgaaggcgtaagtagcccgctgggcctcctgacggtgaggttcggtactttggcgaaacccgtgcctttgtgccgaggctttcgcctcatcatcttcgctcgcgcggccctctgacaaggtcttcgcttggtgaagttggcacattccaagccacggctttcgccttgtggctttcgcccatatggttttctcctcgaccttcgccgcttgcctccggtctgggcctgttgcccaagttcttggtatacctccaacaatatccaaacaagcaacccaaaatcgaaatggacacagagtcggccggtcagaacgcgggctgaccggtctgaccgcacaatacacaccggtctgaccggcaaccattggcctgtctgaccggacccgacaatcagcaacacctgcagatcaccagcaaatccaatcatctccaaaactacttcgccaataatctccaaatatcaaaaccaataatcacatatgtcgattgttcatcacagaataagaatgaaaaacactttgattttacaatctttcccttgatgaacacattggcaaacccatcaaatatgttttgttgtttggaaaaataaaaacaaaagtggtaaaaagcaaaaaacacactgtgtactccatgctcaaaattcaaaagaaaacttctctcacttttgaaaacaaagaaattatcccttgacttgaaaaacatgcacaatctcttctcttctcccccttttgacaatgatttcatgaagcataagaattatgttcatttatgttcaagagcttagcatacatatagcatatcaagtcatgtgttgcaataaaaagaagatgaacccatccataatatagcaagcatgcattaaagtataatcatgaaccaaagattttacaactaagttcaaatcaacaatcaaaattcatgatttcatacgatttataatgcaacatctttagaagcacataggttgaaaaataaacactacacatatatacctattgcaattatcactctttcttaaattagctctagcacaaaacaaccaagagaatttataacttttattttagcatttttgctcatatttttctctcaattattccgggtacgtccttgtcatcaagactgtttccaaggattcggcacccattatttttgctcacatcgaatacgtccttgtcgtcaagactgtttctaaggattcgtattcattttttctctcatagataattttattcgcttgcacaatgagacattacaaagctatttgaggaataacaattcaataaagcacatatataagcatttataaatcaaaccatatgctagcatcaatattgcatattttcttaattcaagttatagaatttaagtgtcatgcatcatctcccttaaaaacaatatctaggccttataaaaagactaaaatacatacaagctatgctagacacaaataaaccttcatagtattgctagcatgcacaagaaaataccatatgtataaagcaaagctctttgttctcaatatttcttattgtcaaattttgattgataaaaccatgatgtacaaaactccccctcaaaccatgccaaaagaatgaattattcccaattctccacgaagaaaagcaaagcgagaagaatccaatggtttagtgaaaatatcagcaagttgcaactttgtgtccaaaaacgtcaattcaacatctcctttctcaacatgatccctcaaaaagtgaaagtgaatatcaatgtgctttgtgcatgagtgttgtacatgattcttagcaatgttagtagcactagtattatcacaaaaaagaggtactttctcaaaagtaagaccataatctttcaaagttgatataagtcaaagaatctgatcgagaacaacaactagcagcagcaacatattcagactcagcattgattgagcaacagtagattgttttctagaagaccatgcaatcaatgatgtaacaagaaaataacatgttccactactacttttcctatcaattctacaaccagcaaaatcagcgtcggaatatccactcaagcatatagaagatgaagtagaatatcaaattccaaactcaagtatatgattcaaatacctcattatccgcttgactgcttgacgatgtgaagcatgaggagaagcttgaaagcgtgcacataaacacttaacaaattgtatgtctagcctagaagcaattagatgcaacaaagatccaatcatacctctatactccttctgatcaacagcttcaccatcttcattaggatccaacacagctgtagaaccaattggtgttgaaattggcttgcaattctccatcttgaaaaatctcaaaagatcctttgtgtatttcgtttgatgcacaaatgtaccttgaggtgtttccttaatttacaatcccaaaaagtacgataactcacccatcatgttcatctcaaattccctgcgcatagtctcagcaaactccacaaccaaagcgtgagttgaacaacctaagatgatatcatctacataaatctgagcgaaaagttgattatcaccatgcttaagaacaaaaagcattttgtcaacctttcccatttgaaaactttttgcaagcaaaaagttcttaagcctatcataccatgctctaggtgcttgtttcaagccttacaaagctttagacaatttaaaaacatggttgggaaaatcaggattttcaaaacctggtggttgtttgacataaacctcttcttgtataaaaccatttcgaaaagcacttttcacatccatttgatacaatttaaaaccttttgaagcagtaaaagctaacaaaaatctaattgcctcaattctagcaacatgagcaaaagtttcatcaaaatcaaaaccctccaccagagtaaaaccttgagcaacaagtctagctttatttctcataattaaaccattctcattttgtttatttttgaaaacccatttggttccaataatattatatccacagggtggttcaactaaaattcaaactttatttctcttaaaatttttaagttcttcatgcatgacgttaatccatgattcatcagttaatgcatgagtaacatctttgggttcaaaagtagcaacaaacgcaaaatttgcaaaaacatcatgagtccttagaccttgtagtccgctcaccaaaatttctaataatttgttccagcggatgtcgtcgttgaatatgcaaaggagcaacgacttctgaagttgtttcatgttctgtaccagtactagtcgaagttgtagcctctggaggaccatcacgatcaatatcaacaaaaccagaacccgacgaacctggccggtctgaccgcacatcctacgccggtctgactggacgtgtgctagcggtctgaccgcctggcgcccaatctgaccggccgagccaacctcattgtcaaagtcgtcgctctcgtctttaaaaatacgaccatcctcccctgaacctgtgacaatgtacctacaatttctggtatagtacctggactagcctcatcaaaagcaagtctcaactattttgttagtttccaaaacaagtacacgatagccacgtgaatgtgcagcgtaaccaagaaacattccatcggtagagcgtgcctcaaacttatccaaatttctagatttcaagacaaagcacttgcaaccaaaaatacgcaaatgtgaaactttaggttgacgtccaaatcgaagttcataagtttttccaagttttgacctcaagaagtgttaaccgcctcagcccaaaattttctaggagtatgatactcatccaagatcgttctagccatctcaaccaaagatcgattctttctttcaacaacaccgttttgttgcggaacacgaggagaagaaaaatcatgttcaagacctttttcgttgcaaaattgttcaaatgaagcattcttaaacccaccaccattatcacttcgaattcttttcaaagaaccaggaaattcaagatccaatcgaagatacaaatcatgaaaatattgaaaagtctcatccttagttgccatgaagaaaacccaagaatatcgagaaaaatcgtcaacaataaccaacacatacaactttcctccaacggattgcactctagctggaccaacagtgtccatatgtaatagctgtcccggtgcatccgtcatcatagaatcaataggagcatgtgaagaaacaactatcttagcatgacgacatggtgtacaaatcaaatcaagatctttcttaagtttagcccaaccacaaacaagatccaaaccacttaacctcgtaagatgatcaaaatcagcatgtccaagtccacgatgccaaagcatcacatcctttttaaacttagcaaccaaacatgttttcacaggtgaaacaagattttcaaaatcagctttaaacactcttccatagcgagaaatattcagcacaaaatcaccacaagaatcaaatactttacttccagttttcttaaagtgaacctcaaaattttcatcaacaatttgtgaaactaaaagcaaattatactttaagtcctcaaccaaagctacatttttcaattcgaacttgtcatttaccttaacaaaaacctgtaacaagaatggcactagtagaagcatcaccaaagataatcgattcagtcttggatgcctgtttgagggaggagaaccaatttttatcaccggtcatgtgccacgaacaaccggaatccacgatccacacgttctccttccttgccaccaaagcctacacacaagaagacgtcaaagcctcagtactagggttagataaaagaaatttaggaatccaatactgagacacacaaccagtagatcaaataggcatacatccacatgcaaaaatagtttgagaatttttagaaaaatctctccgaagctggtctgaccgatggggtactgctggtctgaccgcctctgtaccgccggtctgaccaccgctcagtagccagtttgaccggtcaccggtctaaccgcgggacccactgcggtctgaccggtttccatgagggaaaaccagatttttgccactttaattttgcaactgcaatttctctctcctttttctgtttatgagctaatctgaaacaaaaccaacaagatgttcatctttaccacaaaaagaacaagtatacttttctttagaagaagatggttttgaaagatttgtttttgtttcttttagtgttgtagaaagagagggcataattccagtagacttaaaaattattttcttagaacttagttttgtcaaaatttcaccatgttcagtcacactcaaaacattaggttgatttttggtgaaatagtcatgaacatcaaaaccaacacccatattgtaactagtcactttagattgatccaaaatcatgttaagttgtttcttaccatcagaaaatctttccaaataacttttcaaataagaaatctctttttgcaaattaactcaattttcacaatctaccatgacacctttgcttttacgacatttgggggaagaaagcacttcattgattttcacaatttcctccatgtactcaacatgacctaatgcatcttttagcttcatcttgtttggtgtacatgttgagcaatccaaaacaccatgttgttgttttaactttttggcacaaatcatgttaaataccaaactagcatgaaaaacaatttgatatttttataacaactttttagtcaaaaacaactcatccaaagtgtgtgtgtgcaagagaaatccaagagaaagagaaggtcttttttcaaatgatgtgcaacattgacacctctaattttttttttcaatttcatgtattaaaacttcacaatttttgcagtcttcatcattacgaataagagattttaatctaataatttgagaattaagagatttaataatatattcctgttttctatacatcttctcacatttcttattttttgtacttaaaataagaatagcttcctcaaaagaactcacatcattgtcttcacactctgaattcgattcaccacgtgccatgaagcaaacaccggagatgttctttcccttatcttcatcttcactctcaccatctacattggttagtggctcaaaagcagcatagacttgttgacaaccaaatatggtaagtcataatccgggttcgacattgggatcaaggtggattcgataaagagattgattcgaaaaacagagtatgcatcggttgcgaaggcatcagctggagtctgcatcggctgagatggatcggacagaggatgattgatacagccgatgaaggtgatgcagccgattctgataatggcggtttcaaagatgtttctagaatcaatcaagatgcttcacgaagattgccgcgatggagatagggctctcggataggcaattgtatatattaattaggatattttatgtaatttccttagagatatgtttgggcaagagtctgccgcaaagacttatggtatcttagagtttgttagagataagcgtcgtgtccggtaaggacatatcttgtatctcaggtataaatatgacccgagcccatgtaatcaattaacattcgttcaatacaatctcggcgcatcgccacccttttactttcgtttttttcgacgagttcttgctttcgagttgagctgcatcgattcgatcttcaactagaggtaaaacttgttatggcggcttgcgttatcggggttaatacttccatctttatgatacttgaaccctgtctaagtaatccgtcgagttatcatatacatgtttcaatctatgctagttgcattatataacttgttatcggctggttctggttgttaggaaacaatcagtagagttatattttgttattaatctagattgtatcatgtatctatcatctcctgtagattctcatcatcttgtctagatttcatacttgcctttatgcttaatgctgtatcggttgagttcgatctattatgtgttatttataattgtgatatctagcttgttttatgattatcaagagagatagtatcggggtttcagctgatcttacctgatttagctttatgttttatatgtttaattgatatgctaagtctgccctttgcgttaagatcttatcacaataaattatattaggcttttgtttgatatagtatatctgttttaatatcttaatgtagagtggtatcggagtattagccgatacatgctagatctatctgatcggctatgatataagcgtttataatcttcatgttaatgtatatttcgacctaagtggtttgtactgtctcggcatggcgactgatctatcccaatcacttgatttaaatatacatcgacagaaagattgtatagcgttaatatatgtactcgatcgagtagatttagtcttaccttgcttatttgtaactgccgatcgattcacatatgacatcggctcaagaataaatgatatgtcatcggctgctggccgatcggctatcgtttatggatttaaccgtggtttcttttgttttgtttcttgttgattgcaggatcaaatcaactggcatgctcacgaacctaaaggcaagattttggacctgcactgaagttaagcagatcttccaggccagtgtgtgtttttcgcatcaacaaaacttgatcaaacatcttcttgagattctccttagtcttcttccccttgaacgtgctcttggggttgttgtccttggtcttctctccaccattgtcttccttcttgcctctcccaagcttcggacaatgcagaacgaatgtgatcaagagcaccacattcaaagcgatgagttggaccaccttttttcctgtacctaacattattcatagctcgagaaatcttgttagcggccaaagccaagtcctcctcgaactgtttgagttgctcatcggacatggaatgaatcaaagcaagaacagtagaatttgatgaagaagcaccaacatccaaagaagtcgcggaagaaaccaaagcactagacttagaatcaactttacgagaaagaatattcatctgatgtgttttgatctttgtgtaaagtgaatccaaagtcaaagtagacatgtcaacagattcctgaagtgatgtaactttcatctcccaaatagacatatcaagaccattcaaaaagtgacgagaaacctcagattatgtgtaattaacatcataagcagaatcaacagatcgaagatcactcaaaatcttattaaatctaccaagataatcatccaaagcttctccaggtttcatctcaaattttatgtattcctttttcaaaagatctcgacaaagttctttaatgttagtagttctttgatgaatgtttttcaaagcattccaaatttcattggcagttttatgttgcgaaactcgatcaaaatccgaacgagaaattccactcaaaagaatattgcgagctctgcaattattattaaactcagttttcaaagcaatagtgtcaatctgttcaggaataacatgtggctgtgaaactttttgccaaacatcataatcctcagccataatgtaagattgcatcttatcacaccaataagcaaaatccgaaccatcaaaaacatgaggcttagtagtaaacttgtttgccatggctaaaactctagatcggttaaaatccaaagaacaaaacaaggctctgataccacttgtaggatcgaatagcaagagctaagccaaccggggggggggggttaatggttggtgtgctcaaatacacacaacatgccaactaccaaactaatcctttggttccactatgaagttctttatttttttagtgaaggaagggcaaaagctttgccacttttatattgatagagaaggagaaaaaaccaactaagtattaacagggtccgagactgaaaatcggacccaaaaaaataaaacagaaaggcactactctcctgcagagattaactcaatgatttttgctgctcccgttgtgatctaggtccgtgcctcctctttaatcttggcgatgatggtggcgggagttgaggccgcatgcctgaagatcctggcattttgttcgcatcacagctcccaggaaatcaagatgatcatcaacttaagggcctttgttgggcagttcaccgtgcgtgagatttaataccaccattcttctaccgttgcgcacccatcccaatcttgcaaccgaaggtctaaccctgtccacctttgtagttcagcccaaatccttctggataatctgcaatttgctagaaggtgtagagccgattctggcacggtgcgacagagggggcaaaaatgttgattagcccaccctctcttttgcaacctatctgccatccatactatgttttggatgactagccagaagaagaatttgcatttaggcaaggcccaacatttccaaatggtctggatatagatcgttcctgctgctccatggaattgcagtctatacgctgagttagaagagtaggttcaatttgctgtcagcttccagacgattgaatccttctgatcaattaggggggcggcacgttgtatcaatgtccataggcagatgtactggcacagatgatccgcctcagttatacgcagcagatcaatatcccggatccatgtgttgaggtcaagggcatcatgcactgtccttgttttgcgtttggaggctgcgaagatagctggagtgatatccttgggcttcttattctcaagccaatgcgaatcccaaaagctggccgtctacccatcccgtaaaaggattgtcgtcgccgttgcgaagaggtctttgtctatctagtcgcaggagagtgcagtgccattccaaggcttgttcggttccgtccactcatactacaaccaccttaaccttagcgctcgggtgaaccagtccaggtctagcacaccgactaactttgtcccaactaactttgcatttcccaactgagatatcctctcctcccactcataggaatttcctcctcatcttatcaattgaatggagcatactgttcgggattttaagctattagatagtagattgtttgcgatcttaggacggacttggttaaagttgttctccttgccgctgtcatcatccaaccttgccatggcgccaatctggccttgcacttatccaacagaggctggatgtggactttcttgagcttggagaccacaagcgggagacacaggtatttcattgcgaagccagtgatgtttgcagggaagactcgtaagatctcttgtatgtcgatgccaacacaacggatgggcgtgatctggctctttttcatatttgtctgaaggccggttacgtccctgaaggagtgtaggatttgagctaagtggctcatgtctctgactgtcggccggacgaacattgcagcgtcctctgcataaagtgacatccgtaggcgtggtgttctcccatttagttgggtgagatagccgaggtcggtggccttttccaacacggcaactaatgggtcaatggccaggataaagaggagaggggatagcgggtccccttgatgaagacccctgtcgtgcttgatgggtgtgcgcggtgagccgttgagcaggacccttgtggagggtcaatcagactgatggttagaccgagagggtcaatcagatactggaggatatgttgagagcttgcactcttgattttggcggagtttggaataaaagcctaccttatagcgagttctcctacaacaatagttatcaggccagcttacaaatggccgtctattttgggaccaaacaggagaacgccaattgtttgggaccgaattattgagtgatgtagaggaaaaaagtcagaaccttcatggaaaggataagaatttcacggtctcggcagaagagctacgcgaacaacagccgaagatagcttatctttgaagcccgggactatgtgtaccttcgagttacgccactccggggagtgcaccacttccaacccaaaggcaagttggcaccacgctttgtgggaccatacaggattttggaacgcagaggtgaagtcgcttactagcttgagctcccatctagcaaggctagtatccacgatgtgcttcatgtatctcaactgaagaaatgtttgagcgtacctaaggaataggctagttctaagcacatcgagattcaagaggatttgacatatgtggagaaacaagtccgcatccttgaaaccagcgtgagaagaaccagaaacaaggacaccaggtttgcagggtccagtggagccaccattatgaggaagaggtcacctaggaaagagaagacgagttaaacgccgcccatccgcacctctttgccagcttttccgaatctcggggtcgagattccgtttaagggggctaggtttgtcacatcctgaagtcctccttcctttagctttgaatttcatcaagcctagagctaatcattaattaataaatgcgattaataatgggaatcgacatggtgggatttttgttggattctccatgtcaaaatacattaataggatttttagcggaatttttcagagccctggagataatttaaaccaattaaaatcagtctatgttattaaagaaatccctagaaatcctttttccttttcctttttcctttcccctccctttttcctctttcttgggccgcaggccccaatcctccttgctgcctgcgccccctcccgaagtccgcccttcatcactctctctctcttggggcaccgacaggctcacccctgcctccgcgccacatcccccacctccccgcgcatgtcgcccacctcccgcaccccatgcgcaactcccccacgcacccatgcccgcgagatggccaggattcaattttcgaatcccacctctctctctctctctccacctcccccactacgccggcaaaatcggggccgttcctggccacgcccgacctcctcgcccctataaatgtcacccccgctcccatgcacccaccactctaatgccgtcgcccccatctccgccgccgtcgccaccgctccggctgccactagccgccgcgccgagccgagccatgtcatcgctgccgcgggttcgaaagcgcgagggccacctcgtctgcaaattgtccgtcgtcaaccgccaccgggaacaacctttcacagcacaccagtgagcccctccatttccgctgccttcggacggcatttccgctcgcctcgcacctcttctcttcctctaagtcctctcattagctcccttagaccgctccggacgtcgtccacccactcatcttgccgtcgccgtctactgtcgtctccctccgcgtcggccgaacccctcggtgagaaccctcggttcttccccctctccctcctagcgccaccactaccgcatcgtgcgccgctgcccgccacggctggccggcccaggatcgagctgtgcccgtgccgctgcagccgtccgatctaccgctcggtagattggggccgttcggctgccgcccacgtggctgccacgtcaatgccacatgtgtgtgccatgtggtgcgccgcaccccagtccttggactcggtccactgcggaccggcgcccttgtgcaccgacaggtggggcccgccggccggctccgcttccctcctgatgacatcagcagggttctttattgcgcaataaatcattaaggagtatctgttaatagtaataaaatagagagaatattctaaaattcatagaaaattcatccgagctccgtttaagcccattgaagtctcagtaaatctaggaaaatgcaaagaaaccattaaaaatagctttgtttcatgtttcagtagtctcatcgggtgttatgggtggccaatcaaattcaccgtgattagtctcatctataataatttgacctaatggaacttgtgtagttcaagtggttggttgggcctgttgcaacgtggtgtagtgttgcgcagtgatgattaatattgcttaattcattaaaacgattttactgctttcaacacctacttttaaatgctagaattatgcaaataaaccctcagctcccttggtatatatacactacatcatacctctcttccggtatgacttgctgagtatagtgggtagtactcagtcttggtctgtctcccaccccagagttggagtatgcttcagatggaggttatgttactcgaaggagtaggcttcatccgtgccgtcaaggatgcttgtggaatggtgtcgcccgctgttcatgtcaagctctagaataagctcgcttttattttgtgctgcatttatgtaagacttttatatgtttgtaagacgtgaatctgcatgtcaactttgtcatttgtgtaccctagccggtcctagacaggggtttaatgcacattctgcttggaattctattcgggaatttctgggcgtgacagtcgacaacttctctcccaaattgtagttatcttaactcgccgaaagatctagtcaatcagagctttgagcacatacattcgagctcagggtaatatcaagtggtatcagagttttagttgctcggtgtgtttttatcttcctataaccagaaaatagccattcaaaaaaaaggtttcatccattacctaaccatctttgcgttgttgcgttgttctttttaatttttgctttgttgatttttgcgttgtaccgttgtgtcatgttgctggtcttagcattagtatgtttagagttttaagttctggtgaggttagtaccattgtcaccgtcgttgccgtgtctttgttgttgtagggactaaaaaatggaatttcggctgtcaaggttctattttttagttttcagaaggtgatctaagcaatcaatcttaattggcttgctagctgaattagatcctatcaccgccaaaatcagaagttactttatttgtgattcatgatcaaggtgctgcttcgactattagaaccagatctagattaccagaggctcggtgcacacgttgcaacaaaatggtggcaagataataaatatatttttctccacatatatcatgtagaatcaaaaatatttttgatatagcatcattatgtgcaaggaatcactactagaaaaaccatctttggtcggttgcccaaaaacaacattagtcccgattgcttaaaaaaccaggactaaaaagcatttttagtcccggtttaaaagtgcaatgatctttaatcccggttggtaacgggacgaaagatcatcttttgtaccggtttattcattgtcacgacgtggcaggtcccccactatttttaatcccagttggtataaacaaccgggactaataatcagatttttagtcccggttgttataaacaaccgggactacaaatcagtttcccacgtctcgcgctctctctctctctctctctctcttccatcgttctctccgcgcgcatctgagagtcctcacccttatctcttcctcccctccactctttatctctcccttatctcttcctcatcttcctctttcactctcatctcttcctctccccttccacttccacacttcttaagttttcctctcttctcttcctcagatctgcgggagaagcagacggcggcggccgggcccgtgctgggtgggggcggtggcggccgggcctgtgccggggaggggcggcagcggtcgggcccatgctgggctggggaggcggcggtcaggcggtggcagagcgacggcggcccggcgcggaaggccgtgtggtggcaggcttcatggatttttttttcttttttccttctcgttatgtgaatgattgtttgttgatttgatctgtgatttgagaatgatgtgtgaatgatctgtgatttgttgttgtggatgatttgggatgttgagatattgagttgttgatgtggatgatttgggatgttgagatgtgtgaacaatctgtgatgtgcgaacccaatctatgatttgtgatttattattttctaatgatttggagatatttggcgccagaaaagaaaaaaaagaaaaaattaactttagtactggttggtagcaccaattgggactaaagatttagtctctttatttcaaccgggactaaaactggacatcttttagtcccggattcgtagtcccggttagaaaaccggtactatagggggttcctaaccgggactaaaaagcgtttctccagtagtgaatctgttcacaatatagtcacatacttatattgagtaatataaatacaatactacatttttttctcgctgtatataagtgcaccaagcaatattacaatattagatatactattttccaacaagaatcacgagggggcgcaaaggttctctatgccatgaatgcatttagtgttgcacctaaatgtcatccccttaagtatgggcttgactatatcaagaaccttgataatcactacaaacaatagtctataggtcataatcataccacaaagtactgcaagatctacccattttgaatgacctgtttccacttgaaataactcagcaataactttctcgccactaactgttatgggtccttcaaggttgagtactaaacctaagaactcattcttgtaaaacccctgcagtgcatacttgtgaaaggagatgtagtacattgggtacttccatactatgtttggaaggctattaggaagttggaagaatccacttgtgagcatcataataccttgtataccagcacctgttatgatccccattaggaaatctggtacgatggttgctacgatcatcatcaggccttccactagcattgtgcatgaacaaagtactaacgtaaaatagacaaaatgttcaatttgcctttgtaagccactaagataatacgcaattgcaccaggtattatggcaataagaagaagatatggtgtggatgacaatgtattggagatgacaaatgtggttacaccataatgtccatttagcctttccctgctaaagatctgagcaacaggaagagaaaggtagatatataagaccacatattaagaaaaatgtgatgcacaaatgcaaattcatttgataaatcaaccttgcatatttcgattttttttatctacatgaaatgtaacctattgtacagatgcgaagtatttaaattattttaataaaattattaaattttcactctggaatttttagtaaataagttgggggtttttttatatatataataagtagaggcttcacaagaagccctgcattaatcctacaagctagaaaaggtaaaaattcccacattaatcatgtgtgcatctatcaaacctatggccagagaatgtccaacaaatagtgtttcgatttgttaagttcggagtttataatataggtaggtgtactcagttggagttatgcgttgtagtagtttttatttaacaatctaaaatttacgaattgacaaatattaataacaaattaataaatactgagttgtagttggtatgtagtctcagttagtttatttttcacaatctgattgtcttgaaattcgaaattaatgaatattaagctgtgctccattggatctcaataatattattttcatgatttactaattctagaatctgatttactatattgtaagctgatattgattgtttacaatatgttgtaagtgcggacggagtgttacatggctatttaaatattagtaatggtaattgagtataactcaattcactaaatgaaagctgtgggtttgaaatatttttatccagagtcaaaagacattgcaagtatttgtgaattttattaggatgcataagagagattatttaaggcttttctatgcgatgcttcacatgatttcttaatatcctaaattgaaaatgaatttatttccattactctctcttaattaaatagcactatcccatgtccttgatggaaaatttttattcgtgttgataactttgttgaatcttttggtacagtagtatgaatttgaataatcaattccagacatcgtatccaagttcactgacttaattttactatttatgcccgttggtctatatgtgtgttcagtcgattttaacaaattatatagagtaaacatgtttgctctttctgctaatgacatatcaattcataaataccttcatatcctccacgaaggatgggaaccctccaattgccattaaggttagcatggtgctaataaacattaacattgatgacctagcctgaaatgaagaatcaattaaaattaattaataaatatgtttggtacatgcatactctatcagccatttgtgtgaaaacagccaacattttatcttcacttactcgaattgaatcggatccatagcccatattgtaaaatatggtgccaaggcaagcacttatggaaatataaatggccatccgcaaccaatagtatccaatatctctatacatgttaacaaatgaacgtctggtaaggacaagtgtcttggtaataaaaccagctcggtttcttccaatcgtcacccgatcctaaaagaatatgaacataacttgtgacatatatcccaaacatgtataattgtgaataagtatgttgtacatataaatataatatgtacacaagtttagagcagaaaccatctcgtttatgtgacgcatgtcctgttttgcgacttccgaagtgttggaggatttgtatgaattcaccaaaatgtctattgcttcatctgcaacagctggcatgcaccggagtctgtcttcactctcctgtgtgttagcaaattgaaaggtaacaggtcaaaagcaagcaaattggtgtcacccagttttgttgccggacatttgatggtgtacgcatcaacgagcaaatgtgaaaaaattatagaaaaattagacatgtatcccaacaatattatacatatatgcaaatttgaagataagattttacacataagtgtaatattattggaagtatgtgtccatgcttttatggaattttctgtgatatttgctagatgatgtacacggagtatgcatgaaaattttgtgcgcataggatatattcccgtactttcatagcatcttttttattttatttttgttcttttctcttttgttgctgggctgctgtgacattgtgcagatactgtttgcagaggacagatttgtaaataattactcattatccaaaagaacatgatatttcattaatagtgcttgaattggagtcttggaccaactatatatctaaccttgtcaaaatctttgttcacagtcctcaaaaaatgatctgatggattcctcattggagggcaagggtagccatttgaagcaaagaactgcaaattaaaccaactattgcaagctgaaaacagcgataacatttaactaattaaacgactatatacacagaatgattctacactagatcgactaacctcggcagccattgaagctgggccaaagaagatggtgttcccagcggcgagcaggcaaaggacatggaagagctcgaacacctcgctgcatggctggtgcacgacagcgacgactgtcatgccctccctggcagcgaggcctatgatgcgactcatgacatggaaggaggcggcgctgtcgaggccgctggtgggttcgtcgaggaacagcagccggggacgtgtaaggatgtcaaggcagatgctcaaccgcttttgttgcccaccgctgatgcccttgcttgaccgcccgccgatccgagtgtccagcgtgccggtgagtcccatctccctcaccgtttcatcggcgcgccgcaacttctctgccatagtcatggtgtctggcagctggatctgtgccgagtagtagatggcctcgcgcactgttagtgtcgccattagcacgttctcttgtgtcacgtacgcctgattgattcatgcattcacaatacattcatgtttttagatcagacaccagtttttctcgttctctctcgctggctctatccttaatatttgagctacgttaatgtttgcagttaatgtttgcagtgtcatgattgtaaatccccctaagtctaaagaagttcggtagcatattggattgattatactattacactagctaaatatatatccctgttattaatagtgtaattttttaccatgtgaaatttcacaacatttttattgtagacaaaattgcaatcatcatctatacacggctaaaagatttggctagaatcatatgttaatttatttttatcgtagtgaacatgttcgcttcttctcgactatggggggattagaaggggaaaaagtacgaattatctctcccccccgaactatcgcggtcgtccgaattacccccctgaaccacaaaaccggacattcttcacccctaactatgcaaaccggacgaattaccccccacgacccaatccgcagtggttttggtctacgtggcgtacacgtggcaatccagtcagcgttttattgtggggcccacctatcatatatatactctatctatctcatgtctctctctccccctctctctcgggtcgtcgggctcagggcggtcggcgcgcatggcgccgtgcgggggccggtggtgggcggcggcggcgggtcgacgagctcggccggctccggtggcagcggcagcggcggcgacggcgtccgcggcgagatgtggagctccgacacatcggcagtgcggtggacgcccccttccccacgcgccgctgtccacagcagttgctgccccgccgtcgacgcgtagttgatgaccccggccaccgtggcgttgtaccgcagctcgtacgcctgcaggaccttgagcgccgcttccaccgcagttgtcgccgccgccgcagcctcgccccaccccaatgagtgcgacagggccaccgtccatcgcctgcccccgtgcatcgccatcaggcgcccaccgcctgctcccacgcgccgtcgtccactgtgcgcccccgggcgtcaccgtccgccgcccgcccctccgcgcggcgggcaaccggtaggttgcgacgggcgcgacgctgaggcgggaggccgccgggatagaaggtgggcgcggaggaaatggtgagcggcggtcgcgggaacggcctcctcctccgccaccactgcctctctcttcagcctctcttgttcctcctccccgtcctcctcctgacgccgctccagctcccgacgtgcgcctccgtccgccgtcccccgtcctcctcccgacgcttccggccatggctcgcctctctgccatggccgccggcgcccgcctctcccccatcccgtccacctcccgcgcgccgtccgccagcccgcccccgcgccgcgccatgtgtgccagccaccggcgtgcgcaccgctgctgaccaacaaagagagagaaagaaagagaggaagaaagaaagtggtgtctgacatgtgggtcccaccattaaaaaaataaaatgctgactggactgccacgtgtacgccacgtagaccaaaaccaccgcggattgggtcgagggcggtaattcgtccggtttgtatagttgggagtgaagaatgtccggttttgttgttcggggggataattcggacgaccgcgatagttcggggggtaattcgtacgttttccatcaggaggtgacagactcttcaataatactaatcaaaatgggctgtattaattagatgctccaatagttttctcacttgaactcaccgaggttccaaatgcaagttgctgacatcgaccgttaaccagaatttgccctttcatcttcaagtttgaatccaatcttcctgtgtatatcaatagagtacagatcgataagatgttatgaactgaaatacggcgtattacaacagaaactcagctcgaaagacacaatttaatataaccgtgagaaaaaaagaaggaactctataactgagacgaagaagcactaagactcccataaggacgaccgtcccagtgctgtaagacactgttaatatatagtgtctatatgccccacatcatctagaaactatatatagcactattctattgcacacatatcaccaatttactgtgctaatttaacatcaaatatttgatcaatacccttaatattatatagaaactgggtctcaattcaagatctagtttcatcgtttcattcatttaatctgatgccacattatcttttacaataggtggcatgctatttaacactatagacatcagtgttgttgggaacttattgcatgccattggtggcatgctaacattatggacatcaccattgttggagcttaatgcatgcctcgtaatataaagttgatgatacgagatagataaacaatataattgggggatcaaaatagctatatatagaggatagaggaatttctaatttgcttccatacataaatggagagccaaatcacaaataaaataaagtaagaggagagaggaatttcttttttttttcagttttcacacataaaaaagatacattaggaagtcatgataagcacggaaactctaatgggcgatcaatcgccctagctattggctagcgatcgccccattcccccctccctcgctctacctggttttcttttttggcaccgcattactttcctattttagtaaatttatgcacctaaagtttatacacctagggtttatacatctaaagtttagagagcaaaagtttataagtcaaaagtttatatatccgattcaaatttgaatttgaattcaaaaactttttatatatagtatttctatacatctaaaatttatagacctaaagtttatagacccgtttcaaatttgaatttgaattatatctgattcaaatttgaatttgaattcaaatattttctatatatagtatttctatggatctaaagtttatacacctaaagtttatagatccaaagtttataagtcaaaagtttacatacccgattcaaatttgaatttgaatttgaattcaaatttgaatttgaatttaaattcaatttttttatatatagcatttctatccataattttttctaacttttgtttttttaaaaaaattttgtggtgtactgtagtaggaagataagatggggaggagaaaggggagaagagggaggaatcggcataggcggaggggagtgtgggtgatcgctcactcccagcgatcatccgcgcattagcaggaccctgataaacatggtataagtacaatatcaagatctataaagcaaaattaaaagcaaccacaagccaatcttagttgcttgtactaacggataaggtgtccctattttagagggaataccttatatgccatttaaaagatattgagtttctatgtataaaagaaaatatattttccttttatgccaccaaatgaatttttgttactcgtagacgccactattggttgatttttcggatgagcacacaatccgaaccaaataagaagataagagataaggttgttttgtgatcggttaaaagaatttttgattcctaaattcaagataagctcccggcctcaccaatgctataaaagagaacaaattgtaggaggagaggacactcaattcttgccctatctaatctaaaaccctaattcgcccccgatcggcttaagcactagaaggggttcgttcggctatctcagggcagtgccggtggagacctaaaggccgacgtgatctagtgaggtaaagagaagagaaacagagagaagaagaagagaaagaaaagcaaagacaggaattatcaatgtcttcaaatccgacaggtcagaaattaatttgtaatttgagagtgattgatttataggctaaagttaagatctttctaatttagaactccaacaaccactaccatcttttttgggaaaatacttattctctgatgcccaattaagagaagaaaaattgggcaccctgacattaccacagaccgtatatggctagtttcttctcattctcttctcttcactttaattatattttattttaaactatttatctaatatatgatccgatcatactattctatttatttattgtaattaaatcttcagaagaagatatcagatgattatactctgataaaagaaaatcatgtgtttcaaatcgttaaaactgccattcttatcactttctttctttttctccctccctttatagttcatattttctgtattaataattttcacgcagaagaagtttgagatgggtattctccaaacatgtaccaccatcgatcgataaataaatacatataaataaatgcatatttatcgataaatatatacatagataaatgcatacatatatttatttatttatttaaaattcaaaattttaaaattttgagtgaatttttttatttcataccttggtgcccggagaccatggtgcccatatgggtgttatacatataatctctccgtttcaggttacaatacgttttgattttggtcaaagttaaactgttagataaatatagtaatataatactaaattagtttcatcaaatcaataattgactatattttcataataaatttttcttagattgaaaatgttactattttttaaaaaacttggtcaaacataagacagtttgactttaaccaaagtcacaacatcttataaccccgaaatggaacgagtatatacataaagaagattaagtctgcaaccacctcagtagcacctgaggtcctgggttcgactccccatgggagcgaattatccaggatttatcggcgctgtgctttcagtggtaggcgacgtacccgtcgacagcgaggcgcctgtggtgacttcgtcaatctctcaagaatttgctagcccagtcttcgaagatgctcatagagatagggtttacgtgcgtgtgttcataggggtgagtgcgcgtgagttatgagtgtctgcgttgtactgtgtaattctaaaaaaaaaagaaaattaatggcgggctggataagtttgctaataacagcgggttggctgacttaacttcagtcagcatcagaaaattaattcaccctccaactgcctcaatgtgaaatagttaacgggtacgattcagtatggccgagcagcgatcagcatcgatcgtgcaatcattttccacttccaccacatcaacttggtaatcaatacgttcaacacgtaagttacgtgctgtgtatctgtgtacacgatatcgacgtgttcttcgaagaaaagccattctctttaatttcctaccggcccaaagattcgcaacaggaatgtgcaaatatctttctatctcgctccaacagtaccaattccagaaaaaaaaaattaaattttacacaatttcttccctcacgccgtcccctcgtgggtgggtcgggggcgaaaacctagccaccataggcatgccgtgcagcaggctgagaaggcggttgcggtgcatttggttgctgctgatccgacaccgtcttggctggatccagtttcccaatgactggatttggcatatccttggtgggagcagtgggcacaagtgggttgaacggtagagttggctgcgcgaccgagaccaccggttgagtcaggtgcgaccgaggcgatgcgggcgatagcaagcgctgcagctggtggcaggtctgtccttctagccaatcagacctttattttctctccatgaagctcctcgcctgctatggctagccccttccgatcgaagggagctcttttggcaagacgatgacggtggtgattggggaagagggtgctctatctgcgcggcctcgtgggagatcgcgtcatgctaggcggtgggaggtggtgctggctggtctgggctgaccatcactgtggtgccgatacgatagagttgtaggctagcggaggtcgttggttggtggagctctgggtggcgatgacaggtgcgggagaggatgtagcaggtgaaagcctagcttggagttatctgaggatgacgtgtttgggtttcgtgatccctctttgtggagttgtcgggctgccttcctctcccctcctgaccatatttattaagaccgggccggtaatgaaccattagggcactcagttaactggtttgttggttggaccggtcaaaccaccagtttaaaatggtttaaataaatgtgtgctacaatactaccacaataggcgacatgccgtggtggatgagtctttccatgggaacaaggaggtcttgggttcaatccctcattgcagcagccctcagcagtcgaaccacctctagttcggcaaaaaaccacccggtttgatgggttttcgccggtccgtttgcggagccgacgcagccttagttctggttttttctggtcgaactgccagtccggtcccggttcttataaccatgctcagtccttttggaggggcgacgttggtgccaaaggcgtcttggaggtctacatttccccacctttacggcctcccctcagcttggtcttgggtggtctattggttgttgtcacaagcttggcgtgggggatgagcggatcttcttgtctcaccctctccctgctcaaccccactacatcattaatcttttgtttggagttggttctcggtggtgcattgtgatcccctttcttgtcccgtaacgattggtcacgcttagcggtagtcggtttggtactgtgccatcttcgaggttgtgttaggagccgctagcaagcagtggtggtgtgtttgtttttggtttttcctagttacacccttcagtgttataattttgtgctccctccattctagattataagtattcgtaggtagaaatgaatggtggagggttgtgattggttgagtagtagagttaggtagaaaaagtgaatggtgaaggattatgattggttgggaagagaatattgatagagaagttgttatattttagtacaaatctttagggctaacagttttaatattttggaacggagggagtttttttttttcttctatatcaatgtgaaaattcgcattatatcgtgcaggtcgtttcgaaaataaaagtgtcaattcctgaacgccgttaattttcatcaggggaattatcgacagtaattatgcatggttaccgtgataaaaaagatttgcaggattctttaaattttttatattctttttagtttcctctggtagagttccattcttataaaaatccaattaatgtgttctttttttttatttgaggacgatggtgccaaattcggagaattctttaatatgcaacaaattaagtaatggacggcttctttttctttttattcttcgtcttcttcttcacaaatcgcgggtgaccgcaaccaaactacaaacaggagcaccgtgcatatatttcaaacgtggaaaattacaggagggaaatgcaaggtgaactggaaaaggacgtgcctcccaaccacactaggaggactaggggttctgaacatggagatgtttacgagggccttgcgactgagatggctctggcatgaatggaaacaccccaccaagccgtgggtgggactagagacaccgtgtgatgaaacggacaaacttctcttcgccgcagctaccaaaataacaataggggatggaaacacgatccgcttttgggagtccgcctagctggatgggcaaagaccaaaggacagcatgccgctcgtctatgcaatttccaagaaaagaagcaaatcgctacgtgaaggcattgaaaatgacacctggatcgatgacctggagctaaattggagctaaatgggaacactacttttacagtggaactgatcagccagcttgtgtccctatggagcgcaacccaggacatcatgctaaaccaaaatgagtcggatcacatcgtctggaagctctcgaatcatggagaatactcggcctcttcggcatacaaggctcagtgtctaggaacagtcggcaccaacttcaatcccctaatttggaaatcttgggcccctgcaaaatgcaaactttatgcgtagcttgtgattcaaaatagagtctggacttccgatcgactagctacaagaggatggccaaatagcggagtgtgcctcctatgccgtatgacgaacgagacggcatgccaccttttagcttcctgtagatacaccagaaggatctggagactgacggccaactgggtggcttatcagcaattggatccgagcaattgggagccatgccaaagcgtacacgaatagtgggaaatgttagccaataaaaggaaagtgcccaagaaagggctgcgatccttaatcctactcatagcctgggaaatctggaaagaaagaaaccaaaggatcttcgagcacaagaaaacggcggcccccaaccttatggcaaaaataaaggaagaggcaagaacctggataatggcaggcacaaggcgacttggagaattcttaccagcttaatcatagcgcttatgtaatttgtacagctcttttttttttttgcctctaggggttgtatttttttacgcctatatctaatgaaatagcacagtctcgtgctgattcctttcaaaaaaaaaatatttcaaacgtggaagactcgttacggttggacccaaatcgcgtcatgttctgactgaattttacagaaaggtcagtggacagggatatacacatttgtcaccttctcaaattgattttgctattttttctacaacatatttcttccttggttacgttgtgctcgtttttttttccctctctatacttggtcactgacatatgagcccaagggtagtgaggctcaaatgtcagtgacaatgtcccactatccacagaaatgttgaaaagtattgtatattccggtgtttaaaggtataaacgacctcacattagcaaaaatctattctcaaaaagataacgtcctatgcatatagttaaacctccaaacgttaaattaataatagaagaaaaatactacaattaaattgatctgtgaaaatgatatatatcaatacatttgtcattggaagcactttaatatagttatttctttaaaaacttttatgaatatataggatgaaattctgactagtgtattgtagattacgttgtgatctgtagaactttaacaaatgaaagagcaccccaggtacgtagtttttttttttttttgcggggaggtacgtagttttactgatgtatggtactaatagtgtggttggagaatatatattattcgacagtttattgctataaggattgtcaaatatgtagacacacacacaagacgagtgaaattgtgtaaacctcaggtcgatagagagatgcatatggatagagagaaactgagatcgacaagtgttaccggcaagggtgtcgagcagcgtagtcttgccgcagccggaggggcccatgatggccaacacctcgccggggcgcgcgctgccgctgacgccgttgaggatggtggcggccttccccccgctgtccaccgccgtcacccacacgtcctcccacgtcaggaacacgcccccgtcgagccgctcctccctcccatctccagcgacgacggcgataccgtcgaacgcgccggcgcagttgtgctccggcgccggtggagcttgtacaggaggcggcgtgtcgtcgggggcagcacgcccgcggacagcctcgagcacggtggtgaatggggaacgcaggagtttactgacgatggcgccaccgccgccggatgaacgccacagcgggcgcgacgggctcggcgtcgccgcccaacgtggcaacggcgatgtcgccatgctagctggtgagacagtacgtggcgagctcgtacaattagtcagtgcaagtgacacaagtgaaaccactagtgtgctcttccgttttagcctctccaatgaggttattttccacttgcagcatccatatccctatatatataggcatcaagtttaattagagtttgttgtgatgtctgcgtccgtcagtgttatggtggttcgtttgtaggttaggggtggtttggtgtgaaaatgaaaccatatctggcgtaaatgttctatttcttcgaataatggaatttatggaattcaatttaaaaatatactgttcattcaattttttttcacatattcaggacgcaactttttagcaaaactattccgtcgatctcgtacaatctatacacgaaaacgacgtatgggtgacgaaacggatggtgtggaagatgctagaccgaacggtctcgcacaaccaacatgcgagaccgaaagagcagtattagtgattaattatcaattagcaaattaattaatcactaattagattaactaatcactacttaattgctaatcaggatcattagtaatgattggcgtattgctgcggtatcgctggttggccgcgcggtctcgcgactttgccgcgccacaccctgcagcgccccgttacgcgagaacgacgttatattcctcctaaataaattatatcctgaatatttatgaaaaaagttaaatgaacactatatttgaaatttaattctttatttatgatctttgcttaaaaatcaatactggagaactgatctcttgtgggtaattgaaaaatcacatttgtcccgattccaatgggaaccggaacctaacaaaagatagctcttattcagtgagatctttttacttaacactcaaaatgaagcagtttgtcttcccttataaaaagatttgtaaggttaagatacctctgaagactagagtctttctctggttgtttcttaaaaacaaaattcttaccaaagataacctgtacaagagaggttggagaaaaggagataagttgtgccaattttgctctagggaagaatccattcaacactttttcttcgattgccctactgcaagaataatatggaacattgtgatatgtgctttaaacattaaaccaattctgaataaaactcagctatttggtacctggttaaccagttttgataaaaacatgaggaatatgatgatggtgggggctgctgctgtcatctgagctatttggaaaacaagaaataaagcctgctttgataacattctcccaaaagatcccattgaggtggtctatttagtcggtaatctaattaaatcttgggctattttgcagaaactggaagcaaactgaagaagattggagctgggggccaggctggtaaagcaggtggcaaatgacatcttcaactaaagatatgaatggaggccctgtgcaagaagattggaatgattctgtctctgaaatcttgtctttgtctaccgatgtaacccccctgagttctcactcacttagcttttgtctagtccctgctgttgggatcctggtaacgtttgctagtttcagtttgcttgctgacctgctgttttcaggtttcagcttagtttctactgaacctctctgcttttcttttttctcttttggtagcttgtttaagactctatgtgccgttccattaatggaaaggggggctttcaggccctagttcagaaaaaaaaaaggaaccggaactaaaaatctttttttccccggttaaaaaacccaacaccactttatgatctttagtcctggttggtgtaactgatttttagtcccggttcaaaaagcgtctggcaccctactatttttagttccgtatcaacgcgtcgtatataatcccttgcacttatcctctcctccttgatcgcaaactccacccttttcctcctcctcatctttaacttcctctcctacctttcatcctctctcctctctctctttcctctctcttatccgctccttttctttgcagcactagcaatgaggaaggagcgaaggcggtggcggccgggcgcagcggcggcggcagccccacgtagccgtgctaccagtggcccgcgcggccgcgttgtcggctctggcgctggtggcggagcgggagagggaaggtacctggcgcgggtgatgtctttgttgattatctgtaaatttattgatttgtgaagtctttgcatctgtaaatttatgatgtcaatttgagtatgtccatccaatctgggaatttgtggatgattttgtgatgtttctgtgaatgtggatgatcttattgttgagtttggttcgaaatcaatatgcaaacagcaaaaaacaatgaaaaaaaagaaaaaaaatgtagtcctggattcgttgtcctggtttgaaacctgagactaaagagcattgcaaaccgggactattgtgggttttctccagcagtgaatgctacagccaatttatacagagtttgtaggttgaatgactacgaaggtcaagaaggtcaaggcatctattctgaacatgcaaaaaactagattttcgccaggagaatcctctcctagacctgaaagtgatttggcgcatcatggcatcaccgacgttggtctgatgaaaccgtaatcgccgtatctggtcacaccgatcaatgctattgctagaatggcaaccgcaccgtgatcaagcggaggggaacagcggatgccgtggagctaacgagggccatcggcttcaccaaccccgtctggccgacaagacgtccttccgtccaacaaagggggatggacacgatgaggtccgccggcaccatgctaccgattgcccctagccttttatccgcatagagctcgtctacattgccaccaccttgcagatctggttccgcctcccacaggcgtctacccccacagacaggagaaagctgttggtgtgaaaatcgtcgtacacacgaaggcctaaaaattttgcttgctctagtgcaggtcctatcaaataaggttcacacaatgccaatacaactaacaaggataaaataaagaagattagatcaatgggccaatcgttcatggggtcgatatagtatggtttgcccatgccgatactgatggaatttcggatcgatcggctataactaatggaattcaaaagtcagaataataaaactctattggctgaaacttagatacaatatatttataaaatcttctaatattattataatcaatcttgatagatcagacttaaccgagacgggataagagtgaaaataataagatagaatcttgagtaaataaatatatctttgaatatgagctgatatgtttgaaataaaacttatcaacactctatatagaagaaagttaactgatatcaatcaaaacaagatagaatataaatcatcaaaaactatgattatttatcacaatctagatagatcggacctaatcgagacattatcacagtaactagctgattataataaatattgcaaatttaatcgatgcaaccaattataatatgttaagcagatacttcatcggctaaaactcttatgaaactatgataagaatctatcaacttgagtaaatgtaataaacacacgaaaacctagaagattagagctaagcagaatagttcggggttaacattgtgcttaacggatttaaacgagtctatgaacatttttcagggtgactgatatagaaaccataaacttagaaagcagaacgaatcagagcaagagccaatatatttgataagcaatgcaagcaaaagaagaactagtatatcgaacataaccaaggaagtactaattcccaatacaagcgaaggattttgacaaaacttactttcttgttggagattgataccgatgtagcctatctcataaacaagaacttgtcaagagcaaaactagggtggcgatgccctaaaagttgaatattgaactgttattgtttacaaagaccccaggtgcacatatttatacctataagcaatactaagtctgactctatcacgatcgaattgatctaaaactctatatctaattaaggaaattattacagactccgactcccacactactcatatcggctaaccattacttaaacatttccgattctaacacgactccataggctcataactctattaacaaaatagagttaatagagcccaaactgatccctcatcatgtcggctatcatatcagccaaaggcttctgttgaggtaccccctgaaattgctgttgcacttggtctaactagttatagtgaggcaaatattggggtagaggtgatccccctagccgatactgcacctaaggtgagtgaggctgatactagaagttaacattgccccccatgtgatgctaaggagactgatgcaccatatggatatgttgatcaggaacaaattgagagccaacaggttgatgtagttacggaataggtgattgcagtgccacggttatctgtggaatcggctcaataaccggctgccttggcctaaacatagaggcgacttgatctggagtaattcgggggatgttttgccctatatgttgcggttgttgtttgaccagaacgtgaggattaaaccctggttgccccggcgccgatgtcgacgcaccatgtttcccaggagctaagactgacactatcggctgttctggggccaaacctgagataggccgatgtttatcagaactgagagtcttgtattgtggaaaaacaccttctggaagaaaaactggtcccttagcctgatgctcaactatcgtgccatcaaccacatatttaatcatattagttaaagtattgacaagcactcctgactagttgatcaatgcgtgacgaacaacataaccaatctgatcttgcaagtttttgaactcttcaggacttccttcctgcttattatccttgggttcgacatctttagttgagcttgtccctagctctccattgtttggcagcactatcttgtacctctgaatcactgtacccagcgtgtctagacaaatgaatgtaaaagttggttctgcatgttcatcatttgttaatactctagggcaggtccaaagaattgctttcgggttctgagcgtgctagttggtatgatcctgcaagcaacaagaaacaaagaggaaacaaagttaaatccataaatgacagccgatcggctggattgccgatgacgtatcgtccaatattaagctgatgcaacacgtgttagattggcaatggaatatataagatgagaaaagctagatccacctgatcggctgtagatattaatatgtttaaaccaagtgattgggatagatcggatagtataccgagatagtataaaccacttatgtgtaaaagtacttcaaggtgaagattatatatattcatagcatagccgataaggcaaatctgacatgtatcggctagtactccgataccaccttatactaagatatcaatatagacgaaatataaagaacaaggaatcgatctaataccaggataacctaatcagaccggtaatatagcttaatatatttcaaatgagcgagatcttaatataaaaggcagatttagtataccaagtaacatataatgaacaagataactaaaccaggtaagatcggcagaaaatccgatgctatctctattagcgatcataagacaagctagatattatgattcagatcattacttaatagatcaaacctaactgatgcagcattaagcatgaagagaaatataaaatctaaacaggacgatgatagccttttcaggatgggagatacaccatataatctacctcaacatcaatatctagcccaatcgtctatcttcgatgatacgggccggccgatgaagttagatagtgatatcgatctagattatatagcatatatgataactcggagattcacataaacaagattagagtgtcatgaagatgtaagcactaatcccaagaacgtaaaccgccataacaaattttaccttttcgccgaagatcgaaaccgatgcagcccaactcgaaagcaagaactcgtcgaaacaatgaaagtagaaaaaggtggcgatgcgctgagaatattattgaactgatgttgtttgtttacaatgtatcgggtcatatttatacccaaaatacatgatatgtccttgccggacacgactctatctctattataactcaaaatatgaacaagtcccttaggcggactcttaccaaaaatatctgtaaggaaactactaaaatatcctaatgaatagatacaattgcccctaatgaatagatacaattgccctttctggattcaatccatgctttgcaatacttgcgtagagtttgaaccatcctcggtaacgatcccatgactgctttgccgggatcggctgtatcggctcctccccgtccgatcgggtaatagccgatgcagacggtagctgatacaactcttagccgatgcgggttctgtttctaaggctacagatcttcttcaaatccgtttcagttcttactttggatccaatctatgatttaccaattttggtcgttaatagcggcggcgcgcggccatcctgcgtggcgccgcggccaggcggcgtcggctcatagtggtggagcggcggtggcgcggtgataatttaaatttaactagtatatagaatgatgattcaaatgtaaaactaattaaggtgatatgactttatgaaagtagaaaagtattgagatagtttggacctagattaatcatctaaaggctaaaaataattgaggtaatataaattaatgggagaagaaaagtagagagataattgggaccatagattaatcatttaagtactaaaaataattgatgtgatatggcttaattagagaagagaaaaatatcattaactaagtgaggatgaactatagaggtacacagtatatcatgtaaaaataacgaagatatatattaaaatattatatggatcatgtgggatgatgatttaacatgcttgcattctaaaagctctaaaatttaataaattataaaattatagatattatagcatgtttacatgatgtttaaatttaatgattgttagtggatgatgatataacatctttttagtggatgataatgtgacatctttgcatgttatgcttttagagtcagtgggttatatctatatagtaagagaggattttagactttatgaaaggttgatggatgtaaaattggctattctctattatttaattaatgccatgattttcttttgcaaactattctgtactatttaattatcctcggttttcttttgcaaacctatgttttacatgattttgcattgaaacgttaaatatcactacctggaaaaccggccgttggcccatttttctaaaacatactatacacaaacgctcatatacacacgtacacactcactcctatgaatatatacgcacgtacatcctacatatcctgagattgataaagtcaccgcagacagctcactgttgatatcaatatcgcctaccactaaatatgggacttcaatccgggtagacaggttggtgttaacatctaagctccgcccatttttagctgtaattgtgttgctatatgtccttgtcttatataattgattaagttactgtgcgaacaatcaagagcttgaaattatcataacagtgggagaaaataaacattatttacaatgttgagatgggatgtactccgatcatattcataatataacagtctagattaaaacatagagccacgttttctttcaaaaagaaaacaaaagatctccgtcaaaatatattttacaaataattcaaattaggattagattattctaggaataggcggcaaaaaaaattacattttactctgtaccaaacaaaacagatatttttcccatttaaatgtaactagctagtttatttggaccacaagtgtgcaggaggccgcttcaatgtttttgcacaagaaatattcgatctccagtcgttagttttttcttcttctatatatatgcatgcctctcggaccacatcaattctttggtgtcctcattattctcctgtccacacttaatataaagattcgacagataagagtccacatctgttcttttgccgatcgacatgcttttcacatggcaatgtataccatatttgattgctgcggcgacagatgtgtgttggttctgaactttctcttgctctgcacttctatccgtcagaacgtgataaaacggcccagccacttgttgcatcccacatctcctgccgctcactgcttcgcccacagaaggatttgtattagaaaaatcaaaacttgaaggaaaaatacaacgaaatagggaaggaaaccacattaatatatatatggaatttcaaaccacacgcccttaagaaaatggtgatcacatatgcacctgcatacattccacataagtcacaattgatcacatacacttcagatatatacatccacgtacttaggccctatttggatcatctaatcactagactaaaattaatccctagactaaaaactttagtacctactgtttggatccagagactaaaagggactaaaagcacgtggaccgaggaagagagaagagagaggctgttactttagtccctataagtacctccacgagggactagtggattttagtcccaatatacatatttagtcatccatgtttggatccttagggactaaaatggagggactaatccattagtaccataaaccaagcagggccttaagcacattgcacaaatatcacaagtgagatggcataaaccaaacctcgggagtcttcaataaagcaagccaacacatgctaatttaattaaaaaacaactaactattagcgacaagtcagaaaataaagataagagaaatttcatgtacttgaaaaagtaactcgaggtacctaaattttatactatttttttatatctcaaggtagtacttagaggtactagatttgaccctagaaagtgtggtaccttccgatactttttgatggactgtaaaattacttaggctgtgttcttaccccaggttttccaacttatctcttttgttttccacgcgcaaaatttttaaactgcttaacggtgcgtttcttgcaaaaaaaaattatatacgaaagttgcttaaaaaattatattgatccatttttaaaaaaaaaatagctaatacttaattaatcacgtactaatggatcgttctgttttccgtgcgcactgtaccggttgggaacactctctagcgaacacagccttagtttgttatctactccctttgtcctaaaataagtgcagttttaccttggtcatgtccaatatttgaccgttcatattatttgaaattattttatgatcagtattttcattgttattagctgataaaacatgaataataccttatgtgtgactaatttttttaaaaaaatattataaaatttttaaataagacggacggtcaaacgttggacacggatatccacgactgcacttattttaggagaggtccggtctcaataactaactatggtatgtactcaaatactcgatgggtgacaattcaatcatcccgcctcctgctcacctcctgggtagtccagccatctgtcaattctgctacaggcagcagtgccgctctgggccagtttcttgtagcgaaagccgggacccgatccggttgagggcactcttgtttgcttgctccctgctccggcctcggtgccaccaaaactgttgttccccgtctctgcaaggagactgcgcaactggtcgtcaaggacacgacggctgaagtactgatcctgatcgagtaggagctgcaagctgggtatcctctacatatcccgccctcgaatactcgatgggtgacaattcaatcgtcccgcctccggctcccctcccgggtagtccagccatctggcaattctgctatagggagcagcgctgctctgggccagtttcttgtagggaaagccgggacccgatccggttgagggcactcttgtttgcttgctccttactccggcctcagtgccaccaaaaccgttgttccctgtctctacaaggagactgcgcaactggtcgtcgaggacacgacagctgaagtactgatcctgatcgagtaggagctgcaagcttggtatcctctacatatcctgccctgccccaagatgccatagttattgacaccggaccggactggcggtcggaccggaaaaaaccggaaccagcgcctctgccggtctggctcatctaaaagaccgcctgtgcaatcaaaccggtatagaccggctggaccgcccgattttgcagaaaaccgcctttcccaggcatacaagcaactatgccaaccaccaagccatgtgcttccttgtgtttggaacaaaggagttatttctttattagatactgaaccgctttggacctcgaccgatcagaccaataaaccagtaaaccgacggctttgccgattcaattgccggtccggtctcaataactatggtatataccaaagagcaagaaggagtcgtgtctgatgcgccactaatatctcacccctgtagcctctctcagtctctcgcgtgattcgtggacgattttgttatacgcttacaaaatttatcaaatgtaaatgcagtataactataatgtaattatattataatttgcatgtaactatgatataactttcacataattttagatcattagatttacttcaatattcatgtaagttgggaagaaaagaaatcatagtaagcacgggtgaggagattcggtcttgtgacctccgcttcatgaaaatagcatgttactggggatttctaaaagttattgcaattacattatgattgtactgtatttacatctttatcgacaaaattatagctagtccctttgtgtatgcgcagtcacagaagcagtactaggcttctggacagctgggcctaaagctaatgcttgttgggccatgattttatgaggtatattggcggtggtggtggtgggatgtgtgtgcgcgcggggggaggggtatcatagtggggttggtggtgcggaatataagtcctggcaatgccctggtccacagcatagggtatccgaggctcatgtttgcctctacggaagtgcacggatactgctgttgctttctctcaatagtatctgtcgatggagcgattcctcggacaatggagagtggagacccctccccaagtgtgaatattcaaccagggggtttgtggtgtacggcgtagaaagagatcaaagcaagagcggatctgtggagcccgagctccccgccaagcaaaagacacaggaattatacaggttcaggccatccggaggtgtaataccctactcctgtgttggtttcattgtctttcctatatcagctgagtacaacgaaggccttttcaggctacaaagcgaagtatactgatctaaagagtccaacccttcatccgtagcttgtccccttctttttatagtccatggaggggctcacattattacaaatctactccttgtcttgtgttatcagttgtcttgttgccggttggttccctaacacaatcttcgagaaacctgcattacctcgggtacctaggcttctgtccgagacagctgggtcacgccatgtagacccccgtttttataacaggaatctctcgtgttaatagtaccatttccctggatcaagtagtatggtactcacgattacattgctggaatattaattgcgattgtctagcgtgaattattacatcataagcccgcacgcagtcttagaacataggaccaaacggtccggaatacataccaaaagcagaaatagataagcagcagaatcaaggtagcggcgacgccattgccacaggcaacgaccgtaactaagacctactaagcgccgccatcttcttcaccctcgtggtcgtaagcatatgggtcatccgagacatcatcaccagcttctgatggaatttgtaaataacaagagtgagtaccaaccgtactcagcaagccaccacaacaatgatgcatatgattgaggatattcaatgaaaggctaatggtttatttgcataaagccaattttgcaattcttttcacaagcctaacacctagcataaactgatcaaattttatctctatagttcattaaacagccatggttctgtccaccatccattgtgttcccaaggatagcttcccgccactggtcgtcatggttttctggggtctaccccttctaacctctcgagaagttgatccaccagtctaaaaatcatcatgcatatcccacccaatcaaattaagaaattagagtctagccaagtgtaatacatgtcccgatgctcattaaccatgagcatggctatttgaatagatttggtttactcacactgtagtggatgtacactttacccatactcctcgactacccaacacatgagcctcgtcccaacacatgagacgcgtcacagcaaagcctttcaattacctcacttttgcagtatatgctccatgaacttatatcctcgtgcactttaggcgtcataagtttctagcagtgagaggagttctggcgttcccgggaagggaaaaacacacacattcctaacgttgcttcttgaagttgaacccagtccatatcgactgtcttctcttgggtatcttcttttagtcttgtcaagtcagtctctagccatccgtaacgggcatccgccagcggactggccatccattccgggcattcgctagcaaactgcttgtcacttcacacacctaaaagaaaccaatatgcagggatactacctccactcggctatttactccgctaggtctatacccactcgagaagtacgattgtactggggacgtttcatgtttaacttcatggctcggtccttaattgaccagggatggcactagcctttaccggacaccacccaagtcctccagccgtcccagtcgaaaatatttgtttagtttaattttctttcacaaatcatctcatcactgtcatggcaatgtggcgctcatgtctccacacgtcgtatgtcaattaccttccctaaggtaattgcccaagcataaagcattttgacaaatatgaatatgcatgggtctaaattagcatgggctaagcatttgtcaaatattgactaaagacacacgacatcatgcattacaaagattatatggataatcaatatcaaaggtatgggatgtaacaaagtaggacattcacatataaatagcatgcaaactttatttaaatcaaaataagttcgcaataggtccaacatgctcaaagattagtgataacttgccttgctcacagatttgctgacccggatctttgattaactcagcaactccttcggaatctaaatttacgtgcgaaagatttgattagaattcaaataaaatcaccaaaaattcaaacagtacaaagtaaattgagaaagtggtaccaacaattagatcttgattttagatgaatttaggttcaagtttcattcgaatcctagttaaaatgagtgagttatgtaagtttaaagattcaaatttgaattaataccaataattgtgaaatggtactgtttataattgatttatttttaatccgaaacattatccaaaacccactgtggttgacatgcgggccatccccctatttcttttctctattttattttcttttggaaaacaagctgtgtcattgacaggtgggaccggccctattgacaagggggtcaaccagtccttgtaacaaaatctataactaagttttcttagattttaataacagggaccccacatgccattatgtgggttaatcaccattaggtggaggattgctgtgcgctaactacatgtgggtcccacacggtttctatctctcgttctttctttttccccatcgtcttctacctctcgctcacgaccgaacagagtaacggcgcgcagcgatccaatggctcgagccgggacggctcggcccgtggtggggaaaggtggcggtgcatcacctgaaacccgccggtggcagcggcgaggcacggcagccatccgacgcgcggcgcgatggtgctcggtggcaccgagatcgcaagaacggcggcggcgcaatggtggttgattcgtgtgcaggcgacctcgatttaaccatctaggtttcacacggagtatagaaaaggaaaattctcgccgatgctacattggaacgaggtctccccatggcgagctcagccatggcgtggtggcggaccaagtcagcatggcaacggcggcgcacaccccaagtcgagggggccgctagcttcagggtgactaggcactgctataggcgcgagggcttaccacgggatggcgagacggcggagttcgacggcgcgcggcgtggtgcggccgaaacaggggcggctagcggttggcgacgctcgtaggtgttcgacgcctggtcttcctcattcagcagctcccggctccttccaacaacagcaacagcaacttctctccacaccccgccacccacatcggccgagaagccctgtggcggcggcgcagcccccgctcaccaggtgttcgacacccggcggcggcgcgatcttgtttctcttcgatggagcaagagttttagggagaggaagagcaaatgggaggttggaatttgtaacgcccagattttcgttcgggactaaaaatcattaaataatgtatttttagaaattaaataaaagttaaatcaaattaatcaagtgaaattatagaggaaattaaaatttcctttaaaaatcgttggccgagaatattttgtaacattctttctgccctaaaatactctccggatttttccgtaaatttttcggagctcaagaagtaattttaacatcacaaagtgcatttaatcaattagaataaaaagaaaacaaatcaaatcaccttccttccttgggccatttttggcccaagccttccttctctctctcgcggcccacatgcttctttctctcagaccggcctagctcgctccccccctccaagtttgttcccccccccaaccggcctccccctccctccggccgacaggtggacccgaggccccacctgtcagctcttcctcccacctccagcccgcctccaaccgccaccatgccgccattgccgccccacacgccaccccgccatccccctttgcgcccaagcggtggaactgcatccccaccacctcctccacctcttctctctctttcccccaaaaaaagggcgccggtttccccccgccacgtgcccacgtcgccactccaccatgccggccgttgccgcccatcccggccacgatttctccctccccgagcctataaaaactaaccccggagctctctctctctcatttttcctccttccccgagcttcccgtcgcctccctcgctctccctgcgccgctcccgcgcgctgccgatcgccggtgaccctcgagccggccgccacagccgctcccacctctgccgtgctgcaccactgccaccaaaagctgtgtcgcgtcatgccgcgccccggcatccacttcgtgctcccctttcaaccccgcagcaccatccccatcacgaggccaagctaccgccgcctgtaccgcctccagccgcacatcaccgccgtcctagcgccggcgtgccacgcggcaacctccaccggcttcgccgtctcaagggcaagcccggccaccgcctattttcccctctccaccaccgaataaccacctccacggcaaacccgaggccgccgccacattcgccgcctccggtcacactcttccgctattgccaaccactccgcgcgacactattgcctccgctggctccgccataccgcacagcccctccggcaccactctactggctccaatcgctgttggaaccccggcctctccgctcgaggtgagaatccgccgttttttctcatctccggccagcgactcacgccgccgtgagccacctctccccctcctaacagctctcctttcatcccatggtgcagccaagcccgtccgcccctttccgagcgacgcccgtcgccgaagctccgtcgcgtcgtcttcctgaggagccccgccgccgccggtcattgccgtcggccgcccctttcgccgtcgtgcccctcggtgagcactcccctccctctccctcttcctccccttcgtcggccgcctcccgggcctgctcgtgacgcgccaccgtcgccgggggctgtctgaccgggtcgccgttgccgtgctatgcacccgcgccgctgccggccgtgccgggcagctggctgccacctccccttgtcgcgccgcgtctccgctctctcgcgtgcgctgccgttgcccgcgtgcgccgtcgccgctggttgccgcgccgtcgctcggccgggccggcctgagccgtgcccgtgcactgccgccgtccacggtgccgctcgagccgcggtggaccgagtccaccgtgcgcccgtccccttatgccgctgacgtgtggggtccacctgttggcgcgcctctcccttgatgatgtcagcgccccctttttcctttgtaaaaataaatagtaattgtgcaataattcgttaataattataaaaaatgatttaaatggctcaaatcttgtaaaattcatatctaattgatatgaactccaaattgggccattcaacttgcataattcatctaaaattgagctctatatgtttgtttactttttatgcaatgtttgcttggtttttattagagtttttcctcgttttgcgtgccagcgcgtagaatccattatttcagaagtctgcggtcgcgaggaaaagagttcagaagattcttttgatgaagcaaggcaagtcacacattccccttgagcattttgatcctactttacaaatgttttaccgtttgcaaataaatatgcatgttttgctaattacaggggatccgagtattgtctatctgcttgcttgtgccttattatttgatatctatcctttgtcaaccttgggtaataaatcaactagctcatgttacttatgtgaccaagctagaactatatgcttagccatgcttaattaccactgataacaatccggcccagttggggttggccgaggcccaataacttaagaggttgcccggaccccaacagttcataggcacacctactcagggaaaggcccaatctccctaaaagactagtccaataggggaagagtggctctcccttttaaggtggcttcctcctcccaagctaagcaaggtgggattatttagaggctcacacggtcatcgccgacttttgcatctttgccagcgggtaatagtggaggatgtcctcatcattcccacccccttaaacaagggcctagctctgataccacctgatgtgctcgagggtgtcccgatctttcgatgagagtgataagtcgattggatggagtgacgttggcgatccgactacaactatccagggatgttgcgcctttgcaatcgttacaccaactccagagtgataagtcgtgaatctcgacggatgcacgatcagcccaaccacaagggtatttgttcctgcaagcaatcgagaaccagtaagaacaagatgaacatcaactaaatttgcgaatcaaagatgttggattgaatcaacagaagtaacaagtggggttcagtaacaagcaatccggcgatctaatcgatcacgggatcaactcagcaaagtagcgatgctatactttgatctaaacaaaacccgattattcttggcggtggagaaagctataagaagaggaagaggacgaccacaggggtgctggggtcgttctctcaacctaggacgcgtccctaatggacccaacttgatacacggcccattgggcctaaagaggtgacgcagcaccgtggacagaaaaggactcagtagtaaaatgaagattgcggccactctagaactgatatggacatgaagtacttgcacacctaaatcggagttcgcatgaagtcgtggcggccatcagaagttggtgctatgctgcagtccgaatccatcccgcgcaaatcctctccccgtttgatcctctccattgttcctgagtaaaacaagagtgcacgtgtctctggggtataaataagaatcatatgaatttaagaatgaatgcacctgatagttgagttgacgtgtacgagcgcgggtaataggaccatgaagttgtacttgtggaggcgtggatgtatcgttggtgttgatgtcctcaacaaccactagctcagttgatgggataattgcagtattagacctttttagtattagaacgggctgcgtgctcaagacacccgaccatgttgcattggtcgtaattatctaattaaaatgcgactgaatggtgggatgtgggtgcatggttttgctggtcgcaaccatggcaattaaggaccggttcgcgggatgcactggaagacatacagcgcttgccacaagcgggaatgggtaactgcttgacttgaagtatagctttccgctggttgacggatccaggcaagggtgagcgtgatggagttcggatgggccctgcgatggcctatgcggctttccgatttgcctaggcatgaaaggggactgcccgctgcctgttgggggcgcgggtgaaacctgaggtgtggtgtgtttggtcagagggggttatatgaaaggtcttgtcacaatcactcgacatggtgacgtgtccggccgggcatggttacatgccggtggattgtgtcttgtgggtacaattgtgcacctctggccagagtaaaactattcgaatagccgtgcccacggttatgggcgatcaaccagaatcaccgtgattagtctcagtcccaataaattgactcaatgcactgtagttcaggtggaatggttgggcctgttcaacgtggtgtagcgttgattagtggagattgaatgttaccttaattactcaatagttttactgttttgctcaataaaatgttttacaactgcctttatacaaatagccgtaaaccgtccttgtatccccttgcacgtctgcattgttggtgtggcttgctaagtacggtggttgtactcagcatttgctattgttcccccatttcagaagtgtagtgcttctgagctgaagacgaagttagaagactaaggctcaaaccccagttgagttttgcctgtggagtggagttgaagcccagctaggatcgccttttccgctgctgctgctttcgtttcggtgtgaggactaagtgcctcttctgtaagtattttacgctttatttatgtttggatctgtatattaagaggcggcattccagatgctgaaaacgccaaggattacattgctaatgtcgaggagaactttaagggctcctcgaaaacttatgctagtgctctcatcatgagaatgctcacatctcgttagaacgggaaggggagtgtgagagaaaacatcatgacaatgaccaacatggcggcacaactaaagagtatggacatgtccatctctgatggtttcctggttcacttcattatgaactcattgccatctgactacggtccatttaagattaactataacactcagaaggacaagtggtcaatcgccgagctcatctctcactctgtggaggaggaggagtgtcagaaggcggaaaggcaaagaagcaagcctaccttgttgataatgagaaaggcaaaaggaaggctgatgagatttgtgctgctgaaaccagtaagaaacccaggaactctccacacaagcccaagccaaaggggaagcctaagacaccagcttctcctgctcctggtccatcagcaagtgccataatatgcaggttttgcaaaaagccagggctcattcagaagaactgtaatggctttaagaagtggctcgctaagaatggaattgagttccgtgaggactatcgcaaagggggagcgaagtcttaaagtggcggacggaaacgaacttcatgtagaagctattagagacctttcattagttttggaaggaggccatcatttatcactagatgatgttctttatgttccatctgtcaaaaggaaccttatttctgtttcatgtttaaccgaacgcggtttttgtcacgcccagaaattctcgaaccagaatttctaagctgaatgtgcattaaatccctgtccaggaccagccagggtacacaaacgacaattgttgacatacagatccacgtcttacaaaaatagaaaagattacaaatgcagcggaaaaagagataaaagcgagctaagcctgaaggcttgactcctgcagcgggcgactccattccacaggcatccttgacggcagcgacgaaaccaacctcttcgagacatcttcaactgagaaggacttcaactctggtgtgggggaaaagagagcaagactgagtactacccactgtactcagcaagtcataccggaagaggaggtatgatgcaagatatatccaagggaggctaaaggttcttttgcataaagccggcatttcaaagcagtagttgaaagcagtaaaacagttgtagtaattaatccatattaaccaatcactgtccaacgttacatcacgttgcaacaggcccaaccaaccacctgaactacaccagttcattaagctaaactaggggtgagactaatcacggtgaatctggtcgaccgcccataaccgcgggcacggctattcgaatagttttactctgatcagaggtgtacaactgtacccacaagacacagccccacgacacgttcccgtgcgccgacatgccaccacgacataccggaaagaggccgtgacaggacccttcgcataaccccctctaaccgatcgcaccacaccttagggttcgcccccgtccccagcaggcaacgggcagcccccctttcgtgccgcggtgaatccggaagccgatcaaccggacaccccggccgacccaactccatcacgcccaccctcgcctgggtacgtcggctagagaaaagctacactacaagcccagccgttgcccacgctggcttgtggtaagtacgataaattcttccagggcatcccgcgaaccggtccttaattgccatgggcacgactagcaaaaccatgcacccacagcccaccatgtaatgtattttaattaactaacaccattgcggtggcactaatccaaagctattgccaataatcaaagtctatgctttaatgtgaccccccttttgtgcactagttgaactaagcatggctaagcatctcctaaaccaacatctagtcattttaatacccaagttatcaaaggcgtaagggaaacaacatatagctgagtaataggacccatcccacatgatattgtaaaacaatgcaatatttaatagaaatgcaggatacttgtaaattgggtacaatatgatcaattgcaatgtatgacttgccttgctctcgcactgatgagaccacagcaacgtcttcgagcaaccacgaatcgacgaaacggccgaaatctacgcgacaaacaaagcacacaagcaaaacatgctataagactactgaaacaggaaacaaaaccatttttaatggattctatacatttttatgaatttactgagacttgaatggacttaaacggagctcggatgaattagttatgatttttagaagattctctgtgtttttactattaaagaaaagccgtaatcaatttattgcgcaataattcatcccagggctgacgtcagcataaggaggggtggcgccgacacgcgggacctgcgggtcagtgactcaaggagagagaggggcggctggcaagcgggccccaccgagcggcggctcaagagagagagggaggggcgccggcacgtgggccccactggcagtggcacaaggcgggaggggcgcggctggtggctcggctcggcttcaaagccggcaggccaagcatggcgaatgacggcggcacgcgcggtcgccggcgacggcaaccggcggcgcggacggcgacggcagacggcgcgaaaagcggcggcggcggccgaagacgacgatgcgcgcgcggaggacggcgacgcacacggaagagagggaaagagggaggagggggaatttttcaccgaggttggccggcgcgagtggagacgacggcgaacgacgacgacgagcgacgggaggacgacggcgacgggcgaacgatctccgggacctcctagggaacaaaatgggaaggattagagggagaggggtggtctacggcgggcggaaaccatggccgaaggcggcggcaatggtggtactcaccggcgcgcggggagaagcgggccccgacggcgggattggatggggatgcggcggccggggtagctttggcggcggcgaagctaatggcggcgcagattgactcggcggcggcgagcggcgaccggaggagtggaaaaggcggcggcggcgggtgtagcggtgcgggagtgatggagggcacgggagagagcggcggaaagaggaaaaaggtggaggggagtgcggggaagctttattggggctcgagagagacggacgaggccgggaggcggccggatttctcgccgacgtggggaatggagagagagagagagagagtttcgaatttgaatccctccgttgcggggtgcacgcgcgagtgggaggagtggggatggtgggcggcgacgtgggcgcagggcgcggagtggggcgcggaaggcggggaaggcgggcggcgatgggtggtggtttcggcggcggttggcgcaggcgtgggcggccggaggttagggaaagggctgacaggtgggccccacctgtcagcgcccgagagggagagggaggccgggagaacttcgggagtgggagggaggagcgggccggcgcgggaagaaatgggccgagccgacggcccaagaagagaggaaaaaggaggaaagaaaaagaaaaagaagaaaggattttttttccagggatttaatattgcactttgcttattttaattggttaaaattatttccaatgctctgaaaattccactaaaaatcctgttagcgtattttgacatgtagaacccaagaaaaattccacatgccgattccgattattatttgcatttattaatttagggtttctttcttgcctttaaacaaataatttcttccaaccatttattaattgaatttttgctagggaaaagaacttctgggcgcgacagttttagagttcattttggacacaaagaatgttttattcaatttaatgatgagattgtgggtcttgctctccagcaaggcaatctttatttgctctctcttgataattctgcaatgaatgctcatgatgttgtatgtaatgttaagattaatgagacctcatcgaaattatggcactgtcgcttaggcgatatttcgaaggggagaatggaacgtctcattaaggaagagatacttcattcattagattttactgaggacaatccctgcttagattgcataaaaggcaaatttactaagacaatgaagaaaggagcccctaggagtacgggagtacttcaattaatccatacgaacatatgtggcccattcccaataacgtcagtggatggttatgattcattcattacgtttactaatgattactctcgctatggttatatctttcccattaatgaccggtctgaggcactaaaaaaatttaagatttttaaggctcaagtggagaatcagcaaaatgttaagattaaagtagtgcgctcagatcggggaggagagtactatggcaagagtgctccatatgggcaaattccggggccatttgccaaattcctacaagaaaatggcattgtagcccaatactctatgcccggagaaccacagcagaatggagtggctgtgcgccgcaaccgcaccctaatggacatggtgtgaagcatgcttactcattccagtttgtctgtgaaattgtggatggaggcattaaagtctattgcccatatattaaattgggttcctaccaagtccgtacctaagacaccttatgaattatggactggtaagaaaccgactctaaattatttaaggatatggggctgtcctgctgaagctaggccttttaatccacatttaagaaaattagattctaagactgtaagctgtcacttcatcggatatccagaaagatctaaggggtaccggttttactgtccagaccatgtccataagtttgttgagatgagacacgcagtctttttagagaatgatcaaatccgtgggagcttacagaacagggagatagaccttgaggagattcggttctcgcaatcggccatccaacaggaaaatctaactgtacctcagattgtgccgtaggcgtcttcttctgtggcccaggctctagttgaggatattaatgaacctgtagcacaagataatgtgcaaactccacaacccactgagatcactaatgaaccattaagaagaacacagcgagagaggaggtctgctattcgcagtgactatgaggtctatattggagaagacattgggaaatcagacgatcctacttcatttaatgaagccattaatagtgaaagttcatccaagtggcttgaagctatggaagatgaattaaagtctatgggcactaatggtgtttgggatttagtagatattcctgaaagggtcaagacagtaggctgtaagtgggtctacaaaactaagtatgactccaaagggaatgtcgaacgattcaaggcaaggctcgtagctaaggggtttttacagagagaaggggtagattataatgaaacattctcccctgtctcaaagaaagactcatttagagttgtcatggtgctagtagctcattatgatctagagttacatcaaatggacattaagattgcattccttaatagtgacttggaagagcaagttttcatgacacaaccggaaggttttgttgtggaaggcaaggaacatatgggatgcagacttaagaaatcaatttatggtcttaagcaagcgtcaagacagtggtaccttaaattcgataatatgataagaagctttggatttatggaaaatgaagtggataattgcatttatatgaagagtaagggtggaagtttataatcttaatactctatgtggatgacatcttattggctagcagcgataagcacctgctgcatgagactaaggtgtttttgtcatctaaattcgacatgaaagatcttggtgatgcctcttatgtattgggcattgagatacactgagacaggtctaggggagtattggggttatctcagagatcatacattgacaaagtgctaaacagatataatatgagtaagtgctctatcacgcctgctccaatagtcaagggcgataagtttgggttattccaaagcccgcggaatcaattagaaaaggaacaaatgaaggcgattccgtgtgctttagctgtcgggagcttaatgtatgcccaagtctgtacgcgagcggacttggcttttgttactggaatgcttggcaggtaccagtcaaatctaggactagaccactggaaggctgttaagaaagtccttcgctatttgcaaggcactaagcactacatgctaacttatagaaagttagataaccttgaagttactagttactcagactctgattttggagggtgcatagacattaagaaatccacatcaggttatgtcttcactctcgcaggaggggctatttcattgaaaagctccaaacaaactattactgcatcgtcggcaatgcaggctgagtttattgcatgttttgaggcaaccggacaggcggtatggctaaagaatttcattccaaggttaagagtggtcgacagcgctaatggaccactcaccatatactgagacaataaagccgcagttttctattcaagtaacaacaagtcaagtgcagctgccaagcacattgacattaagtatcatgttgtgaaagatagaatccaagatcaaacaattaaggttgagcatataagcactaagttaatgcttgcggatccgctcactaaaggtctaccacccaacttatttaacgagcatattgccggcatgggattagtaggtgacctataagcaagattctagaatagaggcataagaatcaatcaacacccaataagattaagttgattcctatcaaggtattatagtggctataggtactgttgtcatagtgacattttattgattactatgacacattgctttggttcgctattctacttagactggactcgttagcattaagatcaagtgggagaagatcaagtgggagaatgttggttgatctcctggtaacgagaccagagagacacgtcgtggtctaggcccacccacacccacgcccacacgcggctaacggcgaggagcgagcgatacgctcgcatctcatccactacgtgcgccgatcggatgcgcatcgttctccataacggattctcccccgatctcctctagcgctatattaaaagggagaggccgtctgtgcttaggtgacgatctaagtacactaaaccctcccgataaaccctaacgccgatcctaagaagtgctggaaggagaccgaaaggcgttctccaacgccgttcccggccagtgcaggtggcggcctgaagggcgacgccatctgcttcacctccggcaacttgctaccacgacctcgacatcaccgacgactcctaccgcgactaagatggcttcaagctcaaccggtcagtcaattcccgcataagtttaggtgatcatgtatgtgctaaggataagttaatgagtataagatctaataattgtatcgtagtcaacacttaaattaataagattagccccatgtagtatttttattttcgtggttgggacgctttagataaattcatgcactaaaactagcgtttcagagcaagtttaatagtatagctaaccgttggctccaaattatctatagtcaatttaataatcaattcatacaataattacctataaatatatactacacaattaatatcttatcccatctgacatacacaaatacatcttagagtttgtgttgtagctgtagccagttgctcttctctcttctcttttatttcatcgaaacatgtttatagctagattatagtctctattaccacactaaattacaccaacgtaataaattgtattctgtccatttaatttacttataaaaataagtatctgacgtgacggccctcgctagatgggggaagccggaagcccaaagggcgtttaatttaataattcaactgctgtgcttctcctccggaaacgaagggtgactttagtcaaagactggtcaccaccccactttgcttttggcgacgaaaccctcgccgcgatggctacgacccgccgccggaccgcctctgcgattccctcctcatccgctccagccgacgagctccccggccgaggaggggacgcgctgggggcggagcgcctggagggttccgtaccggccggggagttggtaaaggcgaaggcgacgaagaagccggtcgcgttcgcgcgcgtctggtcggaggcggacgagctccgcatcctggagtgcctcgccgcgcacgtcgagaagcacggcgcgcccccgggtcgctcccagctgcccgaggtcctcgccggccgcggcctcgacaaggaggagttcaccgtctcggagatttacgagaaggtgcgccgcctacggacccagtacgacaaaatgctctccggtcctcggcccgtaccaggcgacaacaggttcgagctctcttgtgccatttggggcaaccccgtcgcgccaccaccaacctctccggctccggagaagagctcgattccggcgtcgggaaccaggggccgcagggacctagaggagctgcgtcctctgtatccttatctcgtcgatgaggtggagaggatcagcaccaatgagttgggtggacatgttctcaagatgggattggagttcatcgatgacggtacagccgtccgtatgaacggcatggcgaagaagcagagggttctggagctcaagacgatgttgaagctagatagtatgaggaaggaggtgacgaggacgttgctcaacaacatggattgacaagatcctccatcgtggtatgactttgtgcatgctgtgccccttttgttacatatagctgcacgccaatagttttaggatgcattagtactctatctattataagatggtaaggatgatccaatgatatgtgatctggtcatggattagtatatattagtttgcctagtaagatgatgctgatggtccaacggtatggatggcgtatgggttattaatatatgtaagtttatctagtaagatgacgatgatctatatatgatcttgtttgataccatcagccttatttatttttgcgcttgaaatgtcattgggccttcatatttgattggatgatttatggtcagctagttaaaatggattcagggattcagttaggcagaaagttatgtcagatgaaccagtactatattgactaaaattggaagtaacttgatgttaaggtaagttaaaaggacacttgatgttacagtatgttcaaagtagaaagttctcatatatataacaaagtaagttcattgaacacatgggatttgtgtactcgaaaaacctggaattgtatcttaagctgtcaggaccaccgagaaagatatctgaagctcccactacaaatatttggttttactactcaattccttacatgtctgctgaataaactgtgtattcaaatgcttagaatttagacgaagcgcaaagagcttaacacaatgaattgtgaggtatttagaacaattcgtccctatagatctatttgcatgatacaattttagagatcaaataagattgaatcaatatgtacgtagaactattttctatattaacgaacatgtataagtagttggtaaacgttatataaatacatttatgtaaaaacattataaatagagttggcggtggtgccagattcactgccaccaccatttgacttcttttagaatagcatagatagtcagatacagattattcttcctcttacaaatccataaaaaaacaataccgtatccgtatattttattttttgcagatagtgcctacaggcacatatagatgcctacaggcacaaatattaccgtatccgtaatatttgcaccaagttttagtaattcgcagtatcaatattgtgctgtgtgtactttatttttccttgaaaagtgctctgtggtcacttttgttttatcttttcatggggaaaatcaaattactaagaccttgtgtcgcatgggctgaaattttgacccatttatgtgtatgggccaagattttagttaaagttcctgccttgtaaactagtacatatggatgggttgggatctggcccattaaaacaagtcctgaatggttttcccggtaagaaattatatatttgttctgtatgaactcaattggttagatcaacctgatgtttgcctgatgaggaaagaaaacctttgcttcgtcattctgtacaaacatatatattttctgttgacaatactcagtgaaaaaaacacactagaacggataccctcatctcaattgggcggtaagccccatctcaatcgggcacagcgtccgtcacaggctagaagtcactgatgtgaagagttatctcaatcgggcaaacggccgtcacgaatgaatatatctcaatcgggccctaagtaaagcccgtcaccgatagctttgacccagacgaccagtcaaactatagcccgtcacagatgacctatctctatcgggccacaactagcgcccgtcacagatgactactaacctttatcgggcctaaactagagcccgtcacagatgatactcatctcaatcgggcctaaactatagtccgtcatagatgactgatgacctcaatcgggcctaaactagagcccgtcacagatgactactgacctcaatcgggcctaaactagagcccgacacagatgactagtgacctcaatcgggcctaagctatagcccgtcacagatgatctcatctcaatcgggcatttagttatggcccgtcacagatgactataatccacaaaaaaaataaattttgtttttttgactagcctcaggcctttgctagccatgcccgctgcaaaaatgacagaaacaaacacagatatccaatatccccagctccccagcatcacccattcatacatatgcattcacatacacagacatcaacatatttcacacaaccacacattcacagccatctcatatttcacatccattcacatatttcaaatccattcaaatatttatcatatttcacctgcaaaaccgagttaattggatcaaatatttatttagcaagtcttaacataaacatatgaaatatatacataaatataagcatcacagttacatcaccacagttgcataataagtgttcatcattgcctaaacatagaagttcaacattgttcatcattttagtttaagcctaaacattcctttggggttaattatttcgcggaggatgaagctggctatctcctcacgaacctcctcaaagctggtagtcagagacttggttattgtgccctacattgtcataattccagattagttgatcgatcatatataagtactaaaatgtagttagtctatcacaattgagaccaccgacctcaaactcagccaaagtcttcaccttttctctatacagaagtcgcatgttgtggcacacatggaatccgcactggtcacctatttgttgcttcaccgagaagtcttttttgtggatgagggtgtcatgtcctgtcttcttgaggcctcctctttgcacgtattaggcccacgcttcatctatcgctagttgaattggggtccaatcatatgcgttcttatcaattctagagttcaggtaatgacatgtactccatttaggtgttatgaccagaaggatccaatgggcactgcggcattaatatagtgaaagttaattaagtactcaaggaatgtgtcatgctgttgtgtatatttagttaacactcttactatttattataggcacacataatgtactccttgtctcggcgggaccacaaggtgtcgtagatgtagttgaccattccttgacggtcattctggagatttgtgacagtgaccacttgtggatgaaggaaggcaacttccggtgcatgcttctgacaccattgccaacttaacctacacataggatcaacgatcttgtaaggaagttaaaccgattgttattaccagaatgagttgggcgacaatacttacaaggagtagcacttaaggaggcttgtgtccaccgctcggagcttgtagaggtcgaaaagatccttgaagtcgaccacgatataatttgttggaccaaggaatggctttccatcgtgctgtccaaggatatcggtagctttacttggcttcctggcgttagatttctccatgtagtataagtgaaggtccttgcaagcggtgcccattgcggcaagcacgtcatctccaaccaatggcatgcctagttggaactcctgtggagcgacgtatttcttcttgacctctttgcccttagtctcttcctggcccttgcccagatctagctttcttggagctagaagcgaggtctgcacctttcctccccttcctctcccctttgcttcgggtttatcgagagtaattctctgaggggaagagtgtgccttcctgctcttcttcatcggtgggggttcatgaatcgccttgctgtcggcctccgttcggtcctccccaaaatccgtgtcgtactgcaactgcacatcgtaagattgtgcatgacgatcttgagcaggaggggctgaaggagcagaggcgggtctctttggtggacgactgcctggtgcagtggttggcctcgctgtaaccctgatctcaatgaggtccttgggccattggatgaaggtaccacgggcatttcctagtgagaggacctcgtcgttcggtggatacttcagagggaacagctcgtattcgggcttcaccgagtcgacttgaacttttgcacagccggccctgagttgcgctccatgcactcttgtctctagggtcggcttgtacgcaagtccctcggctgctggaacagtgaaggtcggcatcaccctaactgtgagggtgcagctcgttggttcctgcgatagattaatcaatttttttagaatattatatatcatatggattcgttacgtctttcatgtattgagtaagttcacggttaccgttatgtggtcgacggcgctgtcgaccgatgttggattttccgccaactcagttgatgcgcaactgctgcgtttttcggtgggacttcctaactctttgtgcgcagcagcagcggcagcctgggggatctgttgctcttttcggatctcttgcctaatcttggccctcatcgactcgagcttttcgtcgaatccagatgtcagctcagctcgtatcgactcccggatcttggctacaaggcgtgcatctttctccgccttgttggaagtccgcttcttgtactgccacgcgtagtctggaaatccatacttccagggaacagaagacccaacgccccgtgtccgtccacggtgttccttgttgcccaacgctttcgtgaggaggtcgtcctcgcgtctttgagagcaggcctcttgcaaggcttgttgctcggcaaccaactccttctgcattacaatttagtggggtcaaataaactgcacgatgggaaacaatgcgaacatctagtttgattagacacttactatagcttcgtatacttgttgatcttctgcatttggcatgaagattgtgccatcatcatgtttctggtacctagccctggcccagttcctagcccgagggtgtgggatatcgccaaacatgagcggtgtgcacgattcctccgcttcttcatcctcacgctgccattcctcttccttaccggcatatccggcggtaccaagccggtgcggatgctggttcctggtctggagcaagcgatatgcctcacttctagctctggactcgggggtcgacttcttcgcatggaattccgactagacctgttccgtgatccaaggaaatttctctcttggatctggatttgccgggttgtagacgaactcgccgactagcttagtcttgaagttcttccaagcagtgcccataaccttgaaagcagcccacctgagacggtcctcatgctccgcaggataatcaaagctctccttgaacgttagccaagcaatgtccttctctgcggccggcacgagcttgaagtcgtcttgcagaatactgaatttctgcctccctatgaccccacagatagacctaaatcggctcaatattttccttggagatgtccgcaaccctacggcgtccaccgctgttatgcggaaccgttccttaggaattttgttccctgtcctaggagtacgtgcccttgaggacccactagttgtcgtcgacattggttcgccttgctgagacattgtctactttttttccaaaaaaacaaaaaaaacacaattgagtgctacaatctattacaatgaattgaatgtcacttataaaaataaatgaaacatataaataaactaaattgcgcatatcacaatgatagaattaattgaatggcacatataaataaattaaacatatcatcaaatcctaaaatcataaattcacctcataccatctattcatccacatagcatgcatctatcactaaattgattaatgcaccacattccatctattcatcatcatgtcatcaatcaaaaaaaatcattcgtttaccatatatcatcaatccctaaaatcatctatcactaaaatcatctatcactaaattcattaatgaaacacattccatctattcatcatcatgtcatcaatcactaaaatcattcgttcaccacatatcatcaatccctaaaatcatctatcactaaaatcatctatcactaaattcattaatgcaccacattccatctattcatcatcaagtcatcaatcactaaaatcatctattactaaattcatcccaacatccacatttcatcccaacatccacattttcattatcaaccacatgcaggtagcagagggaggcgcgatggaggactcacatgaggtcggccgggggggctcggtggtggcggcggcgggatcggtggagggcgtcgccggtcggtggaggcggcggcgggctcggtgcaggaaggatgtcgccggcctcggtggtggctgctgttcgtgtcggtgaagaggcaggcggcgacgacgaggaaggccgacgccggtcggtgtagaggctcggtggcggcggcagcgggctcggtggaggcggcgggctcggtggcagtggcggcgggctcggtggcggtggcggcgggctcggtagaggcggcgggctcggcggcggtggcggcgggctcggtggcggtggtggcggtctcggtggcggtggcggcgagggaggacgacggcggcaaaggaggagttggcggcggtgctagggttctaaggaggcgggaaattgtagcgggacttagaaaaattttcgatccgatctgagaaaccctagttatattagagtgatgagtcatctcaatcgggctttgccgtagagcccgttacagatgactcatcggtgacgggctccatactaatgcccgattgagatgacattcaggcccgtcacggatgactcatctgtgacgggccctaagataatgcccaatagagatagattaatctctatcgggcttgaactaaggcccgtcaccgatgactatttttccatttcccagataagtctttatatttgtgagtacaaaatatatagctgctgtataataattcattttattagtcataacatattttcggatagtaaatgatttcaaatcgaaatatggtcaacaacaaaattgatcctctcatcaagatgtacaacttttattttggtcatttatctatataactttgtttctaacagcttgaaattgattttgacaatatgacaaatgtaaacagcatttgtgaggtcaatgtaaacaggctcttggggatcatcgtcaaggtcaatgtgaggtcttacatgaagattatggttgtattcttcttcatcgacgacgttgtcaactcctacaattcggcgctttccatccctcacgatgtgcatcttcttgtttgaagggtcttttatgtagaatatctgctcgacctgtttcgcaagtacaaatggttcatcggcgtatcccaccttagatagatctactaaagtgaaaccttccttgccggctttgacaccagtgcgtagattcacccaacggcagcggaacaaaggaaccttgaacttgacgtagtttagctcccagatctcctcaatgcggctgtagtatgtgtttgacccaacttgatcctggaatgcatctatacggacgccgctgttttgcactgtgcttttgtcatcttgtttgacggtgtaaaatgtgtatccatttatatcgtatccttgccatgtgtctatggtccaagacggtcccatccccaacaactgtactgtctcatttgggacatccgtggacattgtcacacgattcttgaaccattcgttgaaccaagaattatgttctctgttaatccatgcatcagatcgccccaagttctcatctcggattttcactaagtgctcctcaaagtatgggccaacttctgcatatgttggagcacagcgtaatgagcctacgcgtacgacgtttgatcgggcctaattcttttccttccgattgtgccaacacctgacaaccttccctcgtgacgagacgctggaactctgataggatcggcatcggacatgtaattggcacagaactcaatagcctcctcggtcgtgtaaccttcaatgatgctcccctcgggtttagctctgttacgaacataagacttcagaactcccatgtacctttcaaacggccacatttcccttagaaatgctgggccacatagttttgtttgcttcaccagatgaacagggagatgaaccattatatcaaagaaagacagtgggaaaaacatctccaggtgacagagggtattcacaatatcggtctgcagcccatctagatcttctggatctataaccttctgtccaattgcattgaagaaggcgcacagacgttggatcgtgtgacgcactttcggtggtagaatgcctctgatagcaactggcaagatttgtgtgattagcacgtggcaatcgtgagacttcattccaacaagttttagatcgtccaatttaacatacttacttatcctcgctgaatagcccgatggaactttaatatccttcaagcatgataacattgcgatcttctcatccttcgacagtgtgtggcaggctggagggaggtacactttacctgtctctgcatctcgtatgggctggagttcgctgcgaatattcatgtcctgtagatcaaggcgcgcgttcaacccgtcctttgtcttcccgggaatgttcaacatcaggccaaccaaactctcacacacattcttttctacatgcatgagatcaatgcaatgacggacatcaagatctttctagtaaggtagccgccaaaatatggattttttcttccacatacccttctcctttgtcttgttacgttttcttttcttcccaaactcattgcttatgtccttgaccatattgtggacctcatctccggacaaatctttgggagcaggctgaaattctcttttaccattaaaaattttcttctttcttctaaatgtgtgacgtagcgggagccacctccggtgacccatgtataccatctttcgtgatttcttcagccaccggcttcatgtatgttccttgcaatcggagcatgccttctttccttttatagtttgtccggaaagattaccgagtgcagggtagtcattaatggtgcagaacaatagaactcttagcttgaagttctcctgaccatatgcatcccaagtttccacaccttctttccaaagaatctccagatcgtcgataacaggctccaggaatacatcgatatcattgccgggttgccttggaccttggattaacaagcacaacataatatatttccgtttaaagcataaccatggcgggaggttatagttcgcaataagaactggccaagtgctgtgagtactactcatgtcaccgaaaggattcatgccatccgtacaaagacatatcctcatgtttctagggtcggcagcaaagtctttgtgttttcgatctatattcctccattcaatcgaatccgctgggtgtctaagcataccatcattccttctttccgtggcgtgccaacgtactaacttcgctttgttcgggttggcaaagattctcttgaaacgataaatgataggtagataccacacaacctttgccggaccacccctctttgacttatttccttcgtcagcacttttctttcgcttgtatcgagaagccttgcagacaggacaagcatccaagtccgcatattgcttgtggtacaatatgcagtcgttgggacaagcatgaattctacagacctctaaccccagtggacacagaacctgctttgcttcgtatgtcatctcgggcaatgtgttctcaacaggaagcatagccttcaaaattactaaaagatctgtgaaactcttgtctgtccatccactacttgccttcagcttcattaggtccaaggtaactgacaacttagtgtgttttgctttgcatccagcgtacaaaggcgtctcgaaatcacttaccaacctgctgaatttcattccatctctctcattctgggctgggtcctcaacgtcacgtaacatgtcttgcagcagatcgtgatccacatcaaccatttcaccgcctaatggagaaggtataaacatgtcatgctcattttcatcttcctgattatgcgcaccacttctgtctgctgctgctccacttcctgattcttgctctccatgcttcacccaacatgtatagccctccatgaatcctcgttgtatcagatgaccgtgtacgtcctctccgctatcaaacatattcttattcttgcaatctgcacatggacaacacatgtaatcactgtttcttcttatccgatcctcctccgcggcgttcataaaattaattacgccctttcagtactccgtagaatgacgtttcaaatttttggcatacatccaacttcgatcaattgctaaaaaaaaaacaaattagaggcacatattataatattagtattgcaaaagtaagacgtgatgaaattgctcaattaatgatttatattactcacttgattgatccattttaatcacttttgggaatttaatttctattttccttggaaaaaggacaaaaaatcgccccctacagcttcccaccaaaatagtgaacagtgggatacagttacactaggtggtggggggtatttatactgtgcaacaaatatctgtaacgtccctaaaacaatcaaccgtgacgggcatacaagtaatctctatcgggccttaataaaaggccgtaaaaaaagagtgtcatgtgtgatgggcaataaactatctcaatcgggcctctagttggagcccgtcacagatgaccctcatctgtgacgggcttcttttagggcccaattgagatatggaaccctcatctcaatcgggcctcaactatagcccgtcacagataagtgtcattcgtgacgggctttagttttatgccgatataccatggctgtgcgaccatatctgcccgattgagattacttccttgtgacggcccgcaaattccagtcttgttatgggccgtcacagatggaaggatctgtactagtgacataagagtaaataaatttcacaaaactacatatatcgtggcttaaaattagttttcatatagttaatcgaacaaataggattaatctagtctagcaacctgaatttgtagtttatgctaaaaatatgtgaaccacagagaaacacatctgatgttcccaatttcgtatatttagttctgctactccatgccttttatgtttgttgagcaaactgtgcatttgggtgcttagaactcagaaaatatagaagacttaacacgagcttctttggcttttgcatgtcaatcatgtggaagatttgtactagttaattcctcctcttataaatccatcaaaatattatccgtttttatgaaagttctgtatatatgtattaattgttcttcatagaattttgtttacagaaatattaatgctactgccgatgtaatcttcagcatatgtaaacaatgtcatgctttctcgtaccttgatcttgtcataattcatattgcgctgtatgtctagttgtctacttttccttcaaaaacgttctgtgatcagtggtttgttttttcttttttgaatggtaatataaaataactgaggccttgtataggatggctggaatcctggccctttcgtttcaatgggccaagatttttttttttaaaaaaagtaagcggtaggagaggttcctatagtgaataaatataaataatatataaaaaagattacaaaatacatatgtacatgaaaatgggccaagattttagttaaatttattgtcgtatactcgtggatgggttggaaaacaaggtttcagtggtttttctggttagagatgatcgtattattctataagaaattatcaatcagttagatcgatctagctggtatttgccagtgtcatttggaaaaccttttctccggtaatgaatacaagcatagtttgtgtactcattgcaacaaaaacataggagtaaatttcacaaagctgcatatatcgtggcttaatttgttcagttacctatatttttctaaatttaataaaatgtaagttagagagaatcatttaatacactataatgatttacttttgcatctacgttttgaaagacgcctatatataggatacttattttcaggcgttataaatagattcctctatgagttttcattttcagatagtctgtaaaatggcccaacaaaggcacattgccaatttccacaaatagtgtaatcaattcattgtgacaagtttaaaaaaaattatagaaaagtgctgccttttattgtagtttatttgacaggaaagattctctctaaaatatcttaagctcacaccaaaagatagagacaaacactactgagtttctctaataagtttccaaaaaaaaaaatttccaccatttagtaccactaaacacacacttcttcagttaagtttcttccaagccgcagacaggattatctcacaagcatcagaagtcatcaccgtaaaagacaagcggcctctgctgctctgcatcaaaccagggagttaaactcaatatttaaaattgagaaactatgtgctgattgtctataaatatattgttgatgtaaatttggaatcgattattccgcatgagtttgaccatgatgcacatagtgtaatgaagacatgagtgtggaaatctctacgcgcatagtggaaatcatcgacccaggttacccaatagatgcataggtaaatctcatgtcatgatcacaaatagccatcacattttaagttgttgatttagatgtaccgatatatctaatcttctcatcatctggaactaatgcaaagatatgagtaccatcaactgctccaatgcaatcgttaaaatgtggccacatgcgacgatctttcctaattctgtcatggacagtaggaaaatttggattatttggacgtacaatatcacgtcccaaatccactacgacgtagagtatttcaaattttcttgaaattgtctcaccgcaatgcttgaaacggttttgtgccctttggtttgatgaaccatcacctagtatgtagagaaaaattgcaagtgcctctaatgtatgcatgtgtacagtaagttccagcttatatttactaaccaaaaaatcatttaatgcaataaaggtgtggtcattcatacgaagcatcttgtagcattcacctggtgtggccaaagtttcttgcacccatcccattccactgagacgtgatgtcctaggctcagccttatccaagtagagagagtaatagttctctgcaattcttcgagttgtacaaaaattgcttgcagcaatagcaaacaattacatggcaagcaaatcaaattcatattcttcatctgatgaaccatttttactctcactttgacatctacacattaaaacaataaatattattagaacacagatatatcaacattcatgaatatatagctgaaaataagtcagtccaatagtagtgcataacaagttcatagtaggtctaaaaataagttcacattcatgggtatacaacattaattaacaaggtgattttatccaacaatagtgcatgacataggtactcaataattgttctcataattgaatacaactgaaacaacaaggtgatacaaccacaaattgttcagaattaaatttaacccatacaaacatatgtctcaaacacatttatagttctgaaatgcattgacataacttgattaaagggatacaattcatggctacaccacattcaactaatttacatacttcacttcatacttcttcttaagccatccaaagcgacctgtaggagtgcgcaaataattaacaaacatttccctttgatccttcttgataaatatttcaattgcaatgaaatactcatttatctgttcaacagcaccacattcctccaccaaggccataacatcctttatagaacaatccggaggatcctctcttgttttagtgaaggactaaatagatgataaagtctgtgaagagagttcattactctttgacatctcctctaccatcttttgggatccactcttgttctttctggacttatccacctttgagccactacctctctttcgttttgtacttggttcatcatcctctgtctcttcatcgatctcattatcatcagcaatatgaattgactcattggtgggtgttggtatagtgccttaccataaagaccaatggttgacactggtattgcgaatgtcttcaaacattttctgcagtagctcttcattttgcaagccaaccttcataaacttggtgcatcctggtgtatcctacataacatggcattatacaatgggttagaacaattaatttggcacaatagttatcaatttaacacattatttcaaaatacttactgctttcaattgcttccaacgttccacagtagctgtaacagtttcctttgtgttatcccatcctaaacatgtttgagatgtcaacttcatccaaaaattgtattcaaccctaagcttatcccacttattcttaatttgaagcctagtgtacctcaaacctgttcttgctgcaaatttctcaatgacttcatcatacctaggattagataaataggtatttggacgattacccgcatctacttgctcaacaaaaatctcatagacaactctagtgttgtagtcattccaatcagcagagcccatgggcattttaacacccttcgaaggcccattttgagccatgcctatcatccactgactcacacaaatcttttttttcaacacaaacatatatcataggttcaaatttagtacttaacatatatcatagttactacccacacatgacatgagcagaaatcaaatgtacaaatcaatttatttttcatgataagatgaactagcagcatgaaagtaacatgagcaaaaaataaaatgtacaaatccagccatatgtttggtgtactacagccgtaataatatattgtcattctcccgtgattataacctacaatcaagcaatcaatccccataaaaattaaccaaagttgagggagaaatgaattgtgggtagccattgtcgccaccaatatgacattgtcattatctgaacttggatgtatatctatttatctgagacaaaacaactggacagtgacaattgcctaaataattctacttctagggaggtatgtgctttcaaatcattgcgcatacactgtcggaaagtgcatccttattcagaaaatatactagtaaaaaaagattatgacatgaagtattaagtgaaaagattgaagtgataatgtatgaactttcagtggtatataaggggtttaattttctcgtttcattgtattccatacatcagtcagtgctactaaggagtacatatgtatttattcatgtgctaaatctgaactatcaaattggtttactaaggtttggggataacttgcacacagatatggagaaatcccttcacaccgccgctgttgccatgctccaaaccctgctatcgtcaccgtgctgcgtgcacacagaaaggcgccgtcaccgtgcgccgccacctagttgcccaaaacgtagctccaagaggaggagagagagtagctctgccgccgtgtggcatcgcagtcatcgccgcagccgcctcctcgctcgtctcccctttgtctcctttctagcgataaggccccgagggcgacgagtggatgggaatcgcacccaccggttcaggttgatctaaggggtagtgcgatggcattttcctgtaattttgatgaaaagggatgggtggccctataattattttcagagtggagctgtggagccacgttttcgccgctccacctcaacaatacaaatttctcgagcaattcaccccgctccactccaaattttgtgaatctagaccgtctggcacagccccagctctatgtaagttggagttgggagctgacgctgtgataaacggggcctaaatgtgcaaatggtggaaatctctgctactccaccatgtgaacctcctctcggcggggcaaaaaaaacatctttgcatagaaaactattaaggaaccggcatgttggtatttcttacaatcacagattaattcgcaagcgtacggaatgccgctatatcacctccccttagagtaatctaatggtatcgaacacgaggaacgtgcatgcattatctacgatcttgattcaatccatgaacaacaaccttagaataatttggctagagaagattcctatgtctttttagttagttaattaagttaaaggttaaactctatctgtcttgctaagtccggccttgagctctatgatgtacccgaacgtgcaggtatacaaagaacaaacaatgttgtcaccaccaactgcctacctcacttttcatagagcacacaacaaacaaaggtatttttttaacctagacatgatgcctaagttattaattactattctagccatgctcaggaacttctttttttatccagagacctagtactagagcactcagttgcacactaatcgataaacacataccgatatatctcacataaataaactaattatagaacataaacaaactcaaatacttactttataaaagaagcatccaccgctgtacgagcgagagaagaaggccaataatcctggctttctccagaactccgtaggaagaatggcgacaacccagcactccataaaattctcgaaagaactctgatgtactaattatgaaactacaagtgagatgtactctacttgagctcaagtttatgtgtgttgaagtgcggaggaagacctccttttatagctgctaatgactgttcaaatggtggttaacccctcacaaccgtcattgggagttcatcccggtcttctacatgtaaggtggagataaggtgggccaagagtggctagtgggccccacctctctccacagactttctccagcagtttacaggtgggcacctatggcgattaaggatggtttggccccacttttaagtcggtttcgactgacttgtgcaccctccaatccttgtactcacatataattggccagaggttcattttaatcacatggtgggtgtattttctccttaaatgtcctgcaaacatatatttaccaaaactagtggaagtggttagtggtaaactcctaccactaagatttgatagtatatttgatacaacctctgtttcatattataagactttctagcattgcccatacacacacacacaaatatatatatatatatatatatatatatatatatatatatatatatagaaaaactattatatagccacctcccacctcagtcaaaggtcagtcaaagcacccccacatcagtcaaaacccggtcaaactgcctaccaactcccccaccacccacctcttctcagctctcgtcttgcgaaacagtgtagtaacgcgacagccatcgtgcagtaatactgtgtcttacgtgtagcaataacattaaaatttagttgaaatatagtcatgacggatctacttttgataagcattttttttctaacatcatggtgcaaatggttttaaaaaatcatacatcacatgagagatattgttattcgaagcttgggtttttttggatcttaactctccacaagtagtaatactatagcattactacttgttactactatctgttatgcgttactacaatcccatcacgacgttattgtaagtgtgtagtaaaagccataagttttgtagtaacaatgcgtcttactgcaatttatgaatagtgttactgcataaacatgtggtaacatgtaccttccatgtagtaacacttcaactttgtgcgataacaagtatatttagcatgtgagacttttaacccatatttttcttttgatttctggtttactaacgttctatatgttctacagtaacaaagtgttttactgtagttcttggatagtgttactacataaacatgcggtaatgtgtaactgtcaggtggtaacgtgtatatgccgtgcagtaacacttttacttttgtgcagtaacaagtatatggttagcatctaagactttgaacccatatatttttatttcaattcctggtttactgtaattcacaacaatattactgtcaaaagtgcagtaacgtcatatacatgcattgcagtaacactatattggagggaggagaccagttttcttgacaagagggaggaagaacgatttcttgtggaggggaatatgtagatgtattttgaagtttaaacctccacatgcactacagtatcattgtgaaaacggtattaaaaaacaatacatatcttgtgagatattgcttttcaaaaattggcattttgaactttaatcctccacatgcagtaacataatgtgtaccttgcagtaacaacggcctatacatgcagtaacatggttttaccaaatgtataaaattgttcaaaacacttctatatcaatcagacctcgctcaaagccaccaacagactttacctatagcccacctattcgatcttcatctcgtaaacatgacatagtaaaattacaattatcgtgcagtaacatagctacttggaagtgataacatacacctatcatgtagtaacacttctacttttgtgcagtaacaagtatatggttagtatgtgaggctttaacccagtaataccagtcacttgactgtaataacaacctatatattttgtagtaaccggacgcgtatcgttactacatgttttgtgccaaatactacaaggatttagcacgtatgagaagataaatttttactaagaaaactctctcacaactgagaaatagcctactggttagtgccatgtggtaatttgagttgaaggtcttgagttctattcccattgaaggcaaattattcctttatttttttctctctcaaaaaaggagagaggtggaggggggatcgggagaaagaaggggagagagggagcgagcgctcgggtggggagaaaagaaggggagaggggaggagcgctggtggggagaaaaaaggggagaggggaaggagggcaggagaggcgtgtggggtgggggaatcgggaggggaggggggcatagaataagtattctatacctcgggtgggtgtagaatagtcttaccctatatatatatatatatatatatattaatgaatctagacatacatatgcgtttagattcattaacatttatatgaatgtgggtaatgctagaaagtcttataacctaaaacagagggagtattttctgtgtaggagttgaaagttaaagtttgaactttacgttcgtcaacagaaggctcagccttggttacccactaattgggctcatcacttactatgaaatgtgaacaaggcatcatctataaatagagagttggaggagaggatttgtacacgtgagaatgaaagaaagaatgagaaagaagccacacccccacatcttgtgcctccattttttctagaattatgcaatccctcttgaactatactttagcaggaggggttgcgtaatgcgttatcagcatgatgttctactggagaccaagaaagaagaagggtaagaaattgtagatctgcatcgtatttcttgaatcgaatcacaaaaatggattcttctctccattcttgatatgttttaccactcgcgataaacaccgccaccgccgactcggagtcatcggtggagagccaattcgggtgttaagggcagtgccactggttggaagttgtgcccctcgaacaaatctcggatcgagtcatgcacttcattgtgttgcgtcatgacatccaggttgcaaggttgtaggacgcccgtgtcccaccatgatcgtgcaccgcaacatgaaggccgcgaactgtatcacgcgggaacaatgggagaaagaagaaagaagaagaacgaaaaaaggaaagaaggctgtagccccgccactcctaccatggccatggagaccgccacatcgcaccgtcggccagtgggccaccgcatggtcgtgccactcctagccccgccggcacatggtcgcgccacacctcgccatcggatggccacgtgtcaccatcctcgcatggccgcactccatgctaagcgtcggatagtgccgggctgagcctccgacatcgtcgcactacaccctgtggcgccatggcttccgccgccattatgggagggagaaaagaaagaagaaaacaaaggaaagaaaaaaaggaaaaaaaatggaggaaaaagtagcaagcagcactagctagcgtagccgctgtcactgaccacccgcaatggccgcctaccgaccgctcaccttgtgcctgcccgtatgccacctccggcaccaaccatcgtgccgccgcatcctcccatcatcgtcgcacgactacttcgccgtggctcatagccgctgggccgtgccgttgcaccctcgtacttggccgtcgtgcgcctaggctgtgttgcgccgcctcagcttcccttgcccatgcgcatggccattgggggaaagaggaagaaatgaaacatagaaggaaaaagaatctcctacgattttacaaaaagtccattgtagtttttggaaattaagcgcatatttcttgcattggaaactttacgttttatacactgaattttctagaaaatacacaaataaccctcttcatttgggatatttgtttaaatagcatttgatatttgcaaaatccactaaaaaaatgtattctctcataaaagagccaaggaattttgaatatcgatcccaaccatccaagttgaggcacttttcttgttgatgtttatgattatgaaatttatttatcgcattttttattattgattatttgtaatgctgtttttacctttaactaatatctttgcgataaaatatatagaattgcatagaatatattggaattatttgtgaaaattttgtgtaccattatattgcaacatttgtacatgttacctgaataaaatttgcacatattttcgaatgactaaagatgattggcatcgcgaactagaaagttcgccaaatctagattatccctgacatatgcaaccaaagttgaaattgtactgtagtaggaagctctgaacaccattaactcaagtgcgctctatttattaacttgatgagattgatcaagcatttctatttgatatctcttgaatgagttcactagacgaatgagggcataggcactcttttgactgcacaaaaaagtggtttaaaggattatgatgcacacccaccactcatagagcaagaactatgcgcaggaatggatattttcgattcaaattcactaagcaaacgatccgaagagtatggtaatacgatacaccgaatttgcacccaataatgtgaaaactcttgatgctctatctaaacgcgatgaaagtcgcacgcaagtatcattagtacgcatacaagaagtatgcctagctagttgagactagaattatgtaatgttcaggatagtgttaactagaagaacattgccttcccaaaccaccagcacacagttgataatgaaatcaacacgagcagcttgtctggtctgtatttacctcaacgaaagaagaatctagaacaatgcactcatgagtatgagaagaaaaggaaaagcacactcatcatgaagagaactcctagcctatttgcatggctacggatgtagaatctcctatgctaggctggatcggtcctaaaatttattttagactagaaaaacattgtcatagctgccgagcaaaaagctcactgtcaagttaattgaatccaacgtaccggaatactttgtttaatcaattcactttgtcatcgtttgttgcaatttttgaatacaatattttttcaatacaatattttttaatacaatattgaattgaataaatggtttctaccctagtagagcacacatttttctctgcaataaaggattatttctagtataaaatagtatatttgagacgtttactattttgttgctttttcctagcacatgattataatgctttgaattttgtgttgcacccaaacattaaagaaaaagattgaattgtggtccacataaccacaaatagcactttaagagaaacaggcattttttttaaaaaaaatagaaatagaaatactatggcctttgctagtagcagcaattgaaaattttggccgtgccacgatcatattacctatggaacaaatatgcactttataaaaacatttattgtactatgaacttcattgaactctctaaaattatgaagatttgggttacactacttgtttgcaataatttttctgccatattggtcttagaattataagatgtatggtcatagcacatatatgcataatttccctaaataaggaagatttgtgtgccagtatgcaccagcatgagattaacacatggaccacataccacgaaggtataatttcagcatctctgaagtggattgcatggaatacttgcgctcctatttttggtactatatggatagaatgcttctgaattagtcaacatcccgtgtctatttgaaactgcatatttgccaagattgatccaacaagatgacgtgaactcgaatgaatttcactaatcatctttagaagtccataaggacaatgctaaagtagcatttgatgattggtgaattggcatagactagcattaagtaccaaatatcgagatgaatagactaagtgatgcggacatcactccttcggatacacacaacaatcctccaacggtcattcaaggaccgataacaagagctcgcgcgcgataattgaatttagaggtgagctcgttcttatgttcttctttgtacgaatttgagaatagattgctacctaatgattatattgtgattaggaacaatggaggggacaaggagacacttggagaacgacttagagtcatggaggatcatcgaggacatccaagtcaaggtggaggcccaaaccaagtcaacttcgagtgcaattcggagtctaggaccagtctgcactaaaacgggcacctaggtcatatacatgctcggattggggcgttctttatatggatggaaagctaagaagataacatttccaatcactactaaaaaagtgatttttctgtacgagagcccatgatttttgtaaacggaccataactagtggcgtctacaaaaatcgagcgtcattttcccatacggctccttaagtggcccatatggaaaaatcgattttcccatatgggcctcttaaaatggccacaagcaaaaatgagctcatttttgcatgcggctcacttaagcgcccacatggaaaaatcaatttttccatacgggccacttaaggagccgtatgcgaaaataaaatttgaaaaaatttaaaaaattgaaactagtttatctcaatcatatgaaatccaaattagatgatttttttcctaaatgtttctaaaaccatgctctatcatgttattgcgttcatattgctattattttggtcattttttcttgtgactttgtttaattatcaattaaaagtttgaatttcaaaacttcaaataatattttgaagtagtaaatgaattcagatgaaaaagtcatcaacaacaaagttgtataactcatcaagatctataacttatattacattcatttcctcatccgacaaagtgatggaaacattttcacaaaatttacatatctctctccatagtttataaaactatataagagatatacattttgtgaacaatgttacagataactttgttggatgaagaaatgaccaaaataaaagttatagatcctgatgagttatacaactttgttgttgatgactttttcagttgaaatcatttagtatttgaaaatgttgtttgaaattgtcatattttgaaaatcaagttcaaactgttcaaacaaagtcatatagaacaatgaccaaaacaaaagttgtagatcttgatgagttatacaactttgttgttgaggacttttccatttgaaatcatctagtacccaaaaattatttgaatttcctatattttaaaattcaaattttatagttcaatcaaactcggatggagaaatgacaaaaagaaaaatggtagatctcaatgagttctacaactttgtttttaactttttcatatgagtttatctagtgtcataaaaatcgatttgaaatttaaaaagccacatacgaaaaatcgatttttacatacggacgcttaagtagcccgcagtaaaaatggtccctcttccttccctgttccgcagttcaaaaaatttcacacctaaccctatcttatcctctcctctcagtcttctctctctcactctatctcttctctctctctctctctcagaccgagagcggcgcggggtgtggcgggcacggtggcggtgccgaccgagagcggcgcggggcggggagggcacggcgggcgcagtggcgacttcagtggcggggggcgggagcggccgcgggctccagtgccaagggcggcgggggcatcgatccgacggcggcggcacgacctcacatcgatccggcgagggagaggccgcgggctccagtgccaagggcggcgggggcatcgatccgacggcggcggcacgacctcacattgatccggcgagggatccagtgccaagggcggcgggggcatcgatccgacggcggcggcacgacctcacatcgatccggcgtcggcggcccgtttcggcgtggatccagcgacggtgcgacgacggcgtcgatccggcgtcggcggcccgtccccgcgtggatctgccacctctacctccctctgtcatcgccatcgacttccccgccctgccccgcggcgcgacgacggcgtcgatccggcggcggcggcgcgacctcacgtcgatccgcgtcggtggcccatcccggcgtggatccagcggggacgcgacgacagcatggatccggcggcggcggcctgtccccgtgcggatccggcgccgacaacgacggatgacggtgggagcggtgaagtggccgacgacggtgacgaattcggcagcgcggaggccggctggattgggcggcaatgggctagggttcggctttttttttatttcgctgaattcattttcgcatgcggctggtataggggaccgcttgcaaaaatccaatttttgcatacggttgctctagccgtatgcaaagatgacgatctttgcagaaaatttcgcacatgcggctggcctagccacatgcgaaaatcgttgtcgtccgtctgcaaagacgtattctgtagtactgaatagttttggtcccacatccaaattctttccgagtcaacgggaatcgaccgaacaagttgacgtacataatctgtcctggtgctgcgtcaccgtatttgtgtctttgggccgtgtatcgtgttggaacccattagggttgcatcaagggttggttgtacgaccctaaaatatatatatcaatactcgccgtaatcattatggtttgggttttgcttagattattctgtcaagaacagtttcgtcgctagatcggtttgtggaaccccaaattcaagtgcttaatcattcatatgcaattgtgttgcaatctatcttgttcttgcttgtgttcttcgattcgcatgcagtgattagccttctcgacgaggtcaaccgtgtttcggcacggttgataaccagaggagacgtggtgctgcgattgcagggctcagtagcgtgttcgttcagaagccggatcgatttgtgtcgcgactcctcccaaatcgactgtttatcaatacctatcataagattgggacctaacatccctcatcagtaagacccgttctaatatctatggattgcagtatttgctataacattattgtaatacccgttgtgtgacacatgtagtcctaaaagtaagtggattctgatagaaaatccaatatcatttatgaggataaagtagaatatgtcacacatatacaaattgtatatgagatacgtgagaagcaaactcactaagcatatgaaccccaagttcttctatgcacataaattggataaaaacaacataatattgcggaatgagttatgtgaaaatcatgcagatttgtccactaaatcatcgttgacatcttatcttggataaatatgtccgagaaaccgaaataatgagaattagagaaatgcaaaattcagagggagaatactgttaactcattccagaattttgatatgaaaaatcaagtgcccaaaatcaatatagaaatattgaataaagaattgggtggattgtacttttcttcccttggataagttttccctacagtttttaatcgatgtttttaatgagacaattcgtacgatattacaaacatatgctatctactcatttttctccaaaatttcccagtgggtttttacggagttttgatgaggcaaatgcatcacgcagtgagagctaatgttagaaaagggaaaatgttagaaaaccactggcatgtagaagtctagcctagttacccactagtttggcccatcactaatatgaaatgtgggcaagacattgcctataaatagagttttggaggagaggatttgtacacttaagaatgaaaagaatgaataagctaagaaaaaaagtcacatcctcatattttgtacctccacttttatagatattatgtaatttttctggactatacatggttgcataataataataggcagactattttgctatttcatggcattctgaaatatattagcctactctgctttccaaccgaaatccactgcagcataagtagctttttgaaaagaaacagcagcatatatatatatatattgctctaattaaagccaaacaccagaaaccaatagaaaatggcaaagaaagttattcctaggtccaccattgctgtaggatgggacatgtgtatgagctctagttcatttggaatctttaattcacatgcactccctaacttgatttaaaatacaggcaagcatcgtcaagtttcttttttatttgtttgtttattataagccgatagggagggcacgcggcgaaacatggcaacaacatggcgacatccgtaaagtacgagttctattttcatatctatgaaacctaatgattttctacttttctccatctagagttcttcccgaagctctatgaatttccctttcccaatactggattcgttcacagtgcaccagtcgatcgtcttatacagcactaataatcaattgaatcgataggaattcagtggcacatgtcacacgcactagaagagagagtaggtaggaaccatgcatatacaactatttagtaaagatgctcaaggaagcactggatccttcctgctaaacacagccacatgcatggcagtccctgcccaaaaaagatattcattcaataaaagagatataaagtataataatacatattactgcattttaagaacggtgaggggcggcaaacaatttttttaatgaaatatgatgacccctattttacatttagggttcaattttcagcaaaagttatggttatcatagaggtatgaaaggcacgcacctacaatggaacgtcaaaaattggaccttcctcgctactgcgctgggcacctgacctctgctgcacgctcgagagcccaaaccagtactttccgcgtaaaaaacatgcaagtatacgagtgaactaatgctcgatgactcttctgcggcggttctgcgctcagctttgatcgttcgtcttatttgaaatttttttataattagtatttttattattatgagatgataaaacataaatagtactttactcgtgacttatgtttttaattttttttaaataagacgaacggttaaagttggacgcggaaaaccatggctgcacttataatgtgtaggatcgaacacaagcaaccaagcctaccagagggggtgaatggtagggaaaactaaaaacccaaaaacttttagtggaaatgaaagttacacgcacaacctgacccacattagtcacacgcactcacaccaacatccacacaacttttcaaaccaattcatcgattaaatcatttgtaaagccaattgttcatcacaaatattaatcatgacaatgatttcacaatctcctccttgataaacacattggcaacatcttcacaatgcaattttatgtttttgaaaaataaaaaaaaatcacaagtgaaaagaaaaactctccccctttttaaaagaaagaatttctcccatcaattttcaatcaaagcacaaaattgactattttaaaatcgaaacaattcaattctccctctttcaagaagcatgcattttgtatatttctctccttttgataatgatttcatcaagaatacaaatgaaaaataataaccaataaagcaccaatgcaatgatgtcatgattgtcacttgtaataaccattttttttcgagagctttgaaatgtacctaaagcaattcaaggtcatgttttgcaagacaagggagataaattaatcaactagttaacaagcatgcatcatagtataaacatgaatcaaacatattacaattatgctcaaatcaacaataaggattcatgatttcaaatgatttataatgcaatatattcacaagcacataggttgaaaaataaacactatacatatatacctattgcatttatcactctttctcaaattagctttagcacaaaacaaccaagagaattttttaacttttatttgagcctttttgctcactttttttctctcaattattccgggtacatccttgtcgtcaagactgtttctaaggattcggcacctattatttttgctcacatcgaatacgtccttgtcgtcaaagactgtttccaaggattcggtattcatttttttcatattttttattctcttttcacaatgaacaattaaagctatttgaagaataacaattcaataaagcatatacataagcatttataaatcaaaccatatgctagcatcaatattgcatattttcttaattcaagtaacgaatttaagtgtcatgcatcatctcacttaaaagaaatatctaatcctcatataaagactaaaatgcatacaagctaacatagaaacaaatagacctcaattattttgctaccatgcacaagaatatactagaggtataaaacaaatctcttctttttcttatttttatttattttcagatttaaaagcaatgtatgaaaataaacatgaatgcatgaaaaagcattaactccccctcaaattaaccttcaattctacccgaaaataaatcaagaagaaatcaaagattttgaaaaagacatccaattgccaatgacatcaccaaggttctcatgaattgacatgtatccacttgtattaaaaaaactactacctgaaatactagcatatgaaaagctaataatcgagagagtagaaccaaaaatatgtcaatccaaaactaaattgatgttacctttaaaagcaatcgtcatctcaacgttgaacactcatggggagtatgccaccaaaatacctacgaacgagaagatgtcgaggcctccgtgttggggttagaaataagaaattttggaatccaacactgagtcacacgatcagtagaaccagtaggtacatatgcactaacaaaatcagaaccagacttacctgaaaacttaccttgtcgcttcacaaaagcatgatttgaattatatgcaaagttgccctgaggccggtctgaccgctgctgtcccagcggtctaaccgggctcctcgaacaaaaacctgatttttgccaccgtcgttttccaaaagaaatttctgtttcctttttctgtttgcgggcaagtcgaaaacaaaaaccaaccaaatgtccatcttttccacaaaaagaacaagtgtacttctcacgacaagtttgtgaagtagatgtttttgaaattgatggttttgcaacaacagaaggttttgcattcacaacatttgatttcgaagaagatgcattcaaagaagacatgatgccagcagatttaaacacagtgttcttaggctcagattcaatcaaaatttcacctctcctacagtaggaggatgtctagcatgataagcataagaatcaaaacctaaaccacgattgtgtgtgctaactttagattgatcaagaatcatgttgaggttctttttactatcagaaaatctttgcaaagaacttttcaaataagaaacctcctgagtaagaatagcacaatctttgcaaacatccaaaagacctttttgttttctacaagttgagcaaataaacacctcatcttgtttaataatttcttccatgtgtttaacacgccctaaagcatctttcaacttcatctcattcagaatacactttgaacaatcttgagaaatcaaaacaccattgttttgttttgccttatttgcacatgaagcattgaccaaagaacttgcacaaaaagcaactttgtattttttcaaaacgttcttggtcaaaatcaactcatcaacaacacgagcatgtaaagcaaatccaagagcaaaagaagattccaactttttagattttttaatctcaaattccaattttttgcaattaacagaattgacatctcgcaaagcattaatttcagaaaataaaacttcacaagattgacaattatcgtcattaggaatcaaagattttaatctagcaatttcagcattaagaatctcaatagtatgatccttctcatcaagaacaatagaacatgtttgaagtttcttaccaaatttgtaagcagtatattctaattgatcataactaagcttttcttcattatcatcatcagattcatcaacatcagaacttgcattacgagcaataaaagctagatcaacaacttgcttacctttgctctcatcttcatcttccgattcatcaaaagcttttatgatttcttggattaaccactgcatgcaatgtttcttcttctcctttgtgttcttcttcttgttcacgtcatcctctttgactctcccatcatcttccttcttgcctctcctaagcttaggacaatgtgagcgaagatgatcaagtgctccacactcaaaacaacaattcggttctcctcttttcctgttcctaacatttttcatagctcgagaaaatttgttagataacaaaaccaagtcctcctcctcgaactgttcgagttgatcatcagacatggcattaaataaagcaagaacagaagacttcgacgaagaagcaccaacgtccaaagaagtcgaagacgaaaccaaagcacttgacttagaatcgactttacgagcaagaatattcatctcatgagttttcaattttgtgtaaagcgaatccaaagtcaaagtagacatgttaacaaactcctgaatagatgtaactttcatctcccaaatagacatgtcaagatcattcaaaaagtgacgagaaatctcaaattgtggataatttgcatcataagaagaatcaacagatctaagatcactcaaaattttattaaccgagaaagataatcatccaaagcttctccaggtttcatcttaaatttaatatactcctttttgaaaagatcacgatgaagttctttaatgttatttgttccctgatgaaaattactcaaagcaatccaaatctcatgggcagtttgaagatgaacaacacgatcataatcagaacgagaaatcccactcaaaagaatattgcgagctttgcaattttgttcaaactcaatttttgcagcatcagtattaataactttaggaatcacataaggatgagaaacttttctccaaatatcataattctcacccataatgtaagattgcatcctactacaccaaaaaaaaaaatccgttccatcaaaaacatgaggcttagttgaaaacctaacagaagtagccatggcaaaaactttagatcgataaaaatccaaagaagaaaacgaggctctgataccacttgtaggatcgaacacaagcaaccaagcctaccagaggggggtgaatggtagggaaaaccaaaaacccaaaaacttttagcagaaataaaagttaccctcaaatcgatggaaatctcgacgtagtcctgtcgccgccggtcggaccgctcgcacgccgccggttagaccgccggtatgtcgtcggttagaccgccgaacccgatgaaacacaaatcgaagaactctcaaagtagatgacaactttattgcttctctttgtgtttacaaagtgcaacaacagcactccttacaaaaatctcgactaaactcgaaaccctaactaaactatcaactctacgctctccaaaaaccgataccgggaggacacaccctccccctctatttatactaaaaatcctcctactcaaagtaggagtacaactcctagttccactaggactctatctttaattatcaaatcaaattacaatcccaaattgtaattctctcaaactacagccgcagccaaccgcatcggactcgatctcctgcgcttgctccttcttgggcctatcgcacgtgggccgacgtgctactgctcctggaccggctcggcctccagccagctgccaccgaagcccaccgggccatcacacatgcatggcacaacatgcatgcatcaatcaccatacatacatgcatatgctacgaccagcatacacacatatatgcatacacgacctgctacagtaactcgaagcactgtagcaccatatacttctctctaatttcttccaatctccttggtgaacactggcacttacacgcacacctcgtaaagcccgttgcgaagatcactcccacacggtatccatccaccgtgtgccatctcgtatccaacttcgtcacccggtattcttgaccgtctggacctcaactcctccccgagtttagtcccgatctccaccgttgaccgaagttgacctccaagaatcctaactctagtcaccttctcacatggtatcccgaccacagtagacctctgctcctccctgagcatagtcccggtcctcaccattgaccaaggctgacctcaagtcacctacacacaatcagacaaaacaaccgtttctgggcacagatatcacaacctgacccacattagtcacacgcactcacaccaacatccacacatctttttaaaccaattcatcgattaaatcatttgtaaagccaattgttcatcacaaatattaatcatgacaatgatttcacataatgggacggaggtagtagtttttttttataaaaaatatattttcttaagttttggacgagtaggattacttcaagatttatgctaaaatattaacctcatccgctcattccattaccaactcaattgatccctatcttgacccgtaacacgcggataagactcccctagctttgtgaagcacaactacaaactgcacaaagtgaaggatctgtttccatagcacgtagtgccgaagtgcgccttccgtccctccccttggcccgcaccaacgaggcccgtcgatcatccctttcctaccacctccctccttctacaatatatattattacacatttacctccactttttgctcaggtccgacggaattctcctaccctacctctcctcccttttctctggcttctccgactaccagattcgctgctcctatggtcctaccttcctaacaacaaggcttctcatatataccatgttgtcaatcatgtccaacgctctctctatcttcaggggactgatgctagcactattgtcaccgtcgcatcactgcctaccactagtctttcaccattccgaccatcccaataaagccaccctcaccaccctctagccacctttaattagagtaagttttatcctaacaaagtaaaataggctctatgttttgtgatcggatggactaatttattttcgattggttgatgtaatgtaagtagctagcgaggtgacatgcgtttgggagttgctggttcaaaagaagaaacgtaggtcacatcaaaattaagtactcagcttaggtgcatgacatttgattaattatatgcactcctaccaaggagcaatatcatatgcttatattacagtgacaccaaacatagattacgtactaattaaatgcactgtgcacgtcacacacagcactgacgctatatcactttgctcacgagtcgcgcatgcatgcacccggccattaaatcacatacataatacacgtacaatacacacataaaaatatacatacgtgtgtcgatcggtgtgcatgtagatataatatatatgtaaaaaccgatcggaaaaaggaaaaaattagaactcaataagagtatatatcagcagccagcagaaattaatatgcagtgacgatggccgggcgccgggggagctggatgggggatcacgaggaagggtggtggtggtcgtcggcggtgggcggcagcaccggcagcaagcccttgtcctggaggcttcgcacggtttcgtagaggcactggcggacggggacgaagtccatgccgaggtcacggaggcgctggttggagaagaggtaccccttcaccggcggcgccgcctcgtccttgcacctgctcgggacggggtactccgggaaaagcttggcgagggcgcggcagaggtcgccgcggtgcagggtgctctcggcgcagatgtaccggccccgcgcgccgccgcagtcgtacacgcggacgtgcgcctcggcgacgtcgcggacgtggacgtacgcctgcgctgcgttcacgtacgtcttggccgaccccgtcaggtacttcatcacgtgctccgtgctcgcgttcaccgtcgcctgcagcagcggtcccagcaccagcaccgggttcactacgaccaggtccaccccacgccgccgcgccacctcccacgcaccctgctccgccaccgtcttcgcgtagcagtaccagttctgcaaaattatgaagtattatatatatatatatatatatatatatatatatatatatatatatatatatatattatatgatcatgtttccaactgattattaaggtcgtgttccttattatactgaaaatgaagacgaagctagctagagcacggaaaaagaagaaaatcattagcgtataattaattaaattttaatcgttacaaacttgaaacccatataaatttatctgatattagttttagagcaactcctatatatagttataaaattttctatattccatatataactatttattcttagaagttctgcacaagtttatactattaattggagaactatagatcgattgtaagaaaagttgtagttgttagaagcgtttcaaaaagggctgaacctatatacgttattattattattaaaaagagattgcagattattttcatgtaagatgaactatctttcgtaaatatgagtaattatgaaaataatcctgctctgtttggtctcaactacagaggagtaaatgacaattctggatatatttgcgcggtagtaggtggaggaaaagtatttggggtagttaagaagagctcctcaaaaggaaatggcttggtctttgtcaacttgactacgaaacaccgatgatgaccatggaagatgagaaatcaacgtcacctctttttagccacgtttggtaaaacttgacatgcgttaaaagctttgacgaaattaagcagacagtgacaaaccatgagcatgaattcagtaatcatcatatattagtatacataagttgatataagtcgtagtttcaaagatttgaagccgtaaagttatataacctagaatcttcccagtctcgtttaattattcttttcagatgaaaactaattacttagtatataacaagttgatgatctttaattattagcttgttattgaaggcgtatatatatattccctccgtcttaatttaaactcagttatgggtttgtgagtttaaagtttgaccgtccgtcttatttaaaatttttatatgattagtatttttatttttattacatgataaaatataaatagtactttatgtattgcttttttctaaaatcaactttataaattttataaataagacggagggtcaaaagttgaatacagaaatttataactgcacttaaaataaaagctaattaatttgcatgcatgttaattaactatgcatcggaggaaagctaattaagccagctactaggtacacacatgacatgacacgacatacctctgtcctcttgcagtattcgaggtcactccagcaggtgtcgtcgacgggcttgttggggtccctgtaggggttcatgtagacagtgccgatggaggacgtgaacaccactcgcttgatgccggtgtcggccgccgccgttatcacgtatctcgtccccctgatcgccggctctatcatcttctcctgaatttgatcagatcaaaccgatttgttagttactagttaattatactgcttgctcgatcgagaccgttaattgccattgaagtacatgcatgtagtttacatacaggatcatcggtgacgggggaggcagcgtggaagacgccctcgcagccggtgaaggcggcgacgaggctgtcggggtcgaggaggtcggcgcggaggaggacgaggcgctcgccggcgccgtccagggctctcaggtggtcgttcttcgggtccactgccaatatcgtcagcaattaatggagttagtactaaaactagctatatatatcaaattaattatacactcagcaattaaagaagatcgatcaagaagagtatgtattgcagtgcgtactagggttccggacggtgccacgcacggtgtagcccttctcgaggaggcgcttgacgagccacgacgcgatgaacccgccggcgccggtgacgcacacggtgcacccatggccggagagcgcggtggtggccggcgccgccgcggctgtctcgtcagtcggcatctcgatcagtcgatctcctccctgaatttcttcgagctagttaatttaatttccctgtgatatatgttatcacgccccctgcagggacgacgacagctacgcgtgtacagttgctagctagtttgctaggtacacctgtgtcgtcgtctgctagctaagctagggagcaagctgcaggtttttgagtggtgggtgcagcggatgcaaggagacgaggcacgcaccgtggctgtatttatagaggaaaacaacacgaatatggcaagagagacacagaccgagagcgagagtggttcaagacggttggaaaaggaaaaaaaaaatatggtagggcccatttgatggaagggccatcacacaccccagttggtgagaaaacttcttttattttccttgtgcgctcgtaattgattttgttcctatccattcccaaatagtacactccttattatcattttctcgaaagaaaatatttatcatcaacatttatattgattgcgctactattaaaatcttgatcatattaaaactttaaattatcagatatcgtctataaaccaaagctgtacggatatgcatattttaacgtgcgacatatttatataacactgtatatttttaaatatttacaaattcattactaaaattgtaggccggagtgtgatcgatcaaagtttaaggacctgttcactttgatgccattttcaaccttaccaaattttgataaagttgccaaaaaagtggctatatttagtttgttgccaaattttggtaactatataagaaattctgcttggcatcaaagtgaacatgccctaaatatatatatgataaatatttgagagcagtggtagtactcatcactagctagctggtaagaactattctacgaatatatgcatgatcagatttttcacaagcggttttaatttaaattataggacatcctcatcattattaccagcagattttcttatgaccagcctatagaaatgagcctggaagtttgaaaaaaaattcactttttaatagtgcgacaaggcacctgaagactggatatagtgaattactgaaaattattatattctacatgcacgcgtgattcagaagcttctgtaggtatatgtgcatgtcaggacatatagaagcgattggcaatatagctgctgggtcgtacgtaggccatcagctttggcctttaacttggattggagttggtacccagctacccccgatcgagatatcacttagagcagccataatggttatttataggctttttacaaaagatccatgtcagaatattttcctacttagaatagattaaataaaaagagagagcaaaactatctactaacctggagatagtctatagagaaaaacgtggcaatagattagagaactatagatacccatgtagacataccattgaagtggtttactattaatctaatctattgctgagatgtacatgttttatagatagcaccttactttaccattgcgggtgctcttatattctagagctggcacgattgctacattgaccacctggcgctattgaaatttaagataaatcaggatttatggacagtaaaaaaaactaatcaccgtctacacgtccagtaatcagattaacaacaacatgatccctgattcttgtaacacaggctatgttgctaaaatatttccttgaatatactaaaatgatttgctctttgaaatatgtgaagcacgtgattaatagttgtttacacctaaatttgacacataagttcaaattaagaaaaattaccaagatttgggaaaatcgccggtttcctccacagggccggtaagaccggcggcatgtggccagtcagactggcagagtccgagaccgagtctatttttatcgggtctcaggattccttactcgcgattcattaatatttacatttctcgatgcccatgtagccaatcttgtgtagaagaatggagagtcacgtgttaaatccgagaaagtcattaattaaaatgataggttgttggattgaaatatgcctatcaaaataaatttttcagatttgaaaatatatctatcaaaagtagatggagggagtagtatatataaagatgcacaaattccttgttgcaacaagataatcaatacctagagagacaaaagagaagtatatctatagtataatactaagcattaatatagtcttttctatcgtgttgacacttgttacactgcatacgcgcgtatatacggcatcatcgcgtcactgtatccaacccaacagtgaagtacaaatacataatttctctatgtatagtttgtgaaagagtgaagtgtacgtgctatttattggatccatggatattttgtgtaccaccatgaaattaatagccataagaatttattttgggaattagtctgtcggaaaaaataaaattctcagtgatcttttttctatcgtcttatttgaccattgtatacatatccaaatggaacacaaaaatttgttttttttcagcagctcctaacttttcggtgtagactagctacgagctattcatgaagaacagtacgaatgaatctatcatattatcattaagaagatactggctagctaaacgtacacttttcacctagctagctggacttaaagcacaagggatgagccgacgatcgaaaaaagcttctagaaaaagttgatataataatgtgcttattttcctgcacgacggtgcaatatattatgtacgatgtgaacgtgacaattgaggctttgatgccttcagctttactagtactactagattttcctttcaacttggacgtcgtctttttgaaaaagatcatggctagtgcatacatagtgcatctttatttagcacgctcaatacgcaagaaagcgatcgaacgtgtagaaatagaatcaaaaccggatatataaagctatagcatgcaagaaattaaattaattaagctgaagcatgaacaaattaattaacaagcatctctttaatacccaaaacaagcttttcttgcaccgatcgcatgcatgcatgctaaaagattcacgccctggaaattagcacaagacaaattctaaagtgggaaatcgggtatacttcgttccagtagttcttttttcccacaagttgagttcccttcacttttcggtcggtaagatgtctcctgttttttctcctcttttgccatttggccctcggaggcttagaatttgggatcgtgcacaccaattagtgagcatgcatatgggcactagaatatacaagcgtacactatatgggcatatcttgagattaacgaaatcaacacatgacatcttaatattgatatataaatacgtcacctgccaataaagaacatagatctactagaaaaataatttatcgccacgaaaaaaatcgtagcataatgctaaaattgtagcaataattacatgttgccacaatcttaaaattgttgctagccgtggttataaatagcgttgtaataggttattgcaacgatttttatttagttgtaacaaattttgatattgccataaaatggatgtggcaaaaaaatatattgcaacatttcacatcgttgcaatagataactattgccaccactccatgtgtggcattagttctacgtaccaaattaaatgttttaataaaaatatattatcctaactattttcttttgatatgttgttatggctaggattcgaacccaagatctctccctcacgcgcgctctacattttgtttacaaatgcatatcattctatttgagcctgccgatctgagatttgaatcatgaatttgagtagttaaaagatttcaaataaaaatagttaagttgtagaggactaaattgcatacaaaatttatctaaatccgtgcccatatgaaaagaataagttaaattatgatatgctaaattttttattgcaacgaatttgttcatcgtggcaacaaaaaatagtgaaaagtgccatgtactatgcaaattgccacataaattaaaattgtggcgatagaacacgtttttttgcaatagtaatgttttttgtggcgatagctcatttcctattgcaacaaaaatactgaataaaaaatgtttgtatatcggtgcaacaaaatatagttattttccacagaaaattatcattgcgatagtacaatataattatttttcattataataaattggtggcgatagctcaattatctcgtagacagactccactaccataaacctaaccaattaaccaattaaattactctagctagctaccccttgctagtaatttgagtaactctatatacactactagaaaaaagatattctattaacaggcccatggagaaatcagcacatgatgtcttaatatcgatgcacatatcacctgtcaataaagaacagaacgtagaaagattacagattacagcacaataaacctaaccagttaaattagactctagctagccgtcccgtgctagtaatttgagcaactttatagacactactaaaaaaataattttctattacgaggcatatggattttgcaggtgtattttcaaccgcgatgattcgcctgcgtagttgtgatgggggttcattggctgttgttgacacaaaaaaaaatgaagtcctgggagatctgcttagctctggtgcaggttctaaattatttatgcggacgtgctagtcagtatgatcctgcaaataacaagagagataaattgatgatcaaagagtcgatcggctaacaagctgatgtaacgatactagccgatgtcgtaaggtaatttggaaccatgccattataattttgcaaagtttgagatatgccatcggtatctcaatgacatgtaggacccatatgagtcaatgacatatgggtcaggatggcatatctcaaattttgcaaaattattatggcatggttctaatttcccctaacaatcggctatatgttcaatatagattttgatacttggatcaaatgatataaaggcaatcagacaagcagtgagacttatagtcatacaacaatctaatccaatagaaaccaatcggccaataatggtatgataaaataaatgttgatccgatggttaaagcatatatcggtttgaaatctgacgtcattaaatctacatgattaagtaatcaatgaaacatttgctgcaattggctaaaatcaacttgtatataatccttataagccaatacaacacttaaacaatatctagataactcatcagctgaaacctcagtgaaacattgattgatgcctattaacttaaataaatataactcacaaccacaaccccataggtcaaacccaaccgatgcagcataaggttgataattgtctaatagatttaagcaatccaatatgacaccgatcaaagtggtcatgcattaaatttaatgaagacaataaaaccacacatcaaataagatcggctaaccctccgatgaaacattaacatgaacttatcggcttaacaagatttaaattaacaatctagtaggtcaaacctaaccgatgcagcacgagattgtatatgttaatctaatattcaatgagtcgataaatctttctaatgtgatggatagaacaaatctatctaaagtgacattttgtttaaagaaacattaacttgatcagaatataaatagtaatggaactaaagatatagacggtataccacataggtaacacttgcatcggcccgattagaatatcggactcaaccgaggaagtcctagccatgccaatgcaagcgaagatgatggaactcacttcttatcggaggtcgaactcaatcgatgcagcccatgtgcgaaaccaagaactcgtcgaaataaaacctcgtgggagtgtggcgatgcgctgaagatagacatattaatatgtgtagatagattacagggacctcggtgtacatatttatactcttaagctaataagagtcctaattgtacacgattcaaactttcgtaaagataaaagaaaatatacaagttctgatcgaatactaaacatactttcctaaaactaaaaggaaactgactgactgcctaattaatagataaattgccatgccacatcctccttaaagtcgacctcttctagatatgattcctttaaaattgattaatttacttaaccaactccatcaagaatccaactgctggtgaccgataatttctatcggatcattctaagactctgaagccgatattgtctctaggccgatgacaactttggagtttatcaaaatttggcattaacagctggccatttgcgaaatccatttttgcatgacagacggcttaatattataatgattaagcttctaattgtcctttttatatttttctaattggtccttctagtcatgttttatctagctccacgtaccagaccgtggttgcttctttttcccttttctctcaagtttggagaacacatttgctgcagctgtttttcttatgattcatcatgtgaaaattgtccgaatgaccggtcatgaggtttaacttgaagattaaggtagcttacattgttagcatgaacaattcaattgtcaatacaagttattcaggagttcatattaaaaaaagctatctaggttaattgttcaactcgcttcgtcaaaaataaaatatttgaacgatatacaaactgtgcgttgctagctccaatatagagaatggttgacatctcattaatttctcgtttaaaattcccatcttaggtcatatctctaagaaaatgtatagtagaaacaaataactcgacaagctgaacctcaactggctaggttccttgtggtggaaccaacccacccgggttcaaaccctagatttgatacgggtgctcgcatttacggctaattattctttcagtggtaggtgacgtacccgtcgacagcgaagcgtctgtggtgacttcgtcaatcggaggtgctcataggggtagggtgtgcgtgtgtgcgttcataggggtgagtatgcgcacgttgtgagcgcctgcatttgtacagtgtttctaaaaaaaagaaattactcaataaatcgtaaaaatatatactattaatgggtggctccaagctagacacaactccacgaaaatgattagattcctctgcttcttgttcacaagtgagcacttgcggcaagtgtatccctcaccacacaagagcatgtagctagtgacaaattcaacacgggcatcacgttgttttctacaaaagaatccaaaagtcgctcatgaattgtttttccaaatggttgttggtagcagtagcatagaaagcatgcgatatttgacgcaagtatgcttcaaataatgacctgcctgaagaatatataatgtattaattatgcaacatgcatgttacaatctattagaaaaatacacataccatacttggttgcattagagatacaaccaccaggtacaggaattcactattctacgactcatgcagctagcactcaaccagcttttcctattgtcaatgaaatatttttctaaaatctagcagagtttgcaggtgtattatgacaattttgtttagggcaactgttttatagagagtctagtgctttggcgctaactgtgtttgatcattcagtataaattgctaattaataaagagaatttgtcctcgaatataaattgctgatagagatattgttgcgtttcaacgaaatgtgccgaaagcaaaaaactgtataactgaatttgatttctccatgccacaaattttcacagttgtgctagcttccatcacagcttaaaaaaagtaagaaaagcgtagcacagttgccacaaaagaaccctaaaaatctccttggtaacgatctttgctattactacattcgtcctatataaaggattttgtccatattgttaatgtgcaaaatctattgaagtttgggacagagatagtatttgattacagttacgtaattaaacattataatagaccagttttgaaccttacaacataaaaaaaagattagctcgctcattaaaaccaaacatggaggtggccggggtggaagtggtgcatttactatttgataatagtagcatttactattataactactaccccctttatattattataagtcattttgatttttttctagtcaaacttttttaagtttgactaaatttataaaaaaatatagcaacattttcaatacaaaacaaatatattatcgaaatttatttagtattatatcaaataaaactaatttggtattctatatgttgttaaaatcttctataaattttgttaaaagtgaagaaatttgattagaataaaaatgttaaagtgactaaatataaaacagaggaggtacaaaacacatcatcgtggatggactcgaactctcatcccagagaattttccgaactaaattcatatcaatatgcaataattaatcgaagtagtatcaaaccagtcactgtcatgcatagactgttagaataattgggctaggcccaacttataatattaaatctcaaaggcccataataaatgttgaggataataataccacctctggatttaagcgagaaatatctcaacctaaatagggagttattggaggctccctgttgaccagttgaggtgggggtcggaatgccacgcgcgcgcgctgggccgggccgtgggcgtggctggcggcgtgcgtcacgtcactatccttttgcagccactaacccacgttcccacgattccctccgcaacagcgcgtccacgttctttctcctgatagataaggaggccgcgagtccgatccgacttcttagcttctttcccggtgttagtttctccctctccgcgcctgagttgctctcgcttccccgcttctgatctcttgcgcgcacgagagattggaagaagcagtgcctccgaaaccacaccttcgcctgagatctacaccgggtaggcgggtgatcaggtttttggggagtgcctcctgcacgactgctcatcgccatgtctggagttgctgctgccactactggcggaggtggtacgccgccgccgacaggagctggatccggagctggtgcgccaggaggaggtgccgtgaacgactacaacaacagaggcaattctgcctcaccatccagcgaagggccattctcggggtataatcttctcctcctgctactgctgttagcgctatactatgtgagctatgttcttgttcctgttctacatgatgcctctagcatgttatcgcgttactggtatgttcctgtttctgacattcatgatgtgcatagtatgctactggttatgtctgcttatgccatgatcattgtttcaatttcttggattaaaatatgccgaataatgactatatttccaacatagacgacattattctggtcttgagatcgacataaagagtctattgtggctgctgctgctctatctctcgtccgttcgtgtgggagtctaccacatgcagtatgcagtcagccaattgcatccgcatctagctattactcttcacccatccatgccacgagcgattgcacaccaatgtatgccactgccgccaaagcttgagccctccttcgcatccccaccccgccccactagcacgtacgcacgcacacccactacacgtatcgacgtataatgccaatatagacacatgcatttcaaaacgaaataaagatataaccaacgtattattgtgttatttaaattcagaacctatttggtagagcttaagcttcaactttatctcaactggagctggagcccaatcaaacagtttcaacttcacccaaaaatgagtggagtgggctgaagtgctctcacgaaataaactagagatgcggagctatgttctgctctacaactctatacagactcaactcttgtagttaattttaatttaatctatgctattgcaactttgttaaattaaagaaatactactactattcacgacatcggctagttgccgtcggtattttgtctaatttgaaccatgccattatatacgtctcataccaaaattcccctagccctcgtggtacacacctatcaagtttctgtttttccccaactcttcgtcttgctcagcaagatcggtgtcttgtcgtgagcaggatggcggaggcggcaacagtgacggtgatggcactagagctcgatgaggccgatggtggagcgggagcttgacgaagccaagccgtgcgtgggagctcgagggggatggtggcgggttaggattttgactgaagatggaacgggcggcgggtcaagagctgacttagacaacatggagccaatgaggacaacacgaagatggatcttcttgagacaccactggaaccgcagccacctggccgagtgccaccactcctactacttgctccgccgtcgacgcgactgctgccgctcgctttgcgatcgacactaccacttgctccaccgccctcgccgccgtactacaacccactgccgtcttgctctcgagaatcttccagcctcgccgagctacatgaatgactagggaagaagatagtaagttaaggtgggtcccacttgttagcctctaaggctaggggcattttggtccatatgaaaatacggtatgaacaaacgtagtccaaccatggttgagatgtatataatggcattgttcaaattttacaaaatactgatggcaccccgtcgatatcgcgactactagtgactttttttaaaaagtttggtaaagttgcaatgacatggattccaattaacccttaaatttaagagttggagccctaccaagcaacccctctgttggttttctcccatccttacatggatgcatacctctctatgtacaccaaaattaattttacaaagttggaatatctttataattgtttatgtattttccttgcatttttaggaagcatagatatttgtctcgatgattacgaagttatacctttatccgacgttttatacatatatacctctgaactaacactatgaggggtatatagacctaactatgactagaaacgtgatatcctgggccaattaggatatagtttgtgtggcccgttagagctatatgcgcatgttaataccaccttactagtttagcaaaggtggaaccaacttataagggttcttcccttcaaccacatcactcttgaattaaagtttttacaaaaatgatgctaaaagtgtgagtgggtctgtcgtcggataggctgggttacgtggtgcagactgctaaaaatggtattagagccaaaccttacagttgcacgggtgtatgtgacatcctgatccacttaggatgagacatgtgtggcccataagtgctgcttgtacctctatccatataattcctatgttacctcttttacacgaagcaagaatgaaagtgtaagtggggtgatatgtgtaagtaggctcacctgttggattggctgggccgcgtgatttttgaagacaggacgttatattaaacttgtttttcttaccagtttaaccatggtttaaatttggccagtttatttttttactttaaaaataacagaaatacctctccgagggaaaactctaaaaaaacaatttggaattgaaaaataacaaaaaatactaactagcttgtttgtatagaattctatttccatgtcccaaaaaaataggggtaaagattaaatgatgtgtaataggggattaaattctttatcaaatatagatgtatgaattatctgtttgacggctaaataataatagaagaattctataaagacaaacagttttcaggaatcgtgctacctttctgaggagtatttcaaaaactagaaattaatttaaagaaagtgttttattatgatgggtcaaaactttatgtaattcccaccaaatttgatttagtattaattgtggcatatacattaataattttttaattaaattgcactaagggactgttcagattatagccaaaataaaccttactaaattttggcaagttggcaatattattttttttatgtatttatcaaagtttggcaacaaactaaacatagacacttttttggcgactttgcaaaaaaatggtatggttgaaaatgacatcaatctgaatagcccctaaacatcctttttcaatattttgtatcatggattgaactttatatatatgcaagtgtcattaaaaatcccttgtgaaaagtcagtgttgttacatgtttgtgtaagctaaattttagtttttgctgttttcataaccttactctgtataaatattatatattctacatacagagactatataatgatatatgtattgaaagattatacaatctattaacttaataaagtaataaaaaaggagtctccacgttcgctctcatggtctagaagttctcacattaatcaaaagaaaataagagaaatagaaaaatcgaaggagattaggattaggtagaaacgaaaaagaaagaaagaaaacatctcatgacacgggaaaacggacaaggtctctgaaataagtgtgaactgggtactcctataaactaaatgtaatcaatcagtacttgtcatgccaataaatacatctcatagcaaaacacaagataaccaaagcaagtcataaatcaaaagttcaaaattaaaaaaataagaaatattggtagctagccgcgtaatctgcgcgggtcaccatgctagttaacaacataatagatatataccaggtcaataatagattcgaacaagaaaaaaggagtctccacgttcactctcatggtctagaaattctaacattaatcaaaagaaaataagagaaatagaaaaatcgaaagagattaggattaggtagaaacgaaaaaaagaaaaaaaaacatctcatgacacgggaaacggacacggtctttgaaataagggtgagctgggatacttctataaaccaaatgtaatcaattagtacttttcatgccaataaatatgtcggtgacatgggatcaggagtatcatgactagaggtttgaggcagacacaatcgcccacgtggcctggcaccatcgggggacgtcgggcccgagggtgatgtgttcgccctcctcttagtccccccgagggggtcgggccggacccgcctcggccccgagggccgaggcgccccgacccctcgtgggttntcgctccgcgtgtatggggtagggancncacnngggctcacctaaccacatttattgcgatttggctgagcgtgtcaagccgcatgtaacgcagtgtagtgcactcatttatccggtctgtgaccagtcacagaccggtcagatcgcgggttaggtggcgacaggcgatttgacgcacgcctcgccccatcctgtcaggacgagggcttctaggcgctcgtccccagctggagctagcgtgttacctcccagagatggcacgttagtcctggtcagatatatgccaggcttcatcctaaccattacaggcaagatgttgtgtgaagaagggcgaacatgtagattgctaagctgacacgtggtggacaagaatgaccgacgtgactggtctgactccggtcatgtcgtcagcagacagtcacgattccacgtcgcatctgctcccggcgaaagtggaggtagttgtgagccgtcccatcagaaggtgactcggacggcaactatacaaatctccgtccatttatgaaaaggtaggggaagtccccacaaaaaaggggaaaatggtgcatgtggtatccccttaagatataaaggaggaccttgcccacttagagaggggggactggacttttccagattaggaacccagaacaagggagaggctgactcatactttgtagcttcttcatacgcgaatccaccaaaaacacaggagtagggtattacgcttctcagcggcccgaacctgtatacatcgccggcgtctagtgtgcttccggtctggcgaatcttccacagattgggagcttagagtctcacccagggtccccggccgaaccggcaaaggggggccagcgcggtctcccggtgaggagccccacgctccgtcatctggcgcgccaggtagggggctctgcgagtgatcttctgagctctcgcactccttcgtgtgcgccaagcttttcctgttcagcccaatggccgagccagcaaaggcgcgcgacctctccccgagtatgagcggtgacgacggggagcaaaacccacgccaccgagctcgtactccaccgccccctccacgccaaagtcctaggcaggagaaggcgctcgagagggctgaaggatccgcgacttcgacatccacaggaggtggagaagggcggcgagatggggagcgtcacctccttgtctacggcgacggcagcacgccccagggcgcgctccaagctgcaggcgcgctcctacgtcacccgcccgtcgcccatgacccggagtctccagcccaacgttggctggacgatgtggccaaattggtcatgactgcacggcagcgcctagatgctggtgggcggtcctccgccaccaaggcctctggtgctgccaccaccggctccgcgtcgtcgagacggagggcgcggcgagcggcagccgctgttcgccattcggccgccactccttcgtcaacgcctccgacccgggatgatctgcgtggggaaccggatgcccgcgtcagtatcgagcgccggcgtaatggccgacgtgctccccacgcaacggagggcacctcctcgtccggagtgtcacctcaccacggacgcggggatcagccctccgtgcccccggttggtggtgtcggctgtagagcctttgtggcgagccttcggaatgtccgttggcccccaaggttccggcccaccatcgccgaaaaatatgacgggagcgtcaaccccgccgagtttctccaggtctacacgaccgggatcgaggccgccgggggtgacgacagggtcatggcgaatttctttcccatggccctgaaaggacaggtgcggggttggctaatgaacttgccacccgcatctgtccactcttgggaggatttgtgccaacagttcaccatgaactttcaaggcacatatccgcgcccaggtgaggaagcggacttgcacgcagtacagcgaagggatgatgagtcacttcgctcgtacattcagcggttctgtcaagtccgcaacaccataccatgcatccctgcacacgcggtgatctacgcgttcagggggggtgtgcggcacaaccgcatgctcgaaaagatcgcctccaaagagccccagactaccgcggagctttttcagctcgcggaccgagtggctcgtaaggaggaggcatggacctggaacccctccggttccggtgtggtagcttcgaccgcccccggatccgctgctcagacagggcggcgtgacaggaggaggaagaagaggtcagcccataccgacgacgagggtcatgtcctcgccgtcgaggccgctttgcgggccacccgaaaggggaggcctgcgggcgacaaaaagaaggaggccggcgctcccagcagggagcgcccaaccggcaagtggtgcaccgtccacaacacttcccttcacgacctcgcggactgccgcgcagtcaaaagtttggctgagcggacgaggaagtgggaggaggagaggaggcaggagcgccgagagggcaagtccccggcagttccttccggcaatcgacgaagtgaggctaagcagaaggcccccgccgaggacatcgatgacggcgatgatgacctaggtttccaagagcctggggccaccattgccactgtcgatgggggagcgtgtgctcacgtttctcgccggagcctcaaggccatgaagcgagagcttctggccgcggcccctactcatgaggcgacgcgccgggcgcggtggtcggaggttgccctcaccttcgaccagaccgaccacccaccgtgcgttgcccgtggaggacagatcgcaatggtggtttcccccactgtttgcaacgtgaagctggggcgtgtcctcattgatggaggagcagccctcaacatcctttcccccgcagcctttgatgccatcaaggccccggggatgatgctccgaccgtcccagccgatcatcggtgtgacgccggggcacacttggccgctaggtcatatcgacctcccggtcaccttcggtggacccgccaacttccgcacggagcgggtgaactttgatgtggcggacctcagtctgccctacaacgcggtcttggggaggcccgcgttggtaaaattcatggcggcggtccactacgcctacctccagatgaagatgccgggccccgatggccccatctctctccatggcgacctcaaagtcgcgctcgcttgtatggagcagcgtgcggactgcctcgccgtcgtaaccaagcccgagggtggcgatgagaggcttggcacatccgcccccgtcgccccgaggcagcggatagtcacgtgcgatgaggtcccggtcaaggaggttgccctaggcgacggcccgtccaagaccacacggatcggtggtcttctggatggcaaataggaagacgcgctcgtctctttcctgcgggcaaacgctgacgtcttcgcatggagaccggcggatatgcccggggtccccagggaggtgattgagcaccgtctcgccgtacggccgggcgcaaggccggtccggcagaaagtgcggcgccaggccccggaacgtcaagccttcatccgcgaggaggtggcgcgacttctggaggccggattcatccgcgaggtcatccatccggagtggctggcgaacccggtggtcgttcccaaggcgaacggcaagcttcggatgtgcatcgactacaacgaccttaacaaggcatgtcctaaggatccttaccccctgcctcgcatagatcagattgtcgactccacagcggggtgcgaccttttgtgttttctagatgcatactctggttaccatcagattcgcatggctaaggaggatgaggaaaaaactgcgttcattacccccataggaacttattgttatacaacaatgcccttcgggttaaaaaatgcaggtcctacttttcaacgtactactcgaatttctatgggtagccaaataggacgtaatgttgaggcttatgtcgatgacttggttgtaaagacgcgcaaccaagaaaccttactctcggatctagcggaaacttttgaaagtctccgctccgcccgcataaaactgaaccccgataagtgcgtgttcggtgtacctgcgggcaagcttctcgggtttttggtctctgcccgaggcatcgaagccaaccccgagaagatacgagctatagagcggatgcgcccccccagcaagcttaaggatgtgcaatgcgtcactggttgcatggccgccctaagtcggttcatatcgaggctgggagagaaggcgctacccttatttaagctcctcaaacgctccgggccgtttacttggacggaggaagctgagcgtgccctcactcagttgaaggcgtatctcagctctcccccggttctggtcgccccggagccaaatgaacccttactactctacttagcggcgaccccgcaagtggttagtgcggcgttggtcgtggagcgcgatgaggacaatcctcattccgcgcacccccaccctgtatagacttggcccgggagagagcagggaggagaggcccccgagccgaacggtggcccaaggcccccgacgaccggagttggccctctgcccgcttgtcagacggtgctaggagcccccgacccccaggaaggccctgaggccactgtgggaaggccgcacctatcgccctttgaccccgaggctaaccctgtgctgactcgacccgggaaagagcagggagaagaggcccccgagccgaacggaggtctaaggcccctgacgaccggagttggccctttgcccgcttgtccgacgatgccaggagcccccgacccccaggacggccccgaagccactgtgggaaggccgcccctgttatcctccgaccccgaagtcatcagcacagaagacaagtgcgccccgcgagactgcttggacgaagattgccccagggatgcggcccctagcgaagaggatcggcccaaccgaaaggtgcagcggcccgtctactttgttagtgaggccctccgggacgccaaaacccgataccctcaggcccagaagatgctttacgctattctgatggcctcgaggaaactgcgccattatttccaggcgcatcgggtcactgtggttacgtcttaccccctcggtcaaatcttgcataatcgagagggtacaggacgggtggtgaaatgggcaatcgaactttctgagttcgatttgcactttgaaccacgccacgctatcaagagccaggccctcgccgattttgtggcagagtggaccccggctcccgagcccgtctcgatccccgaggccagcacggacccctcgcagctgcctcacaccgcccactgggtaatgcagttcgacggctccctgtctcttcagggcgccggtgcgggggtcacgttgacctctccgagcggagacgtcctcagatacttggtccgcctcgactttcgagcgaccaataatatggcagagtacgagggactccttgccggactcagagtggcagctggactggggatccgccgcctcctggtgttaggcgactcccagctggtcgttaaccaagtctgtaaggagtaccggtgctctgacccgcagatggacacctacgtgcgccaagtacggcgtatggagcgccattttgacgggattgagcttcggcatgtgcccagacgggataacatgattgccgacgaactctcacggctcgcgtcctcgcgagcccagaccccaccgggcgcctttgaagaaaggcttgcccagccgtcggcgcgacccgaccccttaggggagacggatacgcctgaccggcccccaaggcctgtcggagtccaggcctcgggacccgaggggagtgctcccagttcccttagattgattgcttggatcgccgagatccaagcatacctcacagataagactctacccgaggaccgcgaagggagtgaacgcgtccatcacatctccaaacgatacgtgctggtagaagggaccctctatcggcgcgcggctaatggaatcctcctgaagtgcattcctcgggaacaaggcgttgtgcttcttgacgatatccatgaaggcgaatgcggagcccactccgcctcgcgcaccttggttggtaaagcttttcgccagggtttctattggccgacagctctcaatgatgcggtcgacctggtccggcgatgtagagcgtgtcaattccacgccaagcaaatccatcagccggcccaggccctgcagaccataccactttcgtggccatttgctgtctggggactcgatatcctgggaccgtttaggcgggccccgggcgggtttgagtatctgtatgtcgcgatcgacaagttcactaagtggcccgaggcttatccggtcgtcaagatcgataagcactccgcacttaaattcattaagggcatcacggcccggtttggagtgcctaaccgtattattacggataatggcacccaattcactagtgaactcttcggcgactacggcgaagacatgggcatcaagctctgcttcgcctcacctgcccaccccagaagcaatggccaagtggagcgcgccaatgcggaaatcctcaaaggccttaaaaccaagaccttcaacatactcaagaagcacggcgattcatggatcgaggagttgccagcggtgctctgggcaaaccgaactacaccaagccgagcaaccggggaaacgcctttcttcctcgtctacggcgcggaagcggttctcccatccgagctcaccctgaggtctcctcgggccaccatgtactgcgaggctgatcaagatcagcttcgcagagatgacctcgactacttggaagagcgaaggcggcgcgcggccctccgagccgcgcgctaccagcagagcctgcggcgctaccatcagcgtcacgtccgggcccgatcactctgcgtcgacgacctcgtcctacgccgcgtccaaacgcgtgctggattgagcaagctttcactaatgtgggagggtccgtatcgagtggtcggcgtcccccggccgggctccatacggctggccacgggcgacggcactgagctacctaacccgtggaacatcgaacaccttcgttgcttctacccctgaggggggggtcgggtgtcaggtttcgggctcgggccaaccccgcaccccctcgggcgtgcagggttggccgggggctgccacacatgcacattcttatttctttttttcagtatttcaataaaagcagtttcaatttcctaaaggctgtatctgtgctgttttttccttttgaagaatcttgacttgaaataggtcactcgcgctcaatcctgccctcgggggctcgggtcggctaaaatcgccaagcggggcccagaaccgagccgtgccccggggcgtggtgaactccgggggggaatcggcaaaaacccacaatcgggtcacccataaccctcggtcaccacgttcccggcctggccagtctcgacatgtggatctccccaggcactagccccgacccgcgccttttgaggactgggacctgggcacgaacccttaatcaagctaagacacaaaaggaccacggcacagatcatcctcatctcatacacacagcaagatgaaattgacacaaaaatttcctcatttttgattacagattaagttgatctatacaaaaaagaggcccgaaggccttagaagaaagaaaagaagaaaaaactgaagaatggcgggggtctgggggctcaatccgatgcgcccgggtcgccggcctcgtcgtcactgtcgtctgcaccaccggcattgccctcctcgtcggagttgggggcgaacgcgagccgaggggccgagccctcgaagctgtcgacgatatggttggcggcatcccagacctgcgcgcgcgcgcggtcctcggtcccaggagggaactcatccagcgccatccatggagaaaaattggggtccctggcctggtaactcgccaggacgagctccaccgccccttgggcgaggtccctcgaggatgacttaattgtcttctcgagctcctcggggagccgttggagagccccggccatcttcgagaggcgctgggcgagacctccctggttggcggcgtactttacggtccgccctctccagaggcccacttgccgaccggcgcaatctaggcgggagacggcgtcccaaagcatgccgggcccaacctcgcctgccaagcggagggcttcgacctccccggcggacgagtccagcgcgccctgcagatcggcgatggtgtgttcggcagctgcgaggcgggcggctaagtcgctttcgcccgcggccgccccgccgctgcgcgccctcgcgtccagctccttcgcccgcacctcgagctcagcggcccgttggttcagtgcggccctctcggcgcgggcaccttccaggttatggcgcgcctgctcctcctgcgctgcctcgcggaggacaggctgtccgccagctgttgcgccgcggcctcggccccctcgagagctcgctcccgctcggtgagcgcgtccttgcggaggcggagcgcgagctcttcttcggcgcaggcagcctcgtgcgccgccagcgttgcttcccggatggtgacggcggcctcgcggtccgccagatcgctctccacgacgcaggcgcgctcttccagcgccatggcgcgcgcctcaagggcctcttcgcgccgccgggacgtcgcttcggtctccgccgcccgctgttctcgggcagcggcagcgtcaagcaccccttgggcggcgtcgagcttcttccctagctccgcctcccagctcccgtattgaaggcggagggtgtcctgcgcctcgttcatcacggtggtggcaatgagggcagccccccgctcctcctccacttccttggcgatctccgccagcaccttcttacgggtttcaagctccgagacgtgccggcggtgagccttacggcccacctccaccatggcctccaccgagcatcgcccctcttcgacacgcgcccacgcggcgtcgagctccgcccgctctgcctgcagggcctccacctgggcacttaacccatccaacaccgtggtgtttgcggcggccaaggcctgcagaaggggctctgcgttcagtggggcgatagaaggcgtggggaagagccgccttggaaaggatgccatgcggctcgggccaccgatggaagtgccggactcggggatgttccccggacccgtttggccctgagcgtcgcccgagggagtgggcccaagcgacgtgcccgtagcctcgtcgccagctgccccgaaagttgtcgcttgagcgtcgcccgagggagtgggcccaagcgacgcgcccgcggcctcgtcgcgggctgcctcggaagtcgccatcgcctcgtcctggcgaaatccggctttctcccgagcggcttcctcggcctggcgggcccgggcggcctcctcccgagcggtttcctcggcctggcgagcccgggcggcctcctcagcttcccgtaggcgatccgcggcctctcgccggtcagattcccgcctccgggcctctgcggccgccggatcctcggcctcagactggccggatttggaatggcgggagggacgcgacgggatctcgctgaaacaaaagaaaagaccagaagacgaacaagatgggttagtgaaaactcatgttgagagaatgaatacagccacgatggatgagagacgaacctgcgagggggtcggttaaacgaccactttggaggggaaatgaggtttccccgagatggttctgtctcccccatcttgcggaaccgcttcttcttgcgctccccctcgggctgcggtgtcggcgcggcccctccgggcgcctgctgttagcacgcaccgccccgccctctcggggaggagatgggggaggtgttcctccctgcttcctcttcccccgggcgtcggcagggcggctgctccccgggcccctgtcgcgggacccagaagcacgaccccctcccggggtagattgttcccccctgcggctcccgcctgcgccgtcgtggccctttggagctcgctcctctgaggccccgaccgccatcataatggtcaggatggaggcgcggtctggatcgctgcagagggggaggattccttggggaatgaaggacacctccacggagttgagattcagcacccgttggaccaatatcttgaagtcctcaggagcccagtcccatctcactccctggtgggtcctcatgaagtcttcggacccggtgtactcccaagcgccccgagcgcgccgctggagcggcgcaatccgacgacggaggtagtcgccgtacaccatggcccctgtgagcccctgggatcgcaggcccgccagacggtcgaggatggcgtcatagccatccctcaaatctaccggcgcccgccagctggaggcctgcgccgggggctggctcggaagtcggtggcgcgcttcgtcggtgaggggggtgtagaaccagtcgctcttccagtcgtcccacttcttgcggagggcgcaggggatgtagcgattcagcaccggcccccgtggctggaagtagcagccaccaactaccgatggcggcgacaccgactgcacggtgaagaaccaccggaacagccgaagagatgggcgcaccccaatgaacatctcgcacagatgcgcgaagatggccaatgtcatcaccgcgttgggggtgaggtgcgccatctggagatcgtagaactctagaacatccatgaagaaagaagaaaatggtggaaccagccctgccattgcaaaggggagaaagaagacggaccgccccgggtagtctggcgccgggcgtccctcgcccagcgtgactatctcccggccggtggcagattccggcatgaagcggcgcggcagcccagcctgcctctcgctcacgatgcaggaaggcggcagcacgctaccatcgagcagagcggagcctcgtgccatggcgccggaggaagagaagattaagagcgagcgcgtgtggcgaaggtagggcacaggaaagaaggagttagggcgcaagcggcgaagacaaggggaataatggcgaaaggaaggaaacagatcccttcctcagtgcctttatactcttgccaacgctgtgcccggctcctcgcttctcgcgcccactatttcgccccctcgtttctcgcgcccacgcttccactaatcctattcgcccgcttgcggcgcatgaggtggatatgcggttgtggcagtcgagatagatcatatcgtgcgcgcggtaattacgctcgccgaccgaagcgacgttaccatatctccagacgaaacgaatcgccatgtccagattcgtatgctactcgagtaatgtggcagtcttgaagagaccgctcattattgacagccgagttaccactgccgatgtgcgtgatttgtgaccgttgggtttctgcccaattgtggagaccggtcccacctgtcaccaggccttaggagtggcgtcacgcccgaccgcttcccttaaagagggcgatcgccctggcataacgccgggggctactgtcggtgacatgggatcaggagtatcatgactagaggtttgaggcagacacaatcgcccacgtggcctggcaccatcgggggatgtcgggcccgagggtgatgtgttcgccctcctcttagtccccccgagggggtcggg

SEQ ID NO: 9079 - DNA, 8993 bp, Oryza sativa
taaccaatgccttaatttggtactgcaagttctacattgggataacaaattagagatcgacgaaaagcggaatatcctttttatttgcgccctgacggatatctttcagtttgtaaccaccggatgacgcacggacggctcggatcatcccgaaaagatcaaccgcggcgcgagcacgagaccaccgtgggccccatggcccaccgacttacacaatctctcccactgccatgcgggcccacacccgcaacagtccagtccagagagccccgaactcctccaaacccgggggggccacaccctgccacgtgtcacccgccgcgcctccctctcatcctctctctcctcgtccagtgcttctccttctcctcctcgcaaccgaacgcctagaagcgcgcgtccaccaagccacggactcctctaattctctctcttgctttctctctcctcgcttcccgggtttgatacgtggtacgtgacgctttgcccttttcctctctctctctctctctctcttgatcagtttgatttgatcggttccgccattagcaaacctcgccgattctctctctcgatcgaacaggggtagggaagcgattaaccggcgatcgatcgatcgatgcaagtgatcgcgctcggttgatccaggaattggagagcatcggctgatcgagagatggcggggaacgagtggatcaatggctacctggaggcgatactggacagcggcggcgcggcggggggaggtggaggcggcggaggaggtggtggtggaggtggaggtgccggtgaaggtggaggggtagggggagtcgaccctaggtcgccgccgacggggacgccgagcccgcgtggcccgcacatgaacttcaatccgacgcactacttcgtggaggaggtggtgaagggcgtcgacgagagcgacctccaccggacgtggatcaaggtcgtcgccacccgcaacgcccgcgagcggagcacccgcctcgagaacatgtgctggcgcatctggcacctcgcgagaaagaagaagcaggcatgcatcgatctctccctgtctttttctttctttctcgtgttcatggttgatttaatttagtttctcgtgctctctgcatgactgaattaattatctccgagatacttctgaactttctattcgacagaaaattcagattttgattttaaaagaaaatcttgtcggaactatgttatacggagtgctttaactattcatcaacacgataccatataatatcctttacaaggattcagataatttttagtggtaacgatagatcggctaaattgtcgtgtagggctagatcaggccgttggcatgattcttttctgctttcaagaaaagatcagagtgttcaattaatttcagatatgattatagtcccttgtagatcatgtagtttgtattatgcaccacacacgtttgtggaaagaagaaagtatggcaacccaacggtgtcagtaatggacgatgagtgtgctatcttttttccttttccaagagtaggaaacaggatctttttaaaaccactcaattggccatgccaaaagtgagtttattgtgttcttttcgatgagaaaaaaaattatgactgttcatgatgctcctaaaaggtatttgtttctgagattgcctaaatttttatgtgagcagctggagcttgagggaatcctgaggatttctgcacggaggaaggagcaggagcaggtgcgccgcgagacttcggaggaccttgcagaggatctgtttgaaggcgagaaggcggacaccgtcggtgaattggcacagcaagacactcccatgaagaagaagttccagaggaacttctcagagctcaccgtcagctggtccgacgagaacaaggagaaaaagctgtacattgtgctcatcaggtcttataccgcttactttactcattggtgccattctgtatatgccactaaattgcaaaattttactgagttcctttattctttgttctactttagtcttcatggtctagttcgtggcgataacatggaacttggtcgggattcagatactggaggacaggtaaaacatgattgatcttttcttttcttttgagcagatatttcttatcatctccagccctagttcaaaaaaaaaaaattcttatcacccagccctgcatggttgcgtattactgtttttcatgtcttgcaggtgaaatatgttgttgaactcgcaagagcacttgcaatgatgcctggcgtgtacagagtggatctgtttactcgtcaagtgtcatctcctgaagtggactggagctatggggagcctactgaaatgttaacctccggttccactgacggagagggaagcggtgagagtgctggtgcgtacattgtgcgcattccgtgcggtccaagggacaagtacctccgtaaagaggccctgtggccttacctccaagagtttgtcgacggagctctcgcgcatatcctgaacatgtccaaggctctgggggaacaggttagcaatgggaagctggtcttgccatatgtaatccatggccactatgccgatgctggagatgtcgctgctcttctttctggtgcgctgaatgtgccgatggttctcaccggtcattcacttgggaggaacaagctggagcagatcatgaagcaagggcgcatgtcgaaggaggagattgactcaacttacaagatcatgaggcgcattgagggtgaggagctggccttggatgcagcggagcttgtcataacgagtacaaggcaggagattgatgagcaatggggactgtatgatggctttgatgtcaagctagagaaagttttgagggctcgtgcgaggcgcggagttagctgccacggccgttttatgcctagaatggtggtaagtgttcaataataagcgtaatagtactgtatcatatctgacaaatttccacagatcttgtgtttgacttgaaacttgtggtaatcaattttgttttgtatgtgtgatttatgtttttggtaattattatgcacactcctccacaggtaattcctcctgggatggatttcagcagtgttgtggttcctgaagataccagcgatggagatgatggcaaagactttgagattgcctcgccgaggtcactgcccccaatctgggctgaggttggtttctggatttcctcttcaaatgtataattgttcccttcaaatggatttcaaatgctgatgaaattgtttattataggtgatgcggtttttgaccaatccccacaagccaatgattctggctctgtcaagacctgatccaaagaagaacatcaccacccttgtcaaagcatttggagaatgtcgcccactgagggaacttgcaaacctagtaagcaacagttacttgaataactacatttccttttttttattcgcaaggaagaataactgcattttcagcactttaccagtacaatactagtaaatagtaatattagattatagttgcaccccaaaagctaatccatctgtcatgaacacaaagtacaaaaaatatttcaagtagtatgtacaattgcatactacttgcaaatatttcaagtcacaaaagtagtatatacaatgcttctgaacattcttgtacaattgcataattcatgtattactagtacctagcaataaaatttgccttttgttgcagattctgatcatggggaacagggatgacatcgatgagatgtccgctggcaatgcaagcgtcctcaccactgtcctgaagctgatcgacaagtatgatctgtacggaagtgttgcattccccaagcatcacaagcagtcagacgtaccggagatttatcgcctcacagggaagatgaaggtctgtcaccagtcatgtcctcactctgtttcagcttagccatgtccccactctgtttcatcttctgtaacttgtaactaaccaaaaacatccgctctccttttgcagggcgtcttcatcaatcctgctcttgttgagcctttcggtctcaccctgatcgaggtcttctcatagttcaattctctgacaaccacctgattattattctttcatgtacagcttaactgacaaactcatggcatttatttaggctgcggctcacggtctcccgatcgtcgccaccaagaacggcggtccggttgacattaaaaatgtaagcatccatcctcgccaaatcttgtgtacaaccgcaatatttgtgcaaagaattcatatccgtgtgcgtattcatggtgtttgcaggctctgaacaatggactgctggtagacccgcatgaccagcacgccattgccgacgcgctgctgaagctggtggcggacaaaaacctgtggcaggagtgccggaagaacggcctgcgcaacatccagctctactcgtggccggagcattgccggacatacctcaccaggatagccggatgccggatcaggaacccgcgctggctgatggacacgccggcggacgcggccgccgaggaggaggaagccctggaggactcgctcatggacgtccaggacctctcgctgcgcctgtccatcgacggcgagcgggggtcatccatgaacgacgcgccatcgtcggacccgcaggactcggtgcagaggatcatgaacaagatcaagcggtcgtctcccgcggacacggacggcgccaagattccggccgaagcggccgccaccgccacctccggtgccatgaacaagtacccgctcctccgccgacgccgcaggctgttcgtcatagccgtggactgctacggcgacgatggcagcgccagcaagaggatgctgcaggtgatccaggaggtgttcagggctgtccggtcggactcccagatgtccaggatctccgggttcgcgctgtcgacggcgatgccgctgccggagacgctcaagcttctgcagctgggcaagatcccaccgaccgacttcgacgcgctcatctgcggcagcggcagcgaggtgtactaccccagcacggcgcagtgtgtggacgccggggggaggctgcgccccgaccaggactacctgctgcacatcaaccaccggtggtctcacgacggcgccaagcagaccattgccaagctcgcgcacgacggatccggcaccaatgtcgaaccggacgtggagtcctgcaacccccactgtgtctccttcttcatcaaagaccccaataaggtccgtacagcgccctgcattctacttaatcacaatctcctgacacattgaaaaatgttctaatttgttggtatctgaaattctgaatctgaattctgcttcattttttaggtgaggacgatcgatgagatgcgggagagggtgaggatgcgtggcctccgatgccatctcatgtactgcaggaatgcaacaaggcttcaagttgttcctcttttagcatcgaggtcacaagcactcaggtgaagtctacatacaagttttacacactgtagtgtgattactgtagcatttacggcaacagatggtcttattggcaatttctcgtaaattcaggtatcttttcgtacgctggggcctgtctgtgggaaacatgtatctgatcgtcggggagcacggcgacaccgatcacgaggagatgctgtcagggttacacaagacggtgatcatccgcggcgtcaccgagaagggctcggagcagctggtgaggagctcagggagttaccagagggaagatgttgtcccatccgagagccccttgattgctttcacaaagggtgatctgaaggccgatgagatcatgcgtgctctcaaggaggtcaccaaggctgccagtggcatgtaaattggttgcctgctgggaagcctaatattactctgaagcctggaagaatcaggagtgccagcttgatgaagtctcctggctctttaactgaaagacaagactctttttctctccttaatttacagcataatcttatggaccactaccacgaacttaccttgcagtgagaaataattatgacactgctgatgctactgttggctcaaatgtttatgagctgattcagttatatgtattttttcttttaatcctgcacttggttcaagtacgcatatcatggcaattcttttaataatttcggtccttgttcaggattggattacttggcacgttctctccgtggtttgtgaaaataacctaggacataaatgttttgtaacttaagtttcagtaaacccagtcaaaaggaaacatacaattcaaacaagctgactgataattaacactgtatttctgacactaggttcattttctgagactgtcctatcgctgaaaccttttttttattttttgaaagaactgaaactttaccaagctaactaatactctctccgtccctaaatatttgacgccgttgactttttagcacatgtttgaccgtttgtcttattcaaaaacttttgtgaaatatataaaactatatgtatacataaaaatatatttaagaatgaatcaaatgataggaaaagaattaataattacttaaatttttttgaataagacgaacggtcaaacatatttaaaaaagtcaacggcgtcgaatatttagggagcataaatgaaggttaagttatatttctttaataataacttacaggccacgtggcacactccaattggtcgacaaacaaacgcaaaactggaatgataagggaaaaataatctgctactagtatttatcttgcctacacaacttccagcatgatgctttctgaaacgtccctgaagcatttacataggcaattgattggttcaatatctgcttccctctgcgagacatgtctcttccctaatcaatatcagaacgaaactgccacaattttacaatatatacagggattggcagaggccattgtgcaagactgcttattggttccaatcaagagtgtatactaacatggaagaaaaggaggaaatgaccatgctttcccttggagttggagctgctagcaagcactcaatatccaacagaaaattcagactgaaagaagtgacagatcacaaattcaaccttggagatcaagatcataacagtggccatgtgaggaagaagctaaggcttagcgaagaacaattgactgtgctggaaaatatgtatgaagctggcagcaatctcgaccaagtaagttcaaatttgtgatctctgaacattgatgcatgacaaaaatcccatgtttcctgctatttaatgactgaaattaggcactaaaacaagggcttgcggagaagctgaacataaaaccacgccaagttgaagtctggtttcagaacagaagagcccggtacttgcatttcattcacatgcatggattctaacttctaagacctctgaaaactgaattcatcaagatttatgaactgcagtttttctgatgattgcttttgtcgaaaattttaggaccaaacataagcagatcgaagaagaatgcaagaaccgaggtggttggagggcctaaacaaggagaaccgaaggctgaagatggaactgatgagggtttctcggcctgttttgactcctcacggcagcacccataatgtgtcagaggttactgttacttgtttatcttgcaacaaatcttcctacgagactttcacagtgtgaagaacctggcggtaaaatacatgagggtcaattcagtgatctgaatatagtttctgatcaatggagaattctcaaaggcctacaagattttctctttctttttcctttttacagaatgcgcaaaaagactgtattaagaaagggatacaacaatggtaacaagattattatttttttttttgaggaaaccatggtaacaagaaaatgcttccaaagtgacatagtctcccatgttaaataataaatatgcatttatttttttaaaaaaagtggatgtttcacttattcagatttatatgtcaagggggaacaacagtaacaaccaaggaggaacttttttttttttgagaggaaaccaaggaggaacttgatggaataatttaaaagaaagtgtcagcattttaagaattgcactccaggaccatggggttgaaatttagtacctccggtaatagaaggtacggaaatttagtgcaaattttagtacatctcaacgacggtaaaatttctctttctcttatgccattgatcattgtaaaatggaaagctactaaaacaatatacagcaatatcccccgttataacttcagggaataatgtcttggcaccttcctgacagtacagatgcagagctgctccctataaagttcagaaaataccaataagattgctctatctgcagaaagaatatgaactgaaaaaaagggcagtaactcagtccattgcatgcatgcatatgcgagaattccgaacttgaccttccaaaattgacaatgtctcaccattcgcctactcttaagcaccaccaccacaaaacaaagcgcctccccttaatcctctcctatccactcctctcaagctataaaaggagctcccaagaacacgaagcatccatcgatctccaagtctccacccatcaagattgcagtaataatccaagctcaataaacgagccaatccgtcgaagaaggaagcagcggcgatggcggcgaggtccggcgaggtgcgggcgacggtgctgggcatggcggtgctggcgctgcttctgctgctcggccaccacgcggcggccatcgaggccaacgtcggcgtcacccgccaggccagcttcagcctgaacggcggcgccggcgccggcgccggtgctcgcgctggcgctggtgctggcgctggcgctggcgtcggcgctggcatcggagctaacgtcggcgttggcgctcgcgccggcgtcggtgctggcgtcggcgctggcgtaggtgcgaaggtcggtgctggcgtcggtgcgaaggtcggtgctggcgccggcgttggagcacgcgctggcgttggtgcgaacgtcg

SEQ ID NO: 9080 - DNA, 4748 bp, Oryza sativa
gcatggcgtcgatcttgtccccgtcttccatctcgagctgaacaagtttgcaatggtcatcagtaatggattggtgatgatttgctaggctccgcaaatactgaattgagtatgaagagaagataagctacgcacctcgtcaggggtctgctcgccacggagcctacgaccatcaaataggaatgcaatagcattcatatccacagactgacggtcacaataggcgttcatcagcttcttcagctgcgtagatctcttgatgcggaagaatacctcgttcccatcctacagaacaaaggaaattgttaacgaatcgagcacaaaaaaacacaactattgtcaaataatttctcattcgagagtgctgcataaccaaaatatcatgtacagaggaaattctgatgctcaaggggaaaaaaacaaaggcatctgaagttatggtctctagacttgactgtaacttgtaagatacgtatttctactgtaaactgatatatttaacaaagtacgctctcgattgtgccacacttttcaggaagcaaaagattagcccattactgaaaaatgcagtacgacaacgttcagaacaatagttgcatgcaacaaaaacatacaatctgttgaaatgaatgagcgagtgattcttccaactattgctacaaattcaatagaccagcatacacattagcatgaacaacagaagagttagtgaaggtagtattaaccatacaatccccacagttcataaaacccacagtaagtttttacaaggaatactgaccacatttttacaagatatcatacaagttaaagaatggaagatggatactaatttgcaaactctagcagattaaacgagcaatactgaccatatttttcatcttgtttgctgaaaagttagcatttttatggcaaaaatcaaaaatcaaaatttcagtgtcctcagattgctggcatcaaacctgagtttatgtaccctacactagcagtgttactgagttaacattattgtcaaatcatctaaaagatgttgctgcaaacttaggatgaaagtaatccaagctcaaatccttccataaataaaacccttatccataaactccgtgagactaccaagcgctgatgatgctcattcaactaaatacgaattcccattataaatccacaggaaactcatcactcaacaacctaacaaaagatcgattcatgcataaattgaacttcacactagcatcagcacaacataaaacaaaacgttccctatctggacgaatcaagcaaagtcaaaccatcgaaccaagtgcttggtcgcagccacgctaatagctccgcaaagcaatccgaatccatcgccgaacataacaaccgccactatatcgcttgcgggcttaccaatcgaacctaaccctcaaatctcaattctacaatccatacatccactatggaacaaacttactcctatgtactactggataataaggctacgagtttgagagcaagaagagaggcagacctgtcccttgaccttgaggttgatgtgggcgccgccgccctctccccccgccggcttcttgtcctcctccccggcggccgacatctcgcacgctcgctcgctcgcacgcgcggcccgacgctggatcacgcttgagctgtggtggcactggcgagaggaaggagacgacgacgaccctgtgctggtgctggtgcacgggcggacgcgatggctcatatagcgcggcgtctcagaagcgcatttaataagtcggcgtcacgtccggatctatcctgcgggggggaaccctgtgggccgcgccggattggccggcggtgtccggggcgccggatcgcgtgtggcccgcgggcctcgggtgtgggccccgcgtaacccccgccgcgtactttgcacgcggaccgggtcaagccaagcaccccgcccgtttctcccttttttaatggaaaaaaagttgtggtgttttttttttgctgcacagaaataatttggactttttggtttcatcttatccagctcgtgtgaacacgtgtggcttttcctcctcctcgcacgaacgggcggtggatttgccgcgaatatctcggccactttttacgaaatttcggttcgaatttaatattcgcgagcgaagcgggaaacaaaatgcaacacgaaaggaatttttatctttttttttctccggtgagaataaacggaccgagctcttcgtgaagtggccagcttgtatatatggccgttctttttgctcgcaagatgaacaatggcatatcgcccgactcgtcgtcgtcacggtgacgccaggatggccgtacgtcatattggtgttgctggccgcatctccaccgttgatttggtcattagaagtcgtgcatttgttttaccgttgcagataagggcggttttggtgcaggtgcagctcatgcggacggaaattttggtgttaaggttaacttgtagggaagcgtgttgtttttggttaagctgaaaaatgtagcatcatgtttttagcaaatcagtttttattttagatagtggatggtggttatgctgtttctggtaggcgttaattttgtttgttatgataagtactcccttcgtttcgaaatcttattcaaaaacttttgtaaaatatgtaaaattatatgcctatataaaaatatatttaacaatgaaccaaatgatagaaaaataattaataattacttaaattttttgaataaaacgaacggtcaaacatatgctaaaaagtcaacggtgtcaaacatttcgaaacaaagggagtatgaaatgtctatatatgcaataatctcaaactcacgcgagatcaatcactctgcatgggcccagtcaggagtggctttcgttagactgccggtactgatcatgggcttatggaccaaggcctagtatgcagtttaatctggcccatcttgcagttggacttatggcccaaggcctcgatgtacagtttaatcggaccaggtatggcctacctggcagtgaccgtgtccgacaccgacctcgcggcgacgcttctagaaaaaaaaaaaaaccctctcgaaaccacaagacaccaccagagagagttcgccgcgcttccgcgcgcctttcgatcgagagcagcagcagcgatgccgtcgccgcgccgggccgtgaatctccggtggtcttcgttggagacggaggtggaggcggcgatcgcggtggagggcgggtgcggggtgaacctcgcgatggtcggccgggcgctggggctggacccggccaccgtccgcctcaacggctacttcgtcaaccgcgggcgcggccacgtctcctccgccgtcacgtggcgcgcgctcctcgacttcttcgccgcgcgcgggctgcccacgggcgacgcccccgccgcgcctgtagcagtccaaaacaagccaaggcctcctcctcctcctcccccggtgtcaggtatgcgcgcgcgcttctccacgaaccgttggttttcgaatttcgattcatgccactactactgttacgagatagagagaacgatttggctggaggtttgtgagcttgctggttttgtggcatcgattcatgtgtttgcatagatgaaagttgtattgtaaagtgcaggagtcaagtggggtgcctgataattttgggtaaatttttttaggaattctggtactctggtctctggagcatgcatattgtagaatgcagatagaagttgacacactgtcacacttcattctggaatttggagtgccaatagcttatttctgattctcatttttgtagtcttatgaagagtatgaacaataggactgtaatctattttcaactctctttttctatagtgaattgcaggaactgcctgcctgtcccctcgaaaaaaattgggctacttggtttttttaggctgatttatatatcaccaaataatattgaggtatgaaaggctggtgctgatatggttgagccgttgagtactagacagaagaaaaagcagagttcacagtatttcctcactttctgttgaagtttgctgtattgcagagttaagtatgctaggcttgaacaaatttgagtcaacttgataaagactacaatgtaaaatttatatggcattttcccagtgcttcagtttcctgaaaacaagtcaagtttcaattccttattcattttttttcttagcacaagaatattcagtgatatcttatccacttaattctagaagaatgcctttgcattgtattgaagttcatttcaaaaaatagagtctaaccctgcaaaatatgcttctcttcagattgtacaatcaatgtttgcccaaagcggaaatttgggttggtttcagattgtacaaccgagatctgtccaaagcgaaaatttgggttggtttcagattttacaaccgaggtctgcccaaagcgaaaattcgggttggcttcagattgtacaacagaggtctgcccaaagagaaaatttgggttggtttcagattgtacaaccgaggtctgcccaaagcgaaaatttgggttgtatgctggaaaaagtcttaagaagagcaagaattccgaagatggagttctgtctagaactggggctgatatacttagcgatgaaatcacccttggtttgaagagaagactaaaattggatgacgccaatccagctaagaagatgaagcaaatagaatgcaacacacgttagtgacaaagctttctactattagataagaacattttct

SEQ ID NO: 9081 - DNA, 15782 bp, Oryza sativa
ccgactagagggggggtgaataggcggttttaaaacttaatggcacttaaacaaaactaacctaagttgctaggcaaggtgaggtgcaaggttagctaagcaactaagttaagttttgcaaacctaagtgatatgggctcaaatatgtctctatgaatgtaaatagcacaaatgtaaatgcaacaaataaatgagacaagagataaggaatttttcaccgaggttcggaaactcgccggtttcctaatccccgttgaggcgagcccaactccaccgctcaaccacgaagccaccgcacggccccttcgtcaaggggtgggcaaggcgggagccggcccacggagaggactacccaagcctcgatcactcggggtagttcttccttcactccgaaggtggtgaactccaaaccactcacaaacggtgccgggcctcctccacaatctcctcggagaggtcaccgggcaacacctccacaagccgtctaggaggcggcaacctccaagagtaacaagtctaggatgcttgccgagtatgatcaagtgccacactagctataacaatgaagcaacgcacttggattggcttaactcactctctaacacctcactagataaactaagtgcacaagggtgtgagagctcttgcaagggttcaagataatgcaatggagtgccaaaaccttacccttgctgctggggagtgggtatatatacccccaaccaccaaaactagccgttggagtcgaaatacccaactctgtgctccgccggtcagaccgccatagagtggccggtcagaccggactactatgtaacggctagaaaactagccgttacagggcaatcattgagcccactcaacctggccggtctgaccgcagtgtagtggccggtcagaccgtccacggctcggtctgaccggttgcggctctgtatcgccaccaaaaaccagaccagtgcaacagaccagtggggccggtcagaccggccttaccacgccggtcagaccggctaacagacccggtcagaccggcctaaggcccacggtcagatcacaggtcacttttcagctcaaccgaccgttagtaaaacggcgatatctcttgactcgggtctcggaatttggcgttcttggactctatggaaagcttattcaaagggccatccaacccatgaaaaatccatccaagaaacacaacttaagtcaaggataaaaggctcacactccaaaggatatccaccggacatacccacaagatgtcactcactcctattggacatgcccacttctctcttggtttaggacttgagaaaactcatcacacttggttagacaagcccacaaaatgcacctacatgcatatgaactaatatggcacaagatcatccacaagctcgcttcatagacccctcttgatagtacgacgtctatctagcaaatccggtctacaccaaacaccaagaccgggaaaagactaagaaaacattcttagctacattatacctttgccttgctccatccatcttggggtcaagcttgagccgagatcaacacttgtgaccatccggttgaaccatgtttatgctgaggtcttgtccatcctttgtcaagactttattctcatcacaagcttgacttcattcttgccaacatgacgatgtccttggcttggtgaccactaacccatggtgtcattcattagcctcatcgtagtgggacctattccttttcacacctcaaaggagaacattagtctcaacaaatcggttgtcatccttcacttgatgatcaaacggttgcatataaaatatatggatatgtttgttgagtattcattaacatcacaagtgtcatatactcgtatgcaagctcaagtgcaaagatccgatataaataataggtgaacaacatggatctagaacatgcacaataaatgtataggatttgctccccctaaatatatgcatacaaataaatatacaagagatgcaagtgtatgcataattagagaatgaccaatgggggtttatcctatacatatagagaaggcatatgtagtattgatgtagaccaacataaaacatataccttcatgatctccatgttctcaatgtaaatgagactaaataagataacattcgagtaaacattagtctcacacttatatatcaataacatggaaatcatatatatgaacctatcaaaaagtaggagataagaagtggtacatatcgttttatctccatgcatttcatccttgtcatgattaaggtccatcacaaaagaatgcatgtcttccacatctcattatcgggaaataacctagtagacaacttatgcaaaagagaggttaatcccataaatatcggtttatcatttatcaccaaagtaacaattacacaaattgtttaatccaagatctttcaatcttttctttctttggtgatggataataacccgatataaacaatatagagagatgagatgaaaaatgatttcaaatcaagatagaaatcttataataaacaaaatatagaataagctccccctcaagatgtgcatacatatggatatgaaggaacgcatatgcacataatcaataaagatcaaataggaagctcacactatattttggatccacaagagagaccaagttagaatatgtgaagtttaatacatacctctcatcatttttacttccatatccaaatgagactagtcaaagaaaggctcataaaaacgttagtctcatataattagatttgtcattaatcaccgaatccaaattaaggcacttgaacttacaccctccaaaaccttcgacggagttaaattgctctggttttaatagttgtggtcagtagttaaggaacttaaactagactattcccctaagaaatcgtcaggcccatacaacgaacagcccagcgacagaagaaagcgacaacttttaattggcctataactcctttcctcccttctcttctgacctagtcgtcgacccccgcgtcccccttcctctgctgggttcgcccgcacgcccgcccgcaccgccgcacgccgccggtcgcccctcctccccgccgacgctgagcaccgccggtccccgtcccgctaggcagcggcgccgccgtcctccgaccgagcccctcgccggtgagcacccgcgcgcagaccctctttaccattcctctacacccacgcgctttctccttgacttaaccttagctttcccttgtaaataaatccgggagattttctcccccttgtcttaaccctagtgctaatggatgtttgggggggttcagatgaaacccccatgcgtgacgttggatccgccgctgcgtaggaacatgtaggtaggggagttgctatgtgtgtggtctagggtatgagccgaataaaccagcggaaatggataatcggcttgttaggtccgccccctttgcataagaattttgtaggtaggaggtgctatgtatgtgggtctaggatatgagccgagtaaagctgcggaaacgattaatcggataattaggttgggaaatttcatagtttgcgatatcactttaggatacgccacagcgcctgttttctaaatgttgaaatgctacctattagtttatgatagctctatgcaagatattttccatcttcaagtagagggattttgatgttctcatgcaataaaatggcaaaacgcgatccaaaaagtatcttgatattgaagcaaaacatcaagaaggccagcttacagtgggttctaacaaacctcaatgcgcgctaataaaccctagacaaacctctacccgtgcgccttccaagatcatgaacaaaacaggtctcctgcggggatcaagtgatgcaaccaggaactaaccaccctggactcgcccccttcaccaaactgtagagtggtagaggcggcagcaatcttcaacttatagcagatggaactggcgaactgccatagtgccatctatctttgtactggggagacatgcttgatgacagccatgcaaaaacgaataaaacaaaccctaggctacaatagttgcagtatatatgacgcaagccctagcgtcttcagcaagaaaaacaaactgcgaatcgtaacataaacgtgtaggacctcctaataaatccattctggttttatgtggtactcacttttgtacagcggctctagtaaaccaactcgagttagttcatgtaccaaggacatgcactctatttaggaaataaatagataaaaggaaacgacaaaagctaaccaattggataactactagacacaactcttgtgccttcctatcttgcgcacgcagagataggatctattttgttcgattctgctcccagctcacaaagatatctactgcatgatcacctttgtgtcaatgcgtgctacagctcctttattgcgcatcaaaatagtgtggtctgtatactcagcccttggattgtcaggcacatttagctcaattcaccaaaataggaagaattccaacttgattaaatatgaaggtttcacatcaagtttctggtatgctagttcgattatctacgccttgcgcgttggacagaccacttggaccttagtgatgaggatgacttagtatcttggcctcttgggacctaggtgaatggaaggttggtgatgctgcctttcgccagtggcaaaatgtgtacaccaaacttgccatttgttcaaaagagaaaaatggaagtggaaaatattttgcaaagatgcccaaagtggcataccccagggctttgatgacaaaacactagacagtggcattttaacaattagaatggaaacgatgggttgatggcatatcctagaccgagaggctagaataccaaagtgggtggtggaaaatcatgaagtttccctattaggttgggtttttggattttgaagtgataggtgggtgtagactgagagcagggcataatccctagctcatacttttaaaagagtaaaggcgtattcaatcctaatagttggaattgtggtttttttatgttgaggtttgaaacttgcaggttcctgctcctattgctcaagccattaggttgcatcgaaacagtatgagctctcatgattttgcaagaagggttccgaagaggcggcggactaacaagttgctttcgcaacttcttccggacctgaactcactcccagctgaaggagctgatgatgggggatcaccttccagtagtgtgctcgtctcacacgcccagacttctgctgtagctgtggctggaacctcgcagtatttggtgccagcagttgttgcggggccgcacattggaatgagtagttgtcccattatcgtggatgatatcaatgatgatgttgtgatttattctgcaagctcgttccctcaagtatgatccttgtgcttggttcttatttctgcatgcacacatatttgttttcttgctcttttattttattatatgattgttcaagttcagtatgaaagaatcattgttgcgctgttgcttcctttatttttcaggtgaggcagcaggctccaaggacagaacctgttgtgaccatagaagatgattctgaaactacccctggacaagcaggtaccccagcacgtccttttccccgtccatattgttggcatttgaacggaactagttattcataccttttgttttctatagtgatcagtttctctcaaataacattatttatctggcatcagattagtgtgaattgttatgctagttacattgtgtgtatccaacataggatagcaattcgtacccattccacattccctagcaggaaattcctcttttagggtatggagatatgggatttgttgcctcccaacattatgctatctgggaatagtctacccctgttgggtgagtcgtggtggtgggaacgtccccatattccatatccctgatccccacttgccccccattaaactcagcgtggtagcccatgtaattgtacaagcatctaaggtatgagagattttacatctatggttagtgcgtcttccacttgttggtttctgagcatcaagaattataacagttacatgaataactgttgaggctgttgccaacttaggtgcccatttgttatgagcccctgcaagaatggaaactagccaactatacacaatattcttgtacagctccgcactcctatcagaaccaaagttttatacacgcgctatttggttgtaagataaacagattcaggctgctgcttgatattgcccattgactataggatataaataatgtgtaggaactcacaccaccgcttgagattgccttgtgtggtagtggggagaagagtgccacaaacacaaagtagtctttctgacttcagaaagttcagttttcttacaactgctatctgtagatgtcactgggttgggtcattagacatagcaagttaccatgtaggattcattagcagaaaaatcagcactaaggatcatttattttattctaatgcttcctagcctttggcaaagtgtgacttgccacctcccccaccccccaaaaaaaagtgccataagagggctaaagctaagcctaagtatgaagctctggcacatggaccatagtggaaaaaaccggaccggtgagtgacccggaggacctctcggttcaccggtccaacggtctgaccagggaaccgctggttgaaccgcggttcaataacttatgtaagcaatgtgtattttctttatcacacaagtgaaagaacggtgggatggctagagccaagcgctctaacctagtagaccctaacctagtagaccaaggttcgagtcctcgcgcctgcaagtatttctctgatttttgtaaaaaacaaccgcgtgggctaggactgggccttactggagcccatgtatatctcctttaccggtccgaccaaggcggtttaatgcccggtttattcaaaacccggccggttcagccggttcaatccgggttggatgcatgtccagtctttcagctggaccgaactgtggagacttctggttccggttttttcaggttgaaccgccggcccggtccggttttttccactatgacatggaccataggaattgaaaaaacgaggttctgtgtaagtcaaggttgtgagaagtaaccgaacacctgtcaaaatgtgtaggatagttcaagttaggtgttgcaaagatgttttaggtctctttgagacatgtactcttttagtatgccatattgccatggcttataaactacaagctggatatgataaatgctattcaatctcacagtatctgccaattctcctcaaaataaaccataggcactaattctcgcagcttttcttctttaaagtttcccgcatgtgtttagaccacattttccatttattaatgtggtgtgtgttgctttgttccaggggatgcagttgatgagcatgtggatatactactatctctgactctgggcaggtatcctaggcatggtcatcagagatcctccaacatcagcaccagccctgtgatacatataattgacacacctagcaatgtactcaaacttgaatttcttcaatacacctatcaggtctgtgatgttcagttaaataatgcagcgtttggtggtaatgcaggcactccctgaacccgagaaggccgttccgaaggaaccaactttcaattgccctgtctgcatgaacgagctggtcgaaccgtcatcgaccatctgcggtcacattttttgcaagcagtgtatcaaggcctcaatccaggctcagaagaagtgccctacctgccggaggaagctgaccatgaacaacttccaccgcgtgtatctcccttctgcggagtaagccggtttccaccattctggaaatcagcgtccctcctcccaccctgactctcgccacattggcgttctgatgattgtatctgaaaatgtttgacaggcttgctagcataccgttttgctggagcagttttaacaggtgttgtactgttgttggatccgttaaaagaatacgattgtatgtcctgtggaaatgatccatgctattaaaggtctagattttgtggggaaaacattttcctttttttatgacacctaaatagtcaagaaaatcttttaaaaaaattgtgatgatagattgatgtgtaatatatcagttcacaaacatataattcaaattcgaattccgagttatgagttgtagttagattttaatttttttaaaacatgtagaagtttaatttgatctggggttgttgtggagtgatatatatcatattaatctatattgttattttttaaaaacctttttaataactatttaaggacttattcattttgttgagaaaaattaatcttaccaaaaattggtaatgtcaaaattttggtacactttaacattaccaaagttttggtgttagttacgttaatttgaagtcttactaaaatttaggagaacttttgtgagaagaaacttccagattaccgatgtttggtagggtagcaatgataaagttacgtttagtttgttaccctattggcactaaaacaggggtacgttatcttgagggacaaaattccatcgtgcttgccctctaggctccagggaatataggaagcatttctgtgctctgctgctggcgtttgtctcttgaggtcatgggctcgcggcggcagcaggggtgggtaattggtcatcattggtatttcggtccaattttttcgatctttaaaagcagaaaattgagaaaatatttttaactatttatcactcttagatgtggcaatcaataatttgtcaccgagacccgtatattatttcacacataaggatccacgtatcgttaacacatagataacaaatagtaaacgtcaaatttaaaagtgacaaatagttaaatgccccaaaatcaaagttatctacataaactcatacgaaccaacaattcggttaaccgatatttcagcctccggtttttgatcctcggtgtttatacccacccctagcagcagcagagtgaccatctctggcgtgtgcgaccgggggaggtctcaatcaacgggttgccatctcgttagcccgaagcaaggggcgtctaccacacgcgcagcagcagcaacaacgcagtgcatcatccacccaacggcgccgttcaacacacacgtctccattccgttgacgccgaccacgataactagagggcaggcaggcgagcaggaagccaggaagaagaagaagacgtggtggtgccgtggtgggcacacggacgttgacgtaggcgacgggacacccagcgcatacccctcctgctccgtctttccacccatacgccactactagggtaacgcctcccttgcataaatgaaaatccttcatattgcttagctacctccgtcccatattacttctcgctttgagtttttatttgtaatgtttaatcattcgtcttattaaaaaaattggaattattatttattttgtttgtgacttgttttattgtcaaaactactttaagtttgacttattattttttatatttacattaatttttaaaacgaatggtcaaacgttacaagaaaaaaatcaaaacgataagtaatatgtgacggaggtagtactagctagagtaccttgctagtactagctaggcagcaggcactctccttaattctactattaattaacccctagattagtgttatggagctattacactaagtaggatttaaatcctgatgcacataaatattactctctccgtttatattacataagttatttaacattttttcttagtcaaatttctttaaatttgataaatttgtagaaatatatagcaacgttttcaatacaaaacaaatatattatcaaaatatattcaatgttaaatttaataaaagtaatttgatgttataagtgttgctattttttttataaacttgatcaaacataaatatttttttagaaaaagtcaaatgacttataatatgaaacggatggagtattacacccaagtgagttttagagatctgtcgtatggcgtatgtgttagaggatatgtttgtggatgagatatgatgttgcgtgtgtgtctgcaatgcaatcgaagaaacaatatagctaagggtgttaatcagtcaagtaggcggcgcaagacgctatcatatcaaattcaataattagcaaggggtcgccgtgccacgtgtatagtataacatcacgggctcacgttgtgtatttagagagcgtatcctatgcacacagaccctcgcgtgtatacaccgtgtacaccaactaaaaattttcataaaaaattttaggaaaattcatacatgtacttttaatagtattacatctacgtgcaaagttgcatattcaaattcattctacatagagaataacaaaaaagataaaattctgacaaaattgcaaccttaaaactgtcagttttttttttgttacggctaagatataataaatttgacgttaagattttaaccctaggtgtaatacaattgaaagtatgtgtatgattttttctagattttttggtgacattttttagttggtgtacacgtgtgtatacgtgagggcctgtgtacataggatatgttgccgtgtatttaaggcgatggattatggctacagggatggtccttaatctgtcaaattaatttttttccaggattaaaatcactgatgaaacggtttctttttcttctcatgcagttccacgtttatcagaacagtaggctgatgaaatattgatcatgacaccttacgagaataattatgagcactgctatacctactaaatttttattacaaaatttttattaacaatcatcccaaacgtttgatttaggtaaaaggaagttgaaaaaaatctaaatacattcgtagcatgacatatcagtacggataagaatttagtgagaaaaaataaacacgtataacctttttcaataattatatcatgtcgcccacctcaattagtcccagctaaacgcagttgggcttgttccaacttccaatccaacgtcctccatgaccacggcgtcttctggacacctcagtttaggtgcaacgtttacatcggtcagttcatcatcgctaggcaacaactgcattttcaacgttaacgggagtgcaaaatacagaggaaaaaacaggggaaatctgtgacgcgacacatgtcacgcatcccacatagaaagtcttgttcggctgcggctgcggctgcggctacattggattggaataattcatttcaaagttcaagacacgagcgagagacagctcatatccacacaaacaagtttataatagtaatatagttaactataactctaaaattaatcatcatatcatctataacttatctaataacctagcaatataataattttatgctgcgaccgtaaaaccaagccgatcgatcggctacaggctgcagcccaaaaccacacagccattaattaagaaaacaagttttaaaaaaaatcaagggaaacaaaaatcatacaaagagcagctgcttattggggctagctgcagctgctatagctattacgagttggctgctacatcaactatcacaaacgatcagcttaatatacctgtacttacgatgtattggatctcgggctgcagctagttacatatctgtagtttaatttttttttcatgtctcatcttctctcttttttacctaaggtaaacctgatgtgtcaatttgtagagcccacttacattaattattgtcctcgctctttagaaacctagataagttagttgtcacactatgacccatgaggcatagataattataaaaagtgaggtgataattctagttgtcaacaaaagaatatcttcactggatggtcaactatgggtatgtcacaactcacaatcaacttaatgacatacaaaatatttttttcctttttcttcctcttctttcttttatatcattgtgttggttggatttcatctgctgctacctatgctgatctaatgctgtgtagaatgtccaagatatcataaggcaaaatatgtacttcaatgtccctaacgacctttccctcccaaccaaaggtggccggcaaaacaacacagtacaaggcacctaattctgaaaaattgtctcttctcttctccattttttctcctggccctgcctaccaacattggtggtacctcgcaagaagggaaaaataattggagctgctccaaagttatacaaatgtgatatgaagccacttatctccacggcaggatgacctcatactaagcagtttggatcataactattccatatttttagtcatatgcaagtggaagcatttatagttgcatgctttataagtttgtactcaaaagaatgtcatccaaatcgagtggataccttgccatcatccttccaactctaacttttcagataaattttttccttgttttaatggtttaatttagcaatatggttcccttccactctcttgaaaattgcccccaaaaaaatcctttgggatgcagttaacttgattgattttcaatatgaaaaaaagcattaatttctcaagaacacatacaaaatttaatcaaacaataaataaaacgctgatatatgcagaaccccacaaaagttattgtagtttggtgacaataatagcatgttttggttagcagatacagttatgctagttggtgtttttccacatatccatcatttcatttgcctttttattcagaggcacatatatccttttctaaggtgacttgggcttcagtggtggagatagctttctgatccaataaagataagcaattctttttggtttattttagctatacaacttggcaagatcacaactttatgatccaggcatggacaccttttggatgcctttggagcattcttattgcctaccacagtgatagggtattcctctttgaaaatattaaaaaaaaaccttaaactcttcatatgtgagattgcgatttatctactctacaaaaataatctgatacacctagttgcctgaattgtgtatggccaaaattccaaaggctagattaggttgggtttctaactttctattggtgcagcatgcaaggccacagaagatcctgagcatggtggggtacagttaggattttctgcaatgtgtgagaagcagaggaagtgggctccacacgtcgaaagcccctcgtggggttcagattcttctcctgtcagagtgtgggcccttcctagcactgacacacgagcttctggccattcctctcttcatcatacaggtctcacccataataaatgcccctccttttccttccaatttttatcaattccatttttgtttgcggaaatttattttcatattctatgttaagggagcactaataaaaagttaattcgagttgcatgcctgcaggtcgactctccccttcgaagttaaagataagaccaagaaatgctagaacatgtgcggccctatttttctcgatagaaacggagaagaaaggtaaataaggtgctcaaactgccaatccctcattttcagttaccagttagttcgtttccatttttcttggctttttaggctttttttattgccgttaaaacataatcgatgggcaatttggacgtattagcgggtggagaaaacgggaagtgcacgagtgtactcagtgcttccctagaatgttgagaggatgtttagatataggggtgtaaagttttagcgtcacatcgaatattatattgggtatcgtattgggtgttcgggcactaataaaaaaacaaattaaagaatccgtcagtaaattgcgagacaaatttattaagcctaattaatctattattagcaaatgtttactatagcaccatattgtcaaattatggagcaattaggcttaaaagattcgtctcgcaaattagtcgcaagctatgcaattagttattttttaagcctatatttaatatttcatgcagacattcaaacgttcgatatgacatagtgtaaaatttttagcgggatctaaacaggtcatcatgagtcgcatttctcaaaaaaaaatgttgcgtcacataactagtagtatccttttgacttccataaactatattcctgcatatttcacaaaaaaacccatttaactttctccaaattactaattcagaatatagaaaggcaagctctggtctctggtgtcactgtcacacgtagcttttgatgaagttctttgttagtactttttttttctagaacaagtactttatcttctctaatattttcctcccaaaagaatagtacagtattggtttaggaaaaatgacatgataaatgctttatctacctttcaaacccgtgaacaaggggtcaatcatgtgaaaccttcaaaccttaaacccactgggtttgtcacacaatatgaggaatattaggggtgtttttgaaaaaaacgcaacactagcatggaaccaaaaccaaaagccgtgcggggctaaagcactaaacatccctccattactcgcaaccccaactcctcttcgcgtctcccaactccgaattcctcctcctcatcgcgtgattccgttttgcgccgcctcgccttttggattgcgaactcgatttccaatcaaatgatcatctgccgcggttgcggctcgtggaggaattcgtgattgctctcccaccatggtacggccgccgccttcttgatcttctctgtttttttttcctttcatgccttatttttcatctgaatttttgagagtcttggggtatttgttccggttactggagttgattccgatagaggttgaattaaaattcgttaagtttgtggtttgtaacgttcttcccctgaatttacgctgctctgctatctttgctgctggttcttcgctatcttcggtttattccgttgctaaaagatcgaatttctccgggattgatgcgcacgtgatggtttatgatttcaattgtcttctaaaagttaatttttgagttgattcttttgcgattcgaagttctttccatatgtcttttgtttgttcttctgaagtattagctgttctgctttcgttatactctttaggtagttgtcatgcttacatcgcattggtgttgatttagtaacggaattccatgaacttaattgttgatttagtaacggaattccatgaattatgttcaaaggtttgatttttataatcgccacttctcgcacggaatctagctttcctgacctgcggtcctgccattttccatttgttttctccgtttagatttgatactacttgattcagtaactatagttattaatgagccataaattactcccctgttttaattcaatgactagtccaaagttttttattaatatccctgatatgttacatggatcatgtacatatatctgtaaattctccctttttctgttttggtttgtcctgctttttgttcctttttttttctctctgataattcccacacctaatatgtaatctgtaaacctcatttctattaatgaaatgactataagttagagcctactctaccttcttccgtcaaaaatatgttacatggatacctgccactattttctattgccagaatttgtgtcaatctgaatggaacagtcttaaactctgaaaaacatatttctacgcattaatccgattgatttcttgttccatatacattccgatatgggtgggcactgggcagtgccatcggttgcactgagtactaac

SEQ ID NO: 9082 - DNA, 22003 bp, Oryza sativa
ccccacctcctcgcactcccaaacctgaggtggagatcgcgcgagccaaacacacccccatcccctctctccgcgcctcgcctcgccacccgcatcgccatctcgcaccgccacctcctccactctcggcggcgggggcctcatcgatggcgtcgaggatggcgctccggcccaacgacgtcacgctccgcctcaccccgcccctcgccgccgccgcgcggcgcaaccgccgcgccgccgccggcggtgtcagggtctacgccgtcgcgtccggggccgtctccaccaagtaagctcgcccccgctccgctcgccactctcctctaatccctctctatcgacctcgtcgcgttcgggattggttccccgtgtgttgggttgggttcgatgcatcggtttgctctgggcgacgcctcgccgccgctgcgtagggatttccggtgcacctgtccccggattggcgcggcgattcggggttcgtcgacgttgcggcatgaatgcgtgtctctcttacccaggattcggtttttcttctcttcgttttgcttgcctcgtctgggttttgtctcaaattctgcgccgtctccgttcctcgtcgccggctttggcaccggtgccaggaatcgtgagattcatcctcgtccgtgtcgcgcgctctccctacgcgcatggccgctgcatctcgccgctgcctcagatcaggctgcaaagatttgcagcttcgccgttcaatcattcgtgcagcatacagtaggtcggtttcactgtatgaactggcgacctgctccaccacggcttctccgttgcaagcaaagtgaagctactagctcgagttagtccctttcacattcatttttgacgccgcatttcaccggcattaaatttgctgggaccttcataccttcaagcttgtactctggaaccatactctccattaatatatcgctgtactgcacaaggaaaatcggtggtacacaacagtatcgatttgaagaacctctttaggggggcttccatggggactccaaggcgttcctatcgttgtcagcccgatttggtggcccgtggtccacagcatggtgatgttgctcgcagtgtcatggaatttaatttgatttgttcttcgcttgttagtaccactggactcctaggtagagatgctttatggcagctcagtgtcgctgacctgtttagttgacgggttctagagtcatttaatacagtatggcattggaaggaggttggttgtgtcctatcctaggcatggcactgaaatggaatcacctccatactccacccctgtcctgggtttcttgatcggattatttgctccatttctctataaaaatgtatttgctcggagtatttatttagtattgttccattttctgatatttacaaactgataccctggaaatcagattgtttttctgagagggtggatatcatagttactgcttaaaccttacccaaagttaaatttttctagttacttccagtagttaaactggcatgaatgcaagatggcagatttgactgcttggtccaattagttccacctggctgatcttatttctatttctgcacaccctgctgcagcaaaaattgtgttccccccagagatgctgcccatgcccagctacagtgatatgcagggcttccaggctaaaacgcgcaggaaagacatccttgctgtatatcaggatttctttagcctatgcattaatacgttcagtatggggagatcctcgcaccataatttatagagcatggcatgtgactgtagtgtggacaaggtcaatgatattagctagtagtactaacctaactgcattttcgctttgtctacctgatgaactctagagaggccaagaagctaaagcttattgcacacttcagttgttgtgcataatctaccgttttgtcaaaagaacagtccaaccataactgatttaattttaaccttaagggaaaaaaatattaggatgaccatcaaactagtacgattagtcttctttatcttgacaaagctgaatggaaaccgtacaggtcaccattctaagcatacctatacatatattttacaactcaggtgtaatctgtttcttttcttttctttgggagggtgttgcttttaacagtgtcccatcagtgtccctcttgtcaaagtttaaccttgtaaatttgtaaatactccctaaattaatgaaatttggccggcctagtctttggccagcctggcaaatgcctaaagctagaggtatattcatcatgtgtctggtagttgctgaaagtttgtttaatttttgtatcagggttgagaacaagaagccatttgctcctccacgagaggtgcacgtccaggttacacattccatgccaccccagaagattgaaatattcaagtctcttgatgattgggccagagataatattttgtcccaccttaagcctgtcgagaaatgttggcaaccacaggattttcttcctgatccagcctcagatgggtttcatgatgaagtcaaagaacttagagaacgtgccaaggaaattcctgatgattattttgtttgtttggttggagacatgattacggaggaagctcttcctacgtaccagactatgcttaacactctcgatggtgtccgagatgaaacaggtgcaagccccactgcctgggctgtttggacaagggcatggactgctgaggagaacaggcatggtgacctcctgaacaaatatctctacctcactggtagggtggacatgagacaaattgagaagacaattcagtatcttattggctctggaatggtaacagttttcttccgcttctttgctagcctagctatatttaactgattattttgaaattgtcattcatgagtttttccctcaagcaattgttttcctcactggctagcgtatattagcatgatgtttttgaaaaactcttttgagttttgaggaagctagtaactccactaactacatactttaggaataacttttacctggcattatcaattttctaattttttagtcttatgttcttttgctctgttctattctgttctgttcacattggactgtttaagtggcaattgagcagagaaatctgtagcacttactcttttgctgcatcatttccaggaccctaggacagagaacaatccttatcttggattcatctacacctccttccaagagcgtgcgaccttcatctcacatgggaacactgctcgccatgccaaagactttggcgacctaaaacttgcacagatctgtggcatcatcgcctcagatgagaagcgtcatgagactgcatacaccaagattgttgagaagctgtttgagattgaccctgatggcactgtgcttgcttttgctgacatgatgaagaagaagatctcgatgcctgcccacctgatgttcgatggggaggatgataagctctttgagcacttctccatggttgcacagaggcttggtgtttacaccgccaaggactacgccgacatccttgagttcctcgttagcaggtggaagatatctgacctgactggcctatctagcgagggaaacaaggcgcaagactacctttgcacccttgctgctaggatcagaaggctggatgagagggcacaatcgagagccaagaaagctggtacattgcctttcagctgggtatatggtagggaagttcaactctgagcatcagacgccattgcgacttcttcgagctccagtgttactactgtccgtgcttgtcgagacacattttgagaacaataccaggtgtgtcttgctacatagttcttcaggttgaccaaatgaactgagggcatatgttcgtggtatctttgcttagagtgatagagagatttgcgtctgtgttttagctctttttttcttttctgccttttcatgtacaacttctggccgtgtggattggacatgtactgaacgtgagtctgtcgttggccgtgtcaatctgctcgtgtgtttaaactggctgctgttcaggtctgaaaattttgtgaaatctgccatgtcgtcagaaatatcacagctttcaactgaggatcatcatcatcactagtagtgtagctgctcgtctgcagtgaattacatcgtacaactgataagccccgactatttggtgcaactgttatgtctgcagataagcagcatacgattcagcaatcagttcactcggtgatattttagtatctgcaaagatcagctgttgctgtcatgctgtgaatcgagatgtggctcaacgcatgccattgttagtgcatttgcatagcttggtgaagagaatatcccattaaattttgtgcgtgcgaattctgttgctagtgtgcctgtacagtacagatggttaaatatacgaaattctctaccgagatatatgcaatatgctcagcaaatgaaaagatatatgctcatctgttgagattcttcacttcgtatagcaaattagcaaccatatgtactgttcaagttgagactgcctgagattgcttctgaccatccaatcttccatttgcagcatttgaattgaacctacagtcattgcttcattgcttgccactcatttacattctgtttttagatcaagaattgcctgactttgttccaaacaaatggcttaggaaatctctgaacaaatgaaatttctgaagatggtgatgcattaagatttcagcacaatacttttgcgagcaacctgaaatgtattccactttgctgcaatatgagaatctgaatagtgccggggtaaattctgtacaaactgctactgacaaatgggcccacgtgttgttcctggccccacctatcagacatagctgagtgttatgccaaaagaagcaattccatttccaccatagctgagtgtgcctctgttcaggacgaatgctgacacaaagcacgcaagaaatatgcctgcttcatttcaatctttcaattgacacaaaaattccatttgccacctgaaaggcagtaaagcataatgccaagttgcagggagtaatgcaaatgcagtgccaatctgcagctgcattattattcagtggaggtagatcgatcagagtaaattgagctcttcatggaacaaagaactgatcaatggattggaacattttctttttcgttttagtggactgacagtaaacatgacatgcatgatcagatgttgcaactttacatataaatggcttctgtgcgtcagcaaatttgttctacgagcaaatagatggatcatgatcatgcatgtatgtggggattaattccctgatcctctctgcagatcagataaggtgagtgggaatatgtggacgtcgctctttgctttactaactattctgatctctgaaattaacagagaatgtacgttggagtgatttctgaatcgtccatcttaggtaattagcgtgaatgcagtgaaaaagagctttgcttttctctgatctttgcatgcacctgcagatgctattatgctaatccgcttgcttttagggtaatctgtgttctgaatgcatcgtggacaattattttaaggtgtcatgttgcttgtaatgattctatttaccagaatgtatataatcactaaactaatcattgactttgccagatttagttttccaagtaaggcagtgtgtgtcaggagagtggagctgaaatgtttttatagcagaatcagtgaactttgaagcttagctgactatggatagtggtgatatagcaggaagttttgctacatatagaaatgcaacactaatcagtcaacttatgaagtactgtatctgatcatatgtaccatgcatatcccaaattttggaagacagagaatatatgcaagtatgcatataccattgaaaatttgaaatggtatttggatataattcaaatgatttgattttctcacaggtagccctttttttccaaggcaaactcacagatgaacagatgatagactgacagttctattacagaagcgtaatagtgtacttaacattattttgtctcatgcgtctgtaactttaccgacaaaactaattcgtgtcaacaagaagaggaaaatacggtatgcaaaggtatagattccaaatcgctctccaggccaacttatgatctatctaaaacaatgcccaacatcttgttcctttttcctttttgtttcaatatcgatcacaaaatacatacatatatacgcagtagtagtcaagcaggaactggaaaacaataatttggacaacatgcatgaaggtatagtagtagaataaccactgctagctgcatcctattcctttgtgctgatatactgatatatgctttctctctctccactactcgatccatacgtctctctctctagctaagccactgtactgaaggttaatccaggagatgctagtcgacctagctagctagctagctagagcacctttgcagcaatactgacctgaccggccacctgatgttgaaactagcataagcatacagtactatagcattgtgctagcatttccttcaaaatatcattaactgttcctttatttgcgttaagtaattattaccaccgttattccaaaatataagggattaatttaactatgaatttgtattgctaaaatttcttatatctcgagacggagatagtatctaagctagttttttatcgggacggctaaggaggcggccgaccaaattttattaagaaagaaagatgttacaactttaacaatatcgacattaaactgtcgagggagagaacgtgggagaacagagagaagagaacaaaaacaaaaaacacacaggaccgctttatagcggggttcttagccaacttatctaaaaataacggcctccctctacaccaggatctcatctctaatatcattgtatatccctaacactgagcactctaaaaataccagcctccctccacaccatgatctcatctctaatatcattgtatatccctaacaccaagcataacctttgctcaaagatcctggcgttcctctctttccgcataaaccaacaaaccatcatacaatgaagtacggtggtgtttgaatcttctgaagatgaagatgaagataaagattaagtgtttcacgtaaaacaagatggtaataacgtgtgattaattgagttttaattattacaaatttgaaaaattgattaatctgatattttagagcaacttttatatagaaagttttcaaaaaaaaaccgcaccgtttagcagtttgaaaaacatgctacgagtatccaaaatttcatccaattcttatcggagaaacgaatgcagccagttgcatgcgctaggtggagctaagtttgatgaaactgaagagatgttgataatcaaaacgagtacgtcctttcagcagagatgattgtctgaaatcaaaatattttagacgacgacgttggttcagagattcaattcatagacatatatactagtaaggtaaactatagattcacgtataatatacatgaacaccctgaaactgaaaccgaaagctagctagtgatcagaccacacagatgatcactacttgcctttcggcaacggtagtcacacacacctcaagaacacatgcttgcttgcatatagcattgccagtttgccactaattgcatgcagtctccatcatcgaagcaaagcaaagaaaaacacacacatgtacacacacacactctctctctctctctctctctctctctctctctctctctctgcacgcgcgcgtgcatgcatgcaaagatttcaaataatcccaagcgcgcgagagcgagaaagcaaaaaagcgcgcgaacaagatcccgttaacctaaccggccgtcgcgtcaacttccaaccccccactaacactcacactcgcactcaccaccatgcagcaatgtcatccgaatcaaaattaccaagctagctaatccaccaatcctccccagccgttcgttcggatcgatccgacggccaccatcccactctgatcgatccatgcatatattcctccccagtgactagctcgcccccgctataaagcccagctcacactacacccactcatccacagcgatcaaccgcattacacttggttaattaattaattctccattagcagctagctagggttctagggttaatttagttgatcagttcgccggaaccggagaagaagaagaagatgatagggtggggagacgtgtacaaggtggtggcggcgacggtgccgctctacttcgcgctgttcctgggctacgggtcggtgaggtggtggcggatcttcacgagggagcagtgcgacgccgtgaaccggctcgtcgccttcttcgcgctccccttcttcaccttcgagttcaccctccacaccgacccgttccaggtgaactaccgctagaaacgcccatggtcttctggctagttccatgagatagtggactagacgatctgggttcgaagcctcactccttctaattatttgatgttagatccttgcttccctaatattcgcgtcttttttaaggtgaactaccgcgccgtcgccgccgacgtgatctcgaaggcggtcatcgtcgccgtcatcggcgcctgggcgcggttcatgagcaagggcggctgcgccgtgagctggtccatcaccagcttctcgctgtccacgctcaccaactcgcttgtcgtcggcgtgcccatggcgcgcgccatgtacggcgagtgggcgcagcagctcgtcgtccagctctccgtcttccaggccattgtctggctcacgctgctgctcttcgtgctcgaggtcaggaaggccgccatcgggatgtacgtcgacggcgccgaggcggcggcggcggccggcaaggacgtcgaggccgccggcgccgccgccgccgcaggcacggtcgtcgtcgccgccgccgcgggcaagccgtcgctgtgggcgctggtgaaagtggtggcgcacaagctggcgcgcaaccccaacacttacgccagcttcgtcggcatcacctgggcctgcctcgccaataggtacgttatgtatacaaattaatttattattacatgtaggctccacatgtcagtaagataagatagataaagaggaacaatttaatttttgcgattacatggcataaccacacaaaaacacactactccacacgtaatatcctcacacatccacaaatgtgcctcctaacacacgctcaaacagatggaaactagtgacacattttatggttacgtaaaaaatatacgtcatcgtgtatccatgagtgtatctgagatcaattgtaattaaatattggttttattaaactcgtagaaaaacatatataggtatgtatgttatatttaaaagtatcaggattaatataaaatcatgcacatatgcacaattgtgcactgccaacgtatcacatagagagatcggtttatgccggtgtgtaatggtatgagtgacaaatgtgtggtggttagctaaccatctgacgtggagatcaccctgacatgacagtagatgcacgtagctaagcatcatgcacgagaggctaatgctattggtagctccacacactggtcatagattattattcttgcaacgtattaattgcgatcgactgtccaattaatatgcgatcgattcgttgtgatggaataccattgatttgttcttccttttttcccctgaactgcaggttacacatcgcgttgccgagcgccttcgagggatcggtgctgatcatgtccaagtcaggcacaggaatggccatgttcagcatgggtacgtacatacatacataagctcgattttttttttggtgtgaagaatacgttaattaattcgattgtacattaggtttatgaagtaattaactagatcacaagttaattaatcatgtacgtagtagtataacaagggcacttgttagtgaaattctacactgatcgttagtattaattaaccttcctttttgtgaatgacttgtatccccacactacttgttccataattcgtatctagtactccagcaagtaatacatattccactagataattacccaaaaaaacacaccaagaatcctataccaaataaaagaaatggaaaataaaatcagcagtatcttcacgaggaaccgttcaaattaaaggcacaagttctgcacgtctgttgcatgcagagagcttgcgatagctagcacgaaaggaaaaaaaaaggggtagaagtatgcttttatttttatttttaaaaaaactctctctgatagtaaatatttgatgtttgagacagtattcaaccaaactttggatattttgatcaattttatacggtgacaagtttataaaatctgataagtttatgacactaatactttctaaacaaatctaattataccatcttattttaattaaaaaagcatacgataatttattataatttgttgatggttggctaaatcttatcgtacatatgaaaatatttatgaaaaagaaaaagaataggacaatagaataaggaattatttgtgttcttgtgctgatagttgcttgcatacagcagcagcagccataagagcaagtttaatagtatagtccactattagctccaaatcatctatagctaatgtaatagccaattcatacaatagttgtttactatactatttcatctgtcatacacacattatgtcttggagtccgtgctgcagctggctacagatttatagcccgctgctcttctctctctttatttatctctttaaaatatgtttatagctggcttatagcatgctattacacctgctctaagtagctatcatttttatttttgattacacgaaagatacttaagaggggcgagacgtgtgtggttttgcatggatgcaggattgttcatggcgcagcaggagaagatcatcgcgtgcgggacgagctttgcggcgctggggctggtgctaaagttcgcgctcggccccgccgccatggccatcggctccatcgccgtcggcctccgcggcgacgtcctccgcgtcgccatcatacaggcaagctacctataccgattggatccatgcacatctctttctctcccctttttgttccttaattctacgcgcatgcacacatatctcacttgctttataatactcaacacgtatactcgtcgttttagataagggtgaggtcaaactttaaaatctttgattatgaatctttttaaaatatttgtccttcaaacatgttgactacatgtatagattgatcttaaaaagtactttcataaaatcatatatttgttaacacttttatacatatagaaaaaataacggtcaaagatgtttttttgagaccgtgcccttattcaaaacgacaagtattatcaacccggagggatgtaccaaacataagttgcactaattgtgtgcaccggaggttttgagctacttcctccgttccataatggagtataagacatatactacgaatgtcgaatttagataaacttccaatttagatttttagtattataatatatcctattcggttcgatttcttatgtttcggtacagatggagtaagcgctaaggcaaggtaatgtttcctcgtatttaggtccatgacatacaaaatacacctctatttcaaactaaggctgtgtttagttcccttcaaacttttaatttttccgtcacattaaatatttggatacatacatggagcattaaatgtggacgaaaaaaaacaattgcacagtttacatataaattgcgagacgaatcttttgagcctaatcacgccatgatttgataatgtgatgctatagtaaacatttgctgataacagattaattaggcttaacagatttgtctcgcagtttacaggcggaatttataatttttttttattattagtctacgtttaatacttcaaatgtgtgtccatatacgtcaaatattttttttttttgcaaaacaactaaacacggcctaaacctaagactacaaagtagaatggcaacgacgtatagacgatgctgggctgatgtcaatctatcagcctttcacaggcatgcaacttaagccatttgattttaccactttacaactaaatgttgaaagcttacttttgacccaaaaaaaaaactctagctgaagattcccacttaacttcccattacaccactagctgatagcctgatacatgcatacaaccagtgcttttagcccttgctgggttcctttgtgtatatatatatatatatatatatatatatatatatattaaccgaacttctaaatgccaacaaagtcatctgccataattgcatttcaccgacattagatcccttcagcaccaaagtattaccgcccaaaggtttttgtctagatatgtcagatgccacacacatagtgcaacactaatggagataaaaaggaattgctagcttaagtacagggctagcaatgtccggaaacaaaagggaagaaaagaaagatgcttgaacaaatggaggaaaagagaatccattgtgaaaactacacattccactgctattcctacgtgagatttgagcttagtttgtcagcacggctcagcaccacactaatcttgaccactgggtgctttaagcctttaaggttaatgttgctcgcagagccacaaacatgaaccgtatttgcacaaaagaaaaggcaaagcatgcacacgaaaggcgcagtagcagattaattatatgttgcgtagtcggtgtgcaagtgcgcattccaaacgacagaactgaattcctgatcagtactaatataatcttcttggaatcttggtcaccttgaccttgcttttaagcaatcagaccatgacgaaaaatttcggcccagcactatatatataccaggcttgaacctcttaccctatcagtgaacatgtaacacgaactggtatccattattgtctgagaaacactcaccatcactttagggcagtgtcttatccatggaatagattggtcttcaatggggcggttcagcttctgttttcatgcaaagaatagtgcatgtccctattgcaccggcacattttgacccctgcttgccaaagagcaaagatcgttgaaattggtctagagatcagatgtgcttaaagtaaagaaaagtttaacaaaataaagtgaagaatgagcatggcacctatgtggaggatctgttcttggcatgttctagagtccgtccccacatgaatgcagtcatccgctaaacaaaaggacaagttaaaaacagcaagtcattagagaccactcattcagatgcttatcgcataatgaatcgaactcaagtgttagttaaacaccaggacccatacaataatatcaagagtctaacagcataatcatgttcaaggttttaaaaacagttagttgctatagtggagtcagcactaataagatgcacaagggaagtcctactcatcatgtcatctagtgcacatttcattcaagagatgggttaacctcgtctgaatcaacagtgggtttactttatgggagaggcaaactagtttttgatgtgcatcacagttataaaactgaaagaataattatcctctttgttccatgtcatcccttaataactgtctacacagccacttctgttcctgtgtatagaattaacaaacattcgaaagtggtaggggctctgctttggggtgacagggcactcctgaatattaaggtaaacaatgtttcggtttacaaaactagagttaaacaggggaatgttgctctgatagtggtccttggaacaagtgtgaactgaattattgtctacaagaatttgtgatcaaagggggggggggggatttggcttccactgaccacccagatagtttaattcaagacaatgtgaaggttatagctttgtacgtgaagccaggactacgcaggttagatctcagacgtcaaatacagtttctctaaattacaatgcttattgtgctctaaagattaaaatgagtgcaaagaaatgacctttctgatttgtcttctaatataataatttttcatatatattcaggtaatttctgtcgacattttgtatcttcctgaaatgatgaaaatgtgcctcaactaacattcgtttgaattcttcaggcagccctacctcaatccatcacatcattcatatttgcgaaagaatacgggctgcatgctgatgtgctcagtactgcgtaagtattttgaactgactacaaactacatattgtcaaaggcatatgtttctgcggacagtgaaatcaaagtttttctcataccattttgttgctcaattttgcagggtgatttttggaatgcttgtctccctacccttgttagtcggattttacatagttttagagctaattaggtagacgcagagccaatggtacatcaggaaaacatagtttttccttgagaattccaaaacatacatactgacaacaaatgttgcaaaatatctcctgccaacattcctcattgcataaaactgtaatgggagtatcgagttctatggaatacttttaacacgttatgtaacaagaatgtatacttattctgttattcaaaagaatgtgttacagtatttcattattgtcgtatcaccttgatacagccatttcagtgatagtaggcagtaatattcaatatgtattgagaactatatcagtattcagagaagaatctgtctcctttggaaatgcaccttagcccgtaagttaaaaaaaaaagaggaaattttccagagttaccttagaatacgtttgactagcttgcctagctcttcaccacggtcctcctgcacatggtgccctgcctgcatgataagtaatgacaccagagaatggcaatcaatgcaatgaaaagtaatgagaaaaaaattaggcacgtaggttacaagtaatcatgaaagaaactcaaaacagcagtgagatattcttgtttttattttactctcttttttcatggaacagggtaattttgaatattttttcccctggtgaggacaagaggagggtgggggtggggtaaagacaacaaaccattggcagttctaaaattttgtaatttgcactgccacaaaaatcttcaactccatcatagttcagccaacgatctctcaagccccaacatactgtcgtttttgttttccatgaatcactcgataatatattcctcatggattcaatgtaaacctgtaataaaacacgccattcagatcatacaaattaaataattgaaaaggccaggtgatagacaagtaagctaccttaaggtcctttttcatagctctactgattgcgttcaatgcaaaaccagaagaaccagagacaaggtatggccttctgtataccattgcatcttcttctttcatcatgtatgggccactactagtcaaggccttatcactagctctgagaggatcctgaagggattcgagaaaaggaattttaatttcaaagcacaaaccaaaaagttacataatgtctaagttcatttcacactatgcctgctaacctgggaaaatatctcacccaacaagaaattgctgaaacatgcaagggtggacggaagcttcgcatgcttatccgttatctaaatataaaagcatttcgtgatcagtctatgactctcaagatataatgaagctttacaagacaagattgcgtagtatgtagcacacaaaaatatcagagaaaacttatgtggctactaataaaaaaaactcaccggtgggttaactaatatcaggtggttcaacttgtcctgatgttcattagcatatttgattacaattggagcaaagtacccctgcaagttgtatgtttgcatataaacaaggatcctagagattcataataggcatatccaggatggctaatgacaagtacttgaacaacaatggagagcttatcaggagcaacagcattgatcagagactccaaggacgatgtatattctggaaaggaaatagtagtttatgttattattagttgaatacacttgttttggagacacaggatactatgtagataattttaccatcaagagtatagtcaaaaccataatcgggttgaggcttatctgagaacccaaaacctgcagacacaaagttctttgttttcaagttaggcaaatatctacatgcttactcctacaaactgagcagcagcattaaccaaaaaggcatggttgttcagtacgatggcacaactttacagaagattataagcaaagccacacaaattatgactcttacgttcttgagtattaatgtcaaaataagatgataataggtactaaagatggtttcctattctaatttgtatgatcagcacgcatagactcctggtcataatgaccagtaattgcaatacattttctaaatgtatttttttcccaaacatatgaatgactttgcatttttctgccaacttaattaaatagtagttttgcatttgtcaagcatcaaacaatgtgcataccactgcaactcaccgagccaatcaaaagcaatggcatgataattgtctgatactacaggtagcacatttcgataagagtatgcctgtaaccaagaaagtccaaaggcatatattcagtattggaagacttttttgtagaaaaagaagaacataggcaaaaacctagtcaaaatcccacctgagatggaaatccatgaataaaaagaacaggaggattcgaagaactcccagcctccacacaaaaccacctgcatcacagtaaaaaagaacacacaagagcaattatcatctttgaagaactaatatacttatcctaaaggagaccaatgacttgaaaatacaaggctaaatgccgtcactattattgtacctgacaccctgctaaccacttatatagctcaattcacctgaaaacatcatttgaagattgtgattcagctcccattgtgagcccaaagatgggatcttttgccttccctttgttcccgtatactggatgagcttttacctgtaatgtaagtatcatcatatttttgactagcatattggaacaatcctactctcatccacatgaagaatatgatgaaatgaaaatgctcatggtgagacagtgcattatcaagcaaaaggcacacggaaaatctaatcactccgtcaaactctggattatgtagtttagatatcaaacagtctgcaagtgatgagtgcacaacaacacatcaaaacagggagtgatcacattataccattctcccttgagcaaaccactcatcggacttgctcgggccatccgtatacttccctgcaccgatcccccgcagaataggaacaagttagcgaataccaatattgacatgatgtcagaacccaactaatgtggactaaaatttgcagcctctgatccgattccccaatgctgaaacaaaacctaactcacccccactgaacgagaagccgtccccgatggactccggcgcatcgatcaagtagtaatcctgcaaaaaaaccccaccgaatcaaaaaccaaatccaactctcaaaatcgcaagccctggtgtggcggctggtgcaggacctcgtcgttgggccgggcggcgcggcgccagcaggggagcttctgggggcgggtgcggaggcggaggcggaggggtagcgcggcggcgtggaagcgcggcgcggcgagcggcggcgccatgggaggtggtggaggattgccatgggggatcgaattccgctggggttttggagggaggaacgaagtggggatagggtttggttggttggcgctcctcccgccacagtttctgaattccccgtgtgggtcccactcgtcagtggctggctcccatttctcacttatttttttgtcactttgtattcggcaaaatttgataagttttcccaattcttttataaggaaactaccaccaggtcttacccagtagttgaaatcatattaaaggagcaaaaaatgttataaatatacaaaccaaaaggaaccgaattacaaggcttataaccagctacaaactgaaaatatatactgaaaaaaataagaggttcattcatcctatataggtgtagaagattttttttttgtttgaaacacctaagccaatcattaacatcatcaggaacagcattctgaaatatgaaagcatttctttatttccagatgtgccaacagactataaacattatttccaaaaacaccttgcttcgaaatctgattctggctagaacaatcatctgaaaaagctctatattatggttccaaataaaaccaatcatctcccagcaagttctccaaatttttgtgtgctgcaaaatgcactagacctcgacaagtactagcatgatatactatctctgaacttgacacctgtacttattctgtttttcttggaataatctgcagccaaattccagctatgtacaagtaaagatgcaacctcacatacatgccaaaatttgattgatcgatatatttcttttttaaaaaactattgtaattacatcgtctttgattctgacatttgcttattctgacgatgagagaaacaaatctgtacatcaagaagagaagctctgtatctatcatatctcagctactcaagtaactagccgtacgcccggtcccaccgccatcgccggcgacgagctcggtcgccgtcgccggcgggctacgggtaggggtcggtccagcacacgtccccctccgccgcggccttccaccgccggttgaatatctgcagctcggtgtacgaccgctgcctcacggcgagccggtcggtcgccgccttcgtcgccgtcgacgaccgcttcgccgccggcttgccgccgccgtcgccgagcgtggggatgccgcggtggaggacgtactcgctgtcgacgatgccgacggcgagcctccggtcgccgccggcgcagtacccgagcttgaagtcgaggccccacgcgtagatggggtcgttctggatcatgtgccacgcgcaccgccatgccgcccgcgagaacaccggcaccatcatctccacccaccccgtgcatggcggccccgtgctgttgtcgtcgcatctcccccctcccctcgtcttgtagaatctcctgttccaaataaattttacggttctcaacaaaaacgaagctgaaattgtcgtcgattcgggggcatatccactctgtgtgttttttttcctactaaattcaatgcaaataaatataaaaaatgataatgtagagtagagtaacttttaacatttttaccaaaaattaaattcaaattcaatctacacattaagaataaaaaagacaaattccgatatactattcatgccaaaatgataagttgagtttatacaattttgtgaaatggcatatatatggtatgaattatcaaacttttttttaaaaaaatatataactatgtgaataagtttttgacaaacgaaaaaaaattgtcccctcaagggatcaagagagtttctatcaatttcacatgaaacagcttgatttgttacctgtgaacttggcctttgcgggcgcggagtgtgaggcggtggtggatctgggagcggtggtcgagcgcgggctgggagatctcgaggcgttcgcggcggacgacgcggaggtagcggatggggtcgaagccgtccacctcgatgtcctcgtcccagaggaagatgtactcatactcggccaccatgtccgggtgtaagaacctcttcccgaaccaccatttcgtctggtccttcgccgccacgtgaatcgcccggtccgaccacccgagttccctccacccgtccatctcgccgtcgtagtggaacaacatcaccgtgaacctgtcaccggggaactgcatgcacgccaaccattgtcgccgacgagaatcagctcaagtttaagtgctaccaggggcggatccagcatgggagcagcggggtctcgagtccccaagctcccacgaagacctcactaaaattttttaccatatgtagataggtgggggactgtaactctatctagatagattgggaactttaactttgagcccccaaactcccacgaagatctcactaaaattttttaccatatgtagataagtgctatctaaataggtaggtaactgtaactctacatgatttactcagatcatattccgccactgatgctggcgttgaaggaaggaactgaagaagaagatatggtattggtaccttggagacgagcttgtcgacgacggccttctgctttatgccgacggggatggcgaggaggctcttcgccggccgggcgacggcggcgcgccgttcggggttgccgccgagcggctccatctcgaagttggacttgtcctgcacgatgcccttcggcaatggctcgctgcctgaaggcctgcactgattctgcaaacttaacgagcagtttagtttgttcggttcattgcctgcattgtttgcattgcaggtaatatctctgttcttttaggttaagtacggttattaagaattttgataaaatattatgattgactaagaagagaaagtaagcagggaatttgaatgctattttctccgtttcacaatataagtcattttagtatttctcacattcatattgatgttaatgaatctagacatatatatttatttagattcattaacatcaatatgaatgtggaaaatgctagaataacttacattatgaaaaagagagagcataagtttatgattggttgaaaataaaatgcgtgtgaaaaaattgttatattttagaggagatggattctaatttcctaggtagatgtccattcgtttcttgatgtaaactaaatagttacaaaaacctgaaaaaattataggtaatatattatttcataaacatgtaagttcgaattcgacttctataaatttaaaaaaaataataaattaaactctaactagtatacgtatattcagttaaatttattatttttgttataatatatagaagttgaattcaaacttacatgtttatagagtaataattcttatctttttttgaaagtttttcataactatttagttgataactatttagttgatatgtaagaaacgtctatctaaatgcttaaaagagtttctcatattttataacaaattttgaaggctcttgttatatattggaatggagtgagcatctgttctgacctcgcagatgctgctgccggcgagttccgctcgctggacgccgccggcggcggcgccggtgcctgcctcttgcacctcgctggtcggagccctcgtctccgtctcttgcacctcgctcgtcggagccctcgtctccgtctcgcttacgaccatttctctcggccgtaactgaagaattgacaaattctgcagaaacaaattcataagctttcagaattcagagaattgattttatcattcatctatctctgtgcttgatgtaaagaagcatcaaggtgcatacctccttgtgatcaagcgtgacgattgcaccgccggcgaacaccagcacgaagaagatgagcgccgccggcggcgcgacgccggagaaccgcttgcgcggcgagtcattcggtgcagctggaccctgtgcctgtggtaatccgtcagaaacagaagcaacttgtgagctcatcataatcgcacatgtgttgcgaatttagtttgcttcaagattgaacaaggtcacagccatgaagcaatctctgaatcaatctgtctgctcgaactagtcttgatcagagagataatatcttcaggtaggaaatcaagaaccggaggagaaagcaaaggcatattccctgaaaacccaatcgaggaaggaagtctattatagcttaggtctaaaactccccctgaattctactgcaagggtgcagtagaagcaaagaaacgttcactatggttaaaaactgagaggtttaaattatggaggagaagaggttcttccagatcaagaag

SEQ ID NO: 9083 - DNA, 69460 bp, Oryza sativa
cgattccattgagaagaaaatgtgcccagcactacacctagaatcttgacagcattagacacggagagatgtgaatgtgcatagcctgtgtatatctttccgacagtaacgtcttaggcgaccaaaccctaaaatctcccataaaaccgtggctaaaaacattgcacaggaacagtgacaggtaccactctaggcctgaaactgaagtgccaaactgttcaggtaaagaaacgtatcaacttttatcgaccctctgattttcaaagccactggtaagttcagaattacagaagaagcatgatattgtcttaactcctagtccatggtaatatcttctgaactggaattatacaaggaaacgtatgcacttcatctcaaactttttctcactatagatgcaattggtaaggttgttgctggttttttcagatctgccgaatgaaactgggtattattatgctatctaagttgaagcataaaaaaagccgcatgatggagagtatatgtaagattgaaccttttctttgtcacaactaagacttggaacaattctgtctgaagacttgaaaaattctgtctgaagctttgttaatgtatgtctgaaaactcaggagttgacagggaaaaccaggcgaacaaaccgcggtatgattcagatgtcgcttcacatcgaattcagatcagcgcgcaattcattcaaaattaagtttgtaatgcgacatggatggaacagccgtgatgtagacatcattagttagtattagccttaataacaatcatggaccagttagtactacgtagttactgttggtcaaacgaaaaaaaaataacagatcactcctgcacgaaccaacggccgtgcgttttgtagtagatggtagcagttgtttggacggcaattctttttatgtttggagagatgacactgccgtcatcatgtctggctacacttgaacagttttgcttgcactcatagtcctctaattaaatactactacatacatggaaaaagaaaagaagtcttcttaattaaatgacattagtttgttagtttgagatgtgccattcgcatgtttgatcttatttgattagtggtaatggggcacacccaatgaaaatgaagtttcttcatctgttgggtgatgcagctctgaacaccactcattttgcaaggtagcttaaccagagaagattggataacctgagggtttatgtgggccaattagttcctgataacgtagtatcatctgcagatttgtggctggaattaaaatttgcagtagtactgaaggcagcaagcatgtgtgtgtgttaaattactttctttattttgctctccacaaaaacaaagattttatttgatggtaccactgttctgaagctgtactgtgaaatttacttttggtgtttggcaggagcagagaggatttggagtactaagtcggtgcaaccaattaatcaggatcatgcaccgacctagcttgttttgttcatctggcaccatatcatgagcaattaaatttgcaactcttttcacttttctttgcaagcaagctagtagaacatttcacactctggcacataagtttgctttttgtactacatgaacagtaaacatcactaggtagttttaaaactctaggatcctttttccttttttgactctggcaagttctttaattttcttgaccctgggaaacgtgttgttaagctttttaaacggtcttctcattttcaaatacattatcactacatttggtcgggtagcaatcagtggatgggcaatgcttttgtttcaccctatctcattgagattaactgcatattcaaaccttgaggtagaatcttctttccccaaaaaacaaaacacacacaaaaaaaatcagagaagtgaatcagtcctgagatcttatcttctcctgcctgaaggctgaagcagagtgtagttttctttgatgtaagcatggtataagaatcacacttttcttgttgtaacatttgaaatagttgatgacactttacaatttcttcccctcaaagaaacactgccctgcatcttgcatgtcagtgttgcaatgtaccgttgcattttaatgtatgatgttattgactatcgaacttatgtttgataatttgtcttattaaaagattacgtaattattatttattttgttgtgatttattttttttattgtatgtactttaagcatgagttatatttttatatatttgtacaacatctttaaataaagcaaacaatcaaaacgtatctttaaagttaacaatatcatacattaaaaaccgaagagggagagagaggatatactactgttgtgcaggattggttacaagtcagcagctagaaaagcttccctcctctcagtgggcaacaggtcacacaaatgctccatccactagggcaaagaagatcgaaccgatgcaaaagaggcctaacatgcacacaactgcctagtgcttagcacttagcagcagtaagtaggtcgcgacccagtgcagtgcagtgcaaaccatcacggcatcgatcacaattcacaaacctcctccctatggccgatcgatcgattcttcgctagtggcgtacgacgtcgatcgcgcgcgttgcgagcttgcaacaccagcaatttttgagcacttttctttgttgcagaaaagagaccgtcttgtggttcttggatggatagggctggattctagcttgattggtgcaagggatggaggagaatggaggaggaggagaccccagctgatgaacagcggactgactgatgcctgcccgcgtgccaaccggccaaaatgatgaataaaaacatacatatcgtcgtcgtttttcgtaccccagatctgtgacagatcaatcgatgcttatgcagttagagcaagtacaatagcaggctatacgctagctataaatatattttaaaaagataaaagaagagagagaagagcagcgggctacataactgtagctagttgtagcacggactcacaagacgtaatgtgtgtatgatatgtgggaccagatattaatattataataagcagctattgtatgaattgcctataaatgatttgaagttagtagtgggctacactattaaacttgctcttatactgtatgtgattttacgtgaaaaggtacaattcagatatagatggacgtgtaacgtataccggtttgacaccggtaacataatttcatcgtctgcttattagcttattattggcgacaactaaaacttaaaattcaaaacttaatttagttcgagcattaattttaaaggtttttttatcgcagtctatttttcactatcagcttttaaagtttattacaaacgacacgtggattttcgcaggatggacatgtgggaaaagggttgacaagtggtgctgcgtgtgtgccctacacacgggcccccggctcggccaggcaaagcgagaggagtcgagtcgtcggtcgttggaggagatgagagacgagaggccgagatggcgcgcccccgcggcggagtcgattggcgggcgagatctcgttgcagattgggtttttttttttcgcccacgcgacgcgatgaggcgcgcggccgcggcttatcgacaattttctccgtaatccgtcgcgcgatccacacacgagcacgatggacgggttgggctccacgttttggccgccacggccgctcctttttttttctttcccacggtggtcactcgcttctccgttccacatcggccgcgtacgtgcgtttttttgcgtatgcgtgtgcgtacgtgcggatggtgcgaggggaacaggaacagcaatggttttttgttttgttccttggcctgcaattgggcatgtgatagcaactcgcagttattgctgtagttttgtgcagtttttttttccgcagacattttttcgatagacagagaaagaaaaacagctttggaaaatactactccatccatctacaaaagttacacatattacttgtgtcaccaagatcaaggagaaattaaatcatcttctgttacaaaaatcaagaagtgaatacaaacatgcaaccaataaaatatttagatgactccttgagttgtaatcaaacatttaatttatctcttcatgtaagtcttgaatgcataaagactataaataagaacaacttatttggaacaactcaaatgtgaaatatatctaacttttgtggatagagggagtacgagtgcagtagtagtacgtacatggtccatgcttgattagtcgtctacagacagagaaaagagtaacgagagagagagagaggaggtcatctggtcagccggggcatagtaacagtaactcggcctcgtcgtgcagtgcagtgcagcgcatcggaatcaattcgatctcctttcgccgggacactactgctccatagcatggcagtgcaggccgtggcgcccatccagtagtagtaataaatcgaatgaatgcgagctgcgaaaaataaatatggggcgagccggcgagtcagtcgggcggacggaataaagaaggcgcggtcagaatccccgcacgcaaacggggtgagaagaacccgaggcgcgacacatggaaatcagtcgtatcgatcaatcgttctcccccacccgcgcacgccgcgagccgcgagaggcgcgacgtacgcgagagaccgcgaccgcgaaccccaaacccaaccacaaaccaggcggcaaccactctcccaacgccaacaccaacgccaccgccaacgccaacgccgccccgcatcatctatcaaccgccggccgaggtggaggtgagttcacccaatgcgccgcgctatgcgtcgtaggcgcgtcgtggtggatgcggcagcggctgacctgcctcgccgctaagtttttctttcgcttgtcgtcgtcgccgccgctgggttgggttggtggtgcatgtggggtacgtacgggtgggagtcgagcgccgaatctacgacttgcgcgcttactatcacgtgccgcgcgtcaccagaaactggagacttgttcacgttcaaggcgatttcttcatctcaaagactatatatcatcgttcgatcgggtatggtttcagagggagtgactaatgtagctaattaagatcgatcggccccaaggtaggtagacaaacacatgcccacacatcatgggtgcatcgtttgtttgtttgttgatcaggttggacgatgaacttgagtcaaaccacttcaagtatttttcttggattcattgactactccaaggtcgtaacaaattcaacttgcaccaaattttgccaaattcacaaatacggtctatttgtctttatgttgcttagagaaataaccagccagcctcgtagttccctgctctaattaaccacctagttcctcatatcttcatatttgtaaattgtaatcagacttattgcttctttgattacctgatgtaagctctgtcgaggggagcttttgtcaattacaacttctctagctttctaaacagtccagattattatcggattctaagaatacgttattaagaatttaaaaaataaattagaagccaaaagctaataatcccatcttttttcatattttcaccatctagctactcactagccgctttatcaaaatcttagggcctgtttggggagcttctagctgctgcaacttcttccagaattagaagctccccactgaaataagaattgtgtcccataaaactccaataccccctttagccctttttattagatatcttttgtcagaatttttaacagttcacttaaatctgtcttaaacgctttttttcgcgaacatgcaaaaagatcacacgtcaatatattagaaaaaaaaaggtttagttacacaaagcaacatgacagaaccgaccactgctgggttacaaggaaaatgaatgcgggggtgaagaaaaaaaaatgtaaaattgaagctgaagctactgctcctatataaaggtagagaggtggtgaaggaaccccctatatatccggagatttttttttgttggaatacacaataaaacatcactggtatgtttgtgttaactataaattgtgatacagttgctctcaaatagatatgttgctaggtacaatcaaactattctagtgttaattatcaatttttttaacatatgcctggacaagaatatttcttcatgtaacattatgccattctgttatatatacaataaatctgtactcccaacacgcaaaagattcgagtgtcaaccattttcatccaaaattatgtcacgtgaggcctggtgccaattttttatatgacctggatatttatgcaaatatatttctggtcctaccaatattgagactacccagtagctggaagtgttaattatacttggaaataaacgcattgcataaaaacagctagtattaccactaacctttccatctccaaaatcagtttaacatcgcctaatccacgtcggtttaccgccatatccgtttaacagttccctccgaccttttagtacagtttagaacaatcaataacgatgcgatatgtaccaagtactaccatccatccacaatatcgttactgaacaacgtaaaagccgtactacacgatcaatacgaaagtgaacctgtccttatattttctagtagtatttttttttcttccaaaaaaaagctgcctttcaaaagcccagcacccggtgtttccccctcaaaactaggttattactcttactccctctatttcaggttatacgatgttttaactttggttaaaatcaaagttttttttaaattttttttaatccgagataaatttattgtaaaaatatatttaattattaatttaataaattgattttgtgatgtaaatattactatatttgactataaacttaattaaagttaaagcagtttgactttgatcaaatttaaaaacatcttataaactgaaacgaatggaatatttactatttgcattattcggcaggagaccaggagaaagacaataacaaaaccgactagataaaaacacgatataaaaaaaagaacagtattccattctgggtcactgacatcgtgggcccacactctgactctctccgcatcggttatactacgcgcccaacctcctatataaaagagtctccgcttagctatctctttaacacaaagccattacccaaacccgcgctccgctcgctctccaccgctcgccgcgcacgcctcaccggagaccagcccgacggcggcggcggcggcgtcggcggcagcagcgggagcttggactgagatgaggacgaggagtggatctctctaccgcagcggcggcggcggcggggagacggccatggttgggcagaagaggaagaggtcgtcgttgccgccgcagtacgccaccgccggtgactgctgcggcggaggaggccgccggaagaggctggccggtggtggcccggattacctcgacgagctccccgacgacctcgtcctcgccgtgctctccaagctcgccgcctccgcctcctccccttccgacctcctctccgttcacctcacgtacgctcgccgcctccttgtctcgatcgattttgcctttgcccggaaaacaccttcgtcttccttcgaattacaaacgagtccttccgctcctctcaatgctgtggaaagagggaccgatttgcaatttgtgggaagttgtggggggtgaatgggggataaggcgaatgaatgaatgaatgatgatggccactaaccgaggcgtctcgtctccctatctttttgacgacggcttgcaggtgcaagaggctgaatgggctggggcgccatgacatggtcttcgcaaaggcctcgccggcgtcgctcgccgtcaaggcggcgtcgtggtcggagcccgtgcagcgattcctcaagctctgcgccgacgccggcaacctcgaggcctgctacattctcggcatggtacggcgccgagaaccctagattagacgtgtggttgagctgtgccgatgagatgttcgatcgaggtgctgatgggtgttttgtggctgtggttgcagattcggttctactgtcttggcaaccggagcggcggcgcggcgctgctggcgagggcggcggtcggcgggcacgcggcggcgctctactcgctggcggttatccagttcaacgggagcggcggcgccaagtcggaccgcgacctccgcgccggggcggcgctgtgcgcgcgcgccgccgcgctggggcacgtcgacgcgctccgcgagctcgggcactgcctccaggacggctacggcgtgcgccgcgaccccgccgagggccgccgcttcctcgtcgccgccaacgcgcgggagctcacgctcgcgctcgccgccgcggcgtcgcaccgccccttcgccgccctccccctcgccggcggcgccgccgccggcgccatcggctgcccgctcctctccgacttcgggtggagcctcccggaggcggagccccacccggccaacctcttcatggccgactggtgggcgtcccgcggcgtgcaggcgacggccaagaaacccggcctcgaggctcccgctgccgccaccggcgacagcgacggcggcggcgagctccgcctctgctcccacgtgcggtgcggccggagggagacccgccgccacgagttccggcggtgctccgtctgcggcgcggccaactactgctcccgcgcgtgccaggcgctggactggaagcgcgcgcacaaggcgcagtgcgtgcccatggaccggtggctcctcgccgccggcgaggcccagtgactcgccgccgccgccaactactcccttagaccaatcggtccaccggtttaacgctggaccgggtgtagccaaggcaagtggcagagagaaaaaattgaggaagctttttttttctttttttttcttttttaccgtttccatcgatgtcgtcttgtcagatgtacgtattccactagggaagaagagggtagagatgctacggatgctttttactcgcattattccttttttttttctcattccgagtaaactaaactctaaattaaattaaattataattataattataattccaacccctttaaaagacacagggggtttaaaactaaatcaaagaacttaatttttttgtcgtcttgtggtttggatttatgctgctgtgtggagggtacggacaaaggcagttcgggctgatgctgttcattaactcttaatgagggtgattaaccaatcttgattagatttttagattagcggcagccatggatgggaagccgtgcaggctgatgctgctgcagccgtttttaattttaatttaaaatttaaaattttctttctcgagggttgagacaggttggagttttctccatggctggttgtgtagttggacttggagagaggatcggaaggtggtggtagccaggtggtagccatctaggctaccgctaaagtgacatcaagcttttgtttttatttctaatttaattttgtttcctaggtcatggaaagaatacaagatggaggtgtcctcttttttatcgacataattaccacgtatatttgtatattacgtagtatatactaaggacagatatatacgttgtaactacttcctacctggtcgttcgttcgaacgatcaaaatagatggttatacaaaatacaactataaataataagtagatggtttacttctacggtgccttgaagatgagccttcttgtgcagagttggagtcaaagctgaagagagtagtatgtgattatccatggattaattaatttaactaataatatgaggataattgtagtagatggtgtttggttgtagtcaaggccggcctgatccgacggctggggtccaacactagatccgatctaagctaccacgcggagtggctcggagtagagtactcgtcgccgactcgccagcagctcaactgaatttaaacatggcaaatcttgcatcgcctcatgatcaatgcttgcttctcctgtgtgcttttatacactttgaatgctgatatcgtcaatttctacgtatttttctgtcctctgtgttctaaatcgtacgtttttcatattcatgctcgaagactcgctaaagcagggatggataccgtatttttcctatttctatattttttcgagccgcttagccgtgctactattatttttaagataataaaataacattttgccctttactcaacgagctacagtgattattacaaagtctatatataaagaaattcagcacacactgacatgatataaagaaaacacaaactaaacgagataacccaagatgaaagaatcttgaattactggattctatcattgatggagctttttggatggagtttgttttcgtgggggcatcgtgcgacgatggtggcgccgtttttattaagttgtagcgtgttccaattagcaagacaaggtgtgtgcatgaatcatatgggggctcttggctaatcggatgtgttcatgtgtagtacaactacatgtacatggtcccatgctgaattcagaggttagtttgcccggctgaatttattagtggatattgtgcaggagaagcaagctgaactctattattttgatcacaaattgatcgcaatcccagctgcattattcacaggaaaaaaacaaaagaaaagttggtgatgtccctgcatggggcaaacccttgaaatttccaactggggcagaagctgagactgaccggtagtacattgtgtctatagttgacacttgacactgcctctgctcaatttttcttccttttctcccatgcatgatgcgctcatcactgctagcttcgagtcaagagcccccaaagggacagattaattaacatctttgatactatcagcatccgataattactattttgtttgcactaatggtcaatggctaccaagggacagcatctcttgagaagtgtgtgtgccggttgccgtctgtctagttcttgcagctgcaaattaacctctccccaaaacaaatctgatgaaatgcgaccggaagcaaccaaacatgtagtttagattttgcaggagctgcacattaattgtgcctaccaaactgaagattttgtatctacatggacagggtttctacgagggaatcttcagagaaatggagcgcatctgcgtatgtgtatttgcaatggttgggccgtacagcagctacggttggtacctgcacaaaatgcttactgaatttcctcccccaacagtgtctcattagtcctaattaaccaacttggagtagtacttatcagaaattcagaaaattcagaatgggacacatggaacaggaaacccactgttttcttgcagtattagcttccaaaatgtcaatggtttggagaaaaacaggagaatcatatattcatatcacatgaggtggtgtggttgatagtatcgtatcatttttgtgagagatgatgagcaagaagtggatgcaaattggagcatgttgaggggtttgaccaacaccactcatgtagggtcaccttctccatgaccatgatccatacatatatactccatggcttatcattgctcagctgcagctttggcttctctcttccctcaccggcctctgtactttttgatgacacacttgcatgttattagtagcagttagttccctcatcacccatcaaggatcaagaatacttccattaatttcatgttagagttataccctaatggcttaattacaagctgtaaaatcttcaacctagtgagttgagaaaaatactttgagatccgtagggtaaattaatgcgatatgatcatcattagttcgtgcgatgaagctgggaaaagagaaaagagagatggggatgcaaagaaagaacaagaagcagctgcatacactggaataaagctgaaaagaaagaggctatatgctcatgctcctactactgctactcctctcgcctttctttctctccttttcaagctctgatttctacctctctctctctctctctctctctctctctctctctctctctctctctctctctctctctcttctttttcttcccccctgattcctgtgcatttgcaggtttgttgcaggcaaaagctcgcgtccgcagcgtgtgcgtggctgactgtttttgtgctgatcaacgatgctaaagcccgggaatccaatccaaacggcggtgtcggtatgtactctatccgtcgcaaaatgtaaaaacctagtaatacctaataaaacatatcaaattaggtttatctaaattcttaataaacttttttttatctaaattcatagcatttaatattaggtttttatattttatgagttgggacggggttagtagctcagtataggagtagctagatacagtcatttgaatttgtgatagatgcttagggttgaaaacggttcacggaaatttcggatggaccgagcatcgtttcggtaggtaaaagtcgaaccgttctcaatttttttcatatatagaatttgtatttttaatttctttcagtgtcgtacctgtacaatcgctataaaattgttaaattggtaaaaattgatcaattcgttccggaacattttcacccccgtcagccaacttgccatgccctggccggccgacatgtaacattattgccgagtttatttgctgtacgaacagatggatcgccatggcagaagtgcagaagacggttgatgaagtagacgttggagtgcaggcagcaagaggagttcgttcaactaccccagtggtagtatttatgacagcgatcgatgcacagttactatacctgatcacgggttcatatcctctacggtaacaacactcacgcaaaataatactaagataatataatccacgtattagtgactgtaacaatagtgataatatgatagaggattctcaacccccgatcaccactgacagcatcaggcatgacactgttattacttctagctaggtgactactatatattttatggaatctattgaagtttataataataataacatgtttttctcgtggtttagatgtgttaataatccatgacgatggaaaaaggtttgaaacagtgggcatactgagattcaagaagggtggtggtgtcgtgtgtcgtgtggcagaggcatttaactttggaaatgacgggtttttcgaaagggccagaaaccgtagattttgcagaatctaacctctagtcagatcagaacagcggcgacgactacgacgacaaccaagcgtgacacagacgcgcgggcaatgcacaaaatcaacggccacttttaatactccatctgctacataatctctcaaagaaaacctcacgaaaagagcacgattacgcacgaaaagacgagggaaaaaacacaggaggcttcttgcacatgctctctgaataattttctctgaatattgtttccgtcagagctcgcacgaagctgcacgagaggcgtgatacgctttaatttgggcactgattaaataaatatactatactctatagattagtgtggccttttcactgtttcaggtagtaattaattagctcagctatgaccatgagggtaatgagcgtgagtgctagctagcttagcttagcttttgatatcttttggcaacaagtgcactcgatttcttctcttgatgaataaaacgaagaaattaatggaattacctttgcgtcgcggttaagtcgagcactgagatttgcaaaaaaaaaaaaaaaaaaagggcccggtcaaaaagggacaaggcgaaaatgagcaccaatctgacagtaacaacaacgaacaacaggagtcagttatcatctagtgcaccctttgacaaaaatgactcctgttgcagtgtacatactcatggttcaatctcttggcaatgatgaatctgcacaagatttgcagtggctgacaggtcttgcaaaatcatctactgtcaagccattgcatatcaaagaaaaaagtagtgctagtttttttctttttttaaaaaaagaagaagaaaaagaatcagaaatactagtgggaggagtacaaggaatccaaggctgaaaagaggccaagaaaagcatcataaaatgctagctatatttcagctcacactatcttctgcacacttcccctttgaaaccaagcaggaaaaaaagcttgtcagaaaggaaacgggtagaaagaaattaaagaagtttgagagagtgatgaaaggatcaatttggtaaaaataaaaagagaaagacatttcagattcgattccaacatgacacaatgggtagagcaaaaggccaaaagaaaaggcaggagtagtagtagaaagacagcaaaaaaaaaaattcttggattcagcaaagagataaggcaatgggggtgagaaagaaagaaagaaaaggagaagaaaaggccattgcaccacatatctccccttcttttttcttcttctctttatctggatttccatcccactagttctcagagagcatcatctgctcaaattagtggagtcacattagtggagttgtgacgattgcaatggtggtgttactggtaacattacttgctcctcttgtcattgcacgtgcaagagtgtgtggcttaagcctaagctgctttcacaatccacaagctattgatctcatctaaggagaaagtttctttaatttgttatgtaataaaactatatcaattcaccacttaagtttggttttggaagtatctttttttctatttcagatagaagatctttatgtcattgaataagagaagaaaataaggtagtcagaattgcaaatggaactgaacatgctgaattttcacagttgcaaaagcatgatcagctactgcctcttaaccaaccaaccaaccaactagatatatactagtacaacatgtggtgatgttgatttatccaagtaaaatggattgtaatttgtcaccaaagaaagaacaagaaaaggaacatgctgaattatacacataatggcttgtagcttagcttgtcttggttgcaattgctgctgcagatgatgagatctgttgcaatggaaagagatgacaccaccctctgatgtaccaacaagcgtgttgtgaaagccacaatgctctaaaaaggtttgtaagtgggcgtttactcaggtttggatgatggagaggcagcacagcagcaatgcaatgcaagctgattagtaggaccacttaccactgacctgctagacctaacagtgaaaaggagattaattaagccatccacaagaagcatttgaaactttggagcgagctaatttaaggaggcgtcgccatcagcagccttcggttgattgctgcaacgagcttgagattttggagtaccagcaggagagtaacatgacgtgattaatgctctaatctctctttctctctctctgccttcaattagggagctagctagctacccggccagccaaagtaatgctgctcttgttaatggcaacatactatatgggttcagagattcagagtaggatgctaataggtttgtaattgtgtagtacctcagcacttgaatgctactgccctagatttttatgtttgcatgtacagaatgctggtacatccgattttttttcttttgaatgacctaatctcttaccatttattaccaccaaagaaagagctgctagtatgaaatggtcctggcaggttacttaatctgttgctgaatagtatagcaagagactgggggaaaatggtcctgacagcagcttgcttaatctgctgctgagttagtactgcagcaagagactggaaatggtcccagcagcttgcttaatctgctgataagcactgtagcaggagagtgagaccggccagtgattaaccagcagatgtcgagactgatcatatgcagaaatgaaagatttctgcagagtagctgtgctcatgttcttcagaggagcacatggaatgcagggctagttttcttcagaggtgaatgaaccaaccaaacaagctgaccactgttccacagaaattaatcatgcatggatcggatacaattggcaactaatgctaacaacaatcaccaaattctcatgtgcattttgcaggctatgcttgtgatgggattaaacaatgggagagagtactactactagtaaaaagtagcagtactgaaacagcgagaaagaaaaccctagtgctctgcctgcttgctagctatcaatggcgtgtgtgtgcttgtgtaccaaaaggctgcaaactccttttaaccacaccacaccaacacacaccagcttctgctgcatctgcataatatgcactagttgatgagttagcaaatcatcaagcaaccacacatctatcaacacatgcaaatgcaatctcaatccatggatccatctgcttgttttgttagcattgcacagcttcagggttcatgctgctgctgctgctgtttctctgaacttgtatctgaatctgactgaccacatgaggttggggccactgcaatgtatgcgtcgcatgaaaaactccaaagctagggttggattagaacgcacgaaaccggccatttcgccatcacgagcgagctggctggcaggcctgttttaagggtactactgtttggtgttaaattggacgacgttttagcgagcgattgagctgattgatgatgatggtcctgatcgatctctgcaaataagttttttgttttctcgggcctcacctgtttagcctaattaatgccacttaaggagcaaaaacatacatgctcaaatagtgatcaaattaaaccaaaaggttaaatgttcttttattgattctctgtctcgctaattaaggacagattggtaacaaccaagccgaatttgacttcatcatctcaagtagcgatcaaattaatccaaaagctaatcgaaaacttcagaaagatgtacgtaggtaaccaaattaaaatgccctgcctgcatgcatgtgaggcagcagacatgcatcaagtccaaaagtggtgagaagaggggggttggttgagcttttgtaccaccttaataattttgagaaattttttttttcagtcctatgatggatgagggcccaagcaaactgatcaagtcaagaacatgttgtacctgtttgctgtgagtccaattaatcagcttccttgctatctcagccaaagtgcatgcattaattcatgaaatgcaaatgcaatgggtgtgtgtgtgcgcgcgcgcgcgcgcaaagaaagggagcagggcaacccatgctggccaggccaccaacatgccataactgcttacttacaagtgcaaaaatgcacacagattgtactaattaaaggacatgcatgcagctaagctaaccagctcccaaatgattacccacaaaagttcatcagtctcacacccaagctagctagctactaaaaagacagatgatcgatagtgatacatatacatcatccgtcctaaaatatataagatatataggttaattattcggtgataggatcaaaacagtagttgtgtgttccaatttcaactcttggctgacagaatggctggtgagtcatctgatattcagggatgggctaaatgcaatataaaatactactatgcatgcatgatgcatgccatgcattgggttgctgtcttgctgatctgatgatcacaagctgagattgctgttcatctggatttatttgattggtactgcaggacatctcacatctgctgccactaaacaacaatgcaccagttcagtttgatgcatgaacacagatcatcacaacacactggggtcactggctgactgacacatagacacatgctagctcatgtatgcaagtatgagaagtatggctacagaggttgttggttgtgggtgcagtgcactatggcttagctgtggctggctgccactatcattgtttgaattagggttcatgcaggtacagagagagaggcggcgttgctgtcgatccatccatcgacctgcacgtcttgtagctaattaaggtctctactactctctactgatagagtgagtcctgtgtgttattccaaatgtccatgctggctgtttggttgttgactgttgggtcaacacatggtgcgttgcaccaagcaaattgaaaatcgatcggatcaaatgtaatcggtgcaagtgcaatgcatgcgaacacacggagttgtttgtatcattttcatgagtacacattaagctccgttttaatccagaacagtatttttttatagttttatgggaattaatatttttaaaatcttacaggaattaattgaattgattcccgtgttactttagacgagtgattgaggtttttctgtgaagtttcacgagaattgaactgattcttatgttacatacttacactagatgatcaagtgagtttttttctcctaaatttcacgggaattgaacagattgccatgttacattacacaccctccatcttagaaaaaaaaaacatctagccatatatctgaacatggactatgtataaatacatattgagaaattggtttttgtgtgggagggaggaagtacgagtgagaaggcttccaggttactcaagaatgagggcgacacggacatgggacggcgattcggggtgatgactgatgaagtgatgagtgatacaagaggcatccatccacgagtctagtagcaagcagcatgcatgtcgcggcgggtccggccggccggccgggggcggcggctactgtagcttagctgctcatcactctcacacgcatgcatgcagaggcgtgaggaggaaggaaggaaggcgttcgtctccgtgttccccacaccggcgtcagctgctacacctcccccactttaaggctgttttgtcctcaacaccccagcagctaatctaagctcgccgtttcgttgcgtttgcgtgcaatgggatcgagtgaatcatggatggaggagaccggccggtaccggcagttactacggctttgtttggaggagctttacgaagagtttaaggttggttctaactttttctttttcgattggaggagctttacgaagagtttaaggttggttctaactttttttttttcgattacatggcagacacacacactattacacacgtaacaccgtacttatccatccacgaatacattcgtaatacacgttaaaataacagaaaccaacggtacattcacgatctcaccaagctcatattaaaattttacatacacgtgagaaatattcgtgggcactaggatttaaattagatttggtggttaaagtcatacaccaataatcctattaccacatcactgcaaattctagaaaaatgaattatgggtttgtgtggatgagtttctgacagagtttagattgattataagaatatgtagttacataatttagggagtttttgaggaaggaaaataagaatattgagaagatacgtaaattagttgagtattaattatattaaacttaaaatatattaatatgacttttcaaagcaatgttctatagaattttttttaaaatatatcatttaacaatttaggatgcatggaaggaaaataaggaactaatcctctctattaacgaacacactcttataaaacaaactagtgctggtatgtagaaatcggatattttttgtttctctatattctaatcggctgtttctcataatatctactacctccgaaatatgattggttgagagtagatgatacgtcgagaaagtgtgtatagaaagttatatttggttgaggaaaaaaaagatcgaataagttgttatattttataacaaatttggatgttaaatgttttttttgacaggaaaaagagaatttggatgttaaatgttatatacatactttaggactactacccctcactacctcactagttctgacataggtacggccgggccatcacaaacacgggcccggaggctgagacggggatccatgatggatggatcggatggatggggccgaaacggatggactgttgttagcttttcttcatctcgcaggaaacgccgcccgcacacgcgcacacaagacacatcgtaccgctgctattactgctgcctgccttctacaacgtggtcgtggtcgtggtggtggtggtggtggacgggttttcagatgcaagcaaccgttgccaatcacttgcacaacaaaggagacctccaacagtaactgctgccgatgtttccccacacttttttcgcgaacgcgcaaaaaaattgcacgtcaatgtattagaaaaatagagttttttacatgacgcacttagccagaccagtttacgctaaggaaggaagaaaaacagacaaaaaaaacaagaaaaggaaaaaaaactcgatacgacggcagctctactccaaacagcgggaggaggcagagccactctacactcccaacaattccctaaagaaagcgacggccgctaacgaccacagccggccctccgaaaagatggactctaggaccactgagaccgaagagagcaaagagtcaaagaccctgaagttacgtctaccccacaccccactggcacactgatgtgttcctcttcctccctgcaaaattcatgctggattatcgtactccatctgtccagaaatacaatactacgagaagatggattaagttcatctgtccttgaatataagccgtttttgacaggtatccaaatgcagtactaccgaaacatattacgaatgattattccatatatatcctatttatagcttaattaccagtcaagaagcagcttaattcaagtaatcaaaataaggctccgttagtccgatcggaattttgcttgtaagctaaggctgatgattttacatgttccatcaagactgggagaattgttataagcagggcccaagttaaaccagtgcgctcatggagcggcatagggtgcagctgtgaggcacgccaggtctaccagagtagatcctggcaattcttttggagtgcaggtaagatggcagccctacatcgtgcctgccaacaggattccgacaaactccgaaaagagatgacatgataatagatcgcacatatttttggcgtaaaacaatcaggggtaatgattcaaggaaaacgatgttcccaacaaaaccacaaccagacagtgtgctgattacacaggttcaattctgggattcagacaacagctgagcattatgtgcttaataaaagaaaggatgccgttcaccatacaatagcacccagtgtggcagtatatataatgcagatagcattgataaaacgatcaaaacatagtaataatagtttttgcctcaaaacaataccgggataaacaagtatcaataagtgttgatttatgactcatctaaacctcatcaaagctggaaaaggatatcaggcattgaaaatctgaccaaactgtaacatggaaacaccagttcctctccatgattaactagccactagcaagatttgaagtctgaggcacctaacataggcacgctgccttctgcaggtagtgttggaagacgacccacctcacctaggagcttggggcggggcattagatttggcaagacccacccagacaaccatgccaaccccaagaaccacccacccgaagacatcataccagaagtcgctatccttcttcttcttccttgattgctgcaaaccaccacgttatcagtttggataagggaaagataaggggatcaggcaacagttatacatgctacagaataacgttaaaaatcaaagtcagctagcagttttcatcagaaaatatactcatatacccaaaggatttcagaatcacgagcctgacttgggtatgggttctttgcagggatggaaaatgtaggatcattgtctacatatattttaaaatctaccatgtgaaaattatgccaaatcttctgggatcagatcaatacaatcaaatcaatgtaagtaagataatattacttgggagtatattgaaccaaactactatatcaacttatggctaaaactgaaaacgcttagagtcaaagctttatgctccgagtacacaattgattatgcaggttgtcagaatagagcccagggactaattttcaactttctagcaaatgactacaatgagatgtgtataggccaacaactcaacaaggtagtaagtaccaacacagatatatccaacacaaagagttactgagatccttgcagatagattggctcaattgctcagaacagtaatgacgcgccaaatcaatttgtactgcctccctactactgttaccttattctactagttaataataaccatagtatatccagttcacaattgtatgtggggtgggctgctctattttccacaatacagattatcatctttgttatttgagaaatagtaacaaagccaatatatgctcaggaagaaaatctccaacttacattcatctctaaagagcacataccaatgtaagtgtagccaacccaaaacaggtacattaggaagtaaaaataataatttactaatttgcctactgaaaaatgcttaataagaagatgcatgcaagattcgaaaataggcagcaaacataacaaaaattgatagccatataaattttggaagaaaaaagagtagctgtgcaattcttatttctgacaggtaagagagtaaagtcctgcaatgttaagacagaatacccttgtattcgaggttgaggatgcagcttgtgaagcctgagatgccatttgcctatgaatctccatgtgcagttctggcgcctgagatttgaaacaaatagtgtaagtacagtatgatacaagcacttcttaacataacatctgcatgtattatagggcgtcaatctgtcatgactggagggagtacaaggttaagatgtgaagcagttaggattatgaaatcctttgaaaggtgtagtcagaacttgctgtaatcagagttgttaactagagacctcaaatgttctatttgcagcgtataaaccaatggtagcattattgtaacaaagatcgcacaaatagtgctaaacataaagtgttgtcagcaccttggatgacaaatccaatgacttcctgtaaagatcattcgcaggttcctacaagaaacaggactgtacattagtttccagataaaaaaaggcacttattttacagcaaaagaacatcaggaggctcctgtgacggttttaggccacacaacttcaggactgcaggtcagcctccaccatggaacaaggaaatgtgtttgcggaagcatactagcaaactacacataccacatcaacagccttctggaaacactgggttgccttttcaaagaattcattggccttgacagtgtctgaagtgaagaatccatgagaggtctgtgcatttcccaagcaccaaagcgcatccgccttcatgggatcaattttcagtgcttcctccagcttggattccgcatctataaataaaattaactggatcagtatacttcaatttgaacaaattgagtaacttctactgacatcaaaatacacaaattaatgtgcaacaaaactcataacacatgtgcatgttaagccaccaacaaagtactgttacttcaattgaacagcccagacggcacaagaacaatcaattgctttccattccaatacttgattatgcacccaccatattatcctacttcctagctaaaatgtgatcatactcttaactttaacaaagaatcaacaaaatacatcaagcaaacgaacagctcccagcatttacatataacttgataaaattatgtcagtaggcccaggaaaaactattcagtctgaacaattgggtgaagaatagcattcttctcattaatcatctgatgtgtagtgcactgctggattattgaatgattttgatgaatcccgtcatcatcttctttttttcatcccaaataataccttaaaaaggaaaacatcaaacatgcaaagttgtctaaactcatgaatggatagacaagcaccatcagaaaacagtagcggttcctaaactgcatataatgaaattgaatgcaccacctacgagtgccctaaatgtttgaggtactgaaatgaaaaaccacataaccgtgggtagaacagttatccagtcactaaactaggcagaacaagttgtgattaccttcccatgtcataccagcaggattttatccttttcttattgttaataaaacagcatgacaaattttcctttaagaacattgtaccttttactttaagcaaacaatatattaggtttgagcttttcaattatcatgagaacaaaagtcaatctaattgctaaggattagcttgacttgtagaacacgatttgcaaagatttggcccttccagaccaaccgaatccattaatgctgaataacacacacagaaatctcaatcccattggttacaatagcccctaggaagcatcaactccaacatctctacaagtaaacagtccaaatcaccgaataatccgcacaaccaagtttcgagatctcacggtataccttctaggcacttgaggctctcggggccgttccgcatctgcgagagctcgagcagcgcgcctccccaccgcgtgagattctgcgacgaagaacaacaaagacaaacccaccatcagatcggatcgcgtcgcgtcgcatccaatcagaagcaacccaaaccatcaggaaaagcaagcaagcaatcaagcagagtctcaaaaaggctcgaggcgaggaaggggcttacgtcggcgtcgtgcgggttctgttcgtaggtgaccttggcgttctggcatgccaggtcgaagaagaacatcctctcaggatcgctcatcgctcccatgtccatggcgtcgcgggcgtcgtcgtcggcggcggcggcggcggcggcttccgacgagattcgattcgggggttagggttttagacctctctctctctctctctcgatgttcgatttggggagagagaggaggacggaggaggaggaggaggtgggcgtggagattggtagttgtgggggggggggggatcgcaccgctctaccggagacgctgacacgtgggcccgggtcgatccggccccacctgtcagtgaagtgtaaacccgacgcgtgttacttgcgaaagggtccaggaggaaaatatctcccggcccagcccaccggtggaattgagcccatctggaaagcaatcgtcgtctccggcgagtgcgagagcgagagtcccggcgcgcgaaacacttgtcgcgcgcgaagccattggagaggaaggacatagctgagatcgcggtggcgcctcggaagaagaaggaagcattgcgcgtgtgtggaggaggaggaggtatcagggatgcaggcgaggagggaggtgaggacgaaggaggagcaatggcggggggaggagagggtggtggagagcccgctggggagcgcacggtggagcccggaggcggagatcgggatgagggtggaggacatctgggacagcctggaccagccgcagctgagcgaccgggaccggctcaacagctgcttcgacgccatcccggtggcgtcgttcccgcacacgttcgacggcgcgcaggtggtcgagatcccctccgacgccacgctcgccgaggccgtcgacatcctgtcgcgccaccggatcatcaccgcccccgtccgcaacgtcgacgcccccgacgacgccagctggatcgaccgctacatcggcgtcgtcgagttcgccggcatcgccgtctggctgctccaccagtccgaggccgccgccgccagggccgacgacctcggcgccgacgagctggcggccaagctcggcaccgtcgcgcttgagggcgccgccgccgcgagggcgcccgaccagcagcagtcggcggagggggcggtcgcggaggcgttcggcgcgctgccgtcgtcggacctgttcaacaagacgaaggtgaaggacatctccgggtcgttccggtgggcgccattcctggcgctgcagagctcggacacgttcctgacgatgctgctgctgctgtccaagtaccggatgaagagcctccccgtggtggacatcggcgagggcaccatcagcaacgtcatcacgcaggccgccgtggtgcacatgctcgccgagtgcgcggggctccactggttcgaggactggggcgccaagtcgctcaccgagctcggcctccccatgatacgccccagccgcctcgtcaaggtccgccacgacgagccggcgctcaaggcattccgcctcatgcgcaagcgcggcgtcggcggcatccccgtcgtcgaccacgccggcaagcccaccggcagcatcatgatcaaggacgtcaagcatctcctcgcctcctctgacgccaacagggactacaggtcaaaaaccaaaccccccctcaaaaacatctgcatctcctcgttttcggagtctcgtctttatggtgttgtcgtaggctcggcggcgaccggtcacgcatagcagaagccgttttggtgctagacttcactctcagtgatttttgcttgtgtggttaacgcatggttcttggatgtgctttttgtcgtgttttttttttttacttttatctatcttatacatttggatggtctccttcggtcttcttggggaaaaaaatgttgacagaatcaatcgaattgcaaatttgcaggacgctgacggcgcaagagttcatcgcgaatgcgaggcagagttcaggcgagaagcagatgaacatcgtgacctgcaagaaggaggagagcataaaggagatcatcttcaagctggatgcagagaagaggcagaggatctacgtcgtggacgagcaaggcaacctggatgggctcatcactctcagagacataatcgccaagctggtgtacgagccgcctggctactttggggacttcttcaatggcgttttccctctacctcagaacagcagggtctgaaaaccaaaacattttcattagtccaaattaaatcaggtttcttttttatcacttcattctttcgatccggtccttttgtgtagtatgtgatgtttctttctttgcaatttcctccttttaccctctagaaagatcaccttagtttgtttgtgttacaatgtgactaatgcatagctagcttatcataatgcttccacatgtggaacaccaaggttctattcatgttttaaaaagacgcacctggaaatctggaatgagactctgacaatgccagcaaaattcctgctcatttgtatcatgaaggcaacagaagacaagataccaataataattgatgaaaactgcacccgattacatcagttcatgaattgatggattaggagtcgtagcagaaggtataatgaaattgcaacaccacttcatgatcagagattgacaagtacatgatgataggagcaatgtagtaatttactatggtctccttttttatcagcaacaaactatactgcacataacaaatggctgtattgatataactactggtatgaattgtacataaaaaatgccaagcaccaaccattctttcgatgtcaaacaagtcacgagatgttacaatcaacaaaagatgagaaaaaaaaatgtaagaattacacagctcatggtagtgtccagtgtcctaaatttcatgtcgaaccttgatatagtcagcaccttgatagatcaaaagctaggtatccaattccgattgcttcgcaataccaaaaaattctgtttgcttgcagttcacactgcttcttctacaggcaaaactgatttttctttccatcttcggattatcaaaggtctttgcagatcaagctaccaatatagcgccaccaatgaaattcatgagggagttgtaactaaaatcattgatataaacatccctaaacagaaaagtgatcaggttggtgagcatatttttcaaggaaaaaaaaacatgcctataaaagtttctcctacaaattggcaagcaaaaactaacaaaattggaatattttttttctgctactattaacatgtcaacaatttgcctataaaggacaacatagcatgttaaagccaacccacggtgttagatatcttaaactctggttttcagttaaaatcatattctccaaaaaaactgtatatggaatctatacttctggttcaaaaaaggttgttgtttaagagccattttaaatatgtttatgatgatatacagttatataaatcaaggttgcagattaagaagcataaccaaccatggttcacatgagacattaaaaagcccatcattcagattggtagttcaagagttcctcagatcaatagatcattgcttgattaaattaactaaaaagataacacatatgcctgcagtaattcaatcgttaacaatatgaggacaagatctcatcgaacatttcaagttgtagcagcatacatcccaaaggctaatttgatgtgcagtgcatcactatgttcttgcaaaactaactcccagattaactttaacaacatacaagcaaaaagatcttgactgcaacaccttatagtaatctataaaactctatggaagtgcaatcaggggtttagtactcaccttaaccatcaaacatgactaatcgatcaagcatttggtcttctgccttcaaaaaaatctgagacctgattctccaaatcttcagggttgtactttatataccttgcggaattccttccaccctctagctgacctcggaaccttccaacaaaagaacgatatgctggaaggactttctctgagattgaaatcttcaactcctctcttaattgagggtccacaaccttccatgttgtctgtgtcttgtataactcctcgaatgccaagttaaagttcttgaacctttccttgagtgaagccttgagtgcacttgatgaacccattgtctgtggcaatccatcatctctcagacaagctaataccctcgtccatgaggacctaaggtaccctgtagagtaccgtcttatctgaccacgacgctggcggatccaattatcgccaagcaaggtcttcagctctgaatccttcaccttctgtacaatgtacagcagattgttcatcaaaaatatgttctgaagtgcctcatcctcatacagctttgatttctcctcgatcttggcctgtagatgtgtgatcagtatgagcacacactgccccagtggagtcatattcacgttgtcacctccattttctagctcagtatcccagtccttgagaagttggttcagtgagcggctatagtctgcaagcagtcggacatagttcatgacataccgcgtgagtgggtgaatctccccaccgggcaacgctctccgagatgtctccccctgtattgcatttgcaaactctgcaacggtgccacgcaccgcatccccaagcctcatgagtatccccacagcctcttccttgatgaaatcccttgcatcacctgagaacaagccctcgagctccggcaacacctcatccagcgcctcatacatgccaagaatgcggaacagcttctcggacgatctcttcccgattgcaattgcgtcaccaaagttgagcagctgcaggacacaccccttggctgcctcagtgaagcaatcctcctcggcttcggcatcggcggcaaagatctggttgcagatgcggcgctcctcagcaacaagccccctgacgacgaccttgagcgcctggatccacttcttcatcttgccgtcgaggacgccccattccacgcgctgcacctcctccaggctcatcttgtcgacgccaagcacggcgaggcactccatgagcgtgtcgcggcgcatctcgccgtagacctggcacagctccggcccgtagcctgcgcgcagcatgacgtccgcgatgcccctgagggcgccgacggtgtccggggagatgaggtacggggagatctcttcgtcggagacggaggccctgccgcccgcgccgccggactcgtccccgtcgccggtgtggctggcgaaggaggggcaatcgaggtcagaggcggaggaggcgaaggacggcaccgtgagcgagaggcggcggaggagggaggcgtgcaggtcctccccggcgagcggcgacatcccgcgggccagcaggtggcggaactcgtcctccagccgcgccatcgccgcctgcagcgccgcctccgcgcgcgcgccgcgcgcccccacgaggacggcggccgcgcccaggtaatcccccgcgtccttcgccgaatcgaacaccagcctatccccctcctccggagaatcccaccgctccaccaactccgccgcctcctccacctcgtcctcccgcgcgtcatcggggccggcctcctcctcctccacgacggagggctccctcacggcggcggcggcgggagggggaggcgggaagaggtcggacatgaaggtgaggcggtcgtcgaacccggagagtatccggatcatgtcgtcggcggcgttcttggagttggcgagcgacttgacgatgtgctgcgccgccgcgatcaccttctcctgccctcccggcggcgccgccgccatcctcctctccggttgggatcgagcccgagcgcgacgtcgaggaggttgctgctaccgctgcgaagaagaggaagcgaaggggaaggagaaggggaaggggagaggaggaggcgaaatggacttagtgttagagtcgctaatccgctgagctggagggggtggttttgaatgagtcgctgggtggttttgatgatgccttaatgctcccactaatcctcgctttatcgtacggtccggatttgctcggccggcactccatctccactctctaaggtttatttcccaaacaaaaaaattttcatcttttacatcgaatatttggacacatgagtattaaatatagaaaaaaaaactaattacacagattgtgtgtaaattgcgagacgaatcttttaagtctaattgcaccatgatttgataatatggtgctacagtaaatatttgctaataacggattaattagacttaataaattcgtctcgcaatttacatgtggaatatataatttgttttattatcataatacgtttaatacttcaaatatgtgtccatatattcgatgtgacacataacaacttttcacccctgaactaagcagggccttgagtacaaaggagatggatgatcatgatctcctgtatggattctcttgtcaatgtgttacaaaattttgtcaatatctgtgataacaaatcagttacggatgaaaaaaggtggaatttgagtaaattatgtgagaaaaattgaatagttttaaagaacttagactcatctgtcaagcggtttctcgattcatagaggctcaagaagtctgataactgcgataactgaagcggttaaggttgtatttgttgaccttggtctcctctcctattgtcttgttggtgcttacattttgttctggtcagggtgtgttctttcatgtcaaagaattgaaattaaactaaaacaggtcaggtggacacttggtttgaaattatgttgatgtcattatgttcattgcactaaaaccagccaaagtttggaaggcgagcacatggcctcgtgatcgtattgttcgtttgtcctttggatggactaatcacttacattattccctaaaaacggatcaagactcaagagccaaccaccggtcgcttgaaagaaattgacagaaaaggagtactttgctgtgctgtcttgttctgcatggattccagtagtgaactggtgattgtatgcatcagctctaatccggccatccaggcaatgtcacgctcatgtcaggtttgtgcctttgtgttgatcttgcattattatagttgtaaatgcttggatttgcatgagctggtgtactgcttgctgctcatcagcatagctggagaagtggaaagttggactctgccagtgccagggttagacattctttttttttttttgagatattttgttcatctctgtgatgtggcaaatggtatctgatgttcttcttgatggtcaaccaagaaatgcacatagacagagcagcaaaagtcagtggtttgttgggattatcttttaggtcacgacctcccatgcatttccatatcatagttctttctttgctcaaaaccgcaagaaactgggacaaaaaagaccagtattataataaaagattttggtataatcagcagaacgattatcgatatcttggtctctactggtactaaaaatgatctaagatcttcccctttaagttttgcgcatgcttagtacatagatcaattttgcagtagattaatggaattacagtgcaagctaaaaatatatattaggtatgttccagcaagtcgatccatgtgataagcagataaacaactaaacaaggatggtctgactcggaggaacgttcctttcaccccattttttcaacaacctttacccaccttctaaagtaaactaaaccagaacatcagattagatttgatacttaagtttgtttaaacacaagtgtacctgtgtatgaccccgacaacctgacaaaagtttcatcagaactttccgcaggagttctcatcagaagtcgaaaaccagcaaaatgattaagctatgagacgaaatatttacacataacgaaacttcctagaactaaaaggtacacaaaagtatcaatcacagagaggagtggtatctaatgggaatacattgcaacatccgatagaccgatatgtaacataggtgctttgtgtctttgtattgtcagatgaaaatctgctctacaacattaatacaacttatttgcttccactatatcgtaaaaatcagaggaaaaaaatagttaggatgtcatagaaggaacaaaaaaggggacaaaaatgttagtgcgtcagtaaacctgcgtggaatgagactcggacccattttgattttgatggtgcacaaggaatgaccagcatgacttcatcatatacatcccaaaaaatgtcacttcagccgtcgccccatcgatatgataatatatacacaattcaccaaggttcatccccaccagtctggaatttttaatctcctattcctgtgaatcgcaagattaactgcagggactttgtgcttcacctgcctccatatcatgttcacagcatcacccttcctgggtggattctggaattcatagtgatgagagacattttttagctttgaccagatctcaacccacttcgttttctggatctgtctgagctggttgagcaaataatcaggtcttagagcttcttccactgagaagaaaagggagaactcactgtaatcaatctcatcttcgaaagggagctcaatccgactgctgacaatcacaggaacacaatgactgacaattgcatcaaacagtcggcacgaggaaggagtatccccagcaggatggagacaaaactttgatgatcgcatgccttccgtagactgttaggagtaaaccatttttaaatgtcatgccctcttatgaaaacctcaacaggaaagactttagatcaccttagcacgttcaaaccatagcagaaggcactatacgtttagatgacattagaaaagtaaggtgcaaatgacaaaggccttactgttttaatgccttcacctgttgcaaggctatcctcaaagcgcacaccatccttcccttttagaatcttggcaagtttagcacggatcttcccttcctgaaaaaaaaaaggagccccaaaaaaggtcatgttcttgaaacacaaaagttaggtatttatttatgtcgagagcagttccaacaaaaatagcactgagctaaataggcagattatgatagatcacagagaagggaataattaagttgcatacatctttcctgactgtacgccctcgaaagaaaagcagtgtaggacgatcatcaaatggatcaggtggatcatcgttaaggaaggaatctacaacatgcacatatggagctacaacatctttcctcaaggaagccaattcttttgtgtatcttccaaagtctgcaactataagaatagatgcattcaccatatcacgcaaaaacctaaaagcatttgggtgatgcatgggaatcacatgatcacggcctgcagatcgttgccaatatttagatttccataaaatctccataagctcaacctacaagaaaataaactaaaacaaatcagtgtaattataatgccatgaagttagtttatattatgtagaactagggcacattgacactattatatggcagcatactgcacaccagcaacatgaaaaagtctaaggaggtgatcaaagcataccaattcgtcataaatgatcatcatatataaaacaaccaaattcctgatactcaccataactcagggtagctaattgtcaaacatcatagaaataaatcgatatattgtcatgacagaaaaggaaatgccgcaccacacaacagattactgagcaaagaagagtagacggcatttttctatggtttatcagaatttggagaaaccattattgctaatagcgaggttgatggtgatgtaacaccaactaaatgagagcatttttccaaagctatacagtttatcgcatccacatgtcatctttggtgtgctcgtcttctttgtttaatgattacttgatttttttcccccagtacaattcgcctgttctattgaatgatgtagcatagttttatgagaagcagataaatttggctgctttcagcagtctctcaatccacagtgcataccaaaatgactccaaaaaattaagacatgacagaacaacacaaaatttcgtaggcatgactctgcatttccacaagaacataggccatgccattgcaaacaggattaccagctgaattgaaaggaaaaagtgtgagatttactgcacctggaggaggcggtcggcctcggtctctggatcggtcatgttgcggccgtggacgttgaagctgagcgacgagaagaagggcacgaagaaggcctccgccgcgtcgggatccgtcacccgcaccgcctccctcccctcctccgacgacgacccgttccccccacctcccccgccctgcagcgacgccatcatccagtactccacgctgtgctgccgcctgatcccgcccgccgacggcggccacgcggggaaccccgaggcggaggcgtccatcatgccgacgtggaaccgccgtggcaggtcgtacatgaagaccctgagcggcggggcggcggcggcggcgggcgcgcaccgggcgccgaacggcttgaggttgaggaggaggctcggggaggaggcggcgggggcggaggtgaggtagaggaaggtggttgggacggcgaagacgaggagcaggaggagcgcgccgccgacggccaccgcgcggctgctcggcgacgccatgacgatgccccccaccgccggcgccgccgtaggcggatttggtgaccaaggcggcggcggcggcggcggtggccgcagctattattagtggagatgggaatttggtagcgtcgcaacagcagcttgtgctccggtggttgcgacgccgtccgccatgtgtggtgcgatggtgacgggtctccgcctccctctctctccttgttttttctctttaaaaataaaatcgatcgtcccaaaatataagaacttagtacagaatgtctagatttgaatctagagtatgtttagttcacgctaaaattggaagtttggttgaaattgaaacgatgtgacggaaaagttggaagtttatgtgtgtaggaaaattttgatgtgatggaaaagttggaagtttgaaaaaaaaagttaggaactaaaccaggccctagacaaatgcaaatgccccatccggtcccaagatataagaattgttgtgtttagtttctaaaattagggagatgtttgggggaaagttggtagtttggaaaaaaaaagtagggagtttatgtgagtaggaaagttttgtatgtgatgtgatgtgatggaaagttaggagtttggagaaagtttgctgtaaactaaacaggaccttataatctgagatattttttagtattacgaatttgaacatactataccaaaaatataagaacctaggatcgagtgagacattttctaatactacgaatatgtacagactatgcagattcaaatctggacaaatgtctcatctgttcttaggtcatctgttcttactcgagtccatctagcataatgaatctagacaactatattgttcaggtagactccacctagtttagtttttatcgggacagatggtagggattgagtttgtcgtattagcagtatccgttttcatgacagaagatcgtgctgttactgctgcagtacgatcacgataatcttccggtactttgcttgcattagagagtgagatcatatgcttgcagaagtagcaagcaaagttcactcgaaggctcaggcaaatattgatccacgagaaccatgacagatttgggtagtcatctcttcttcatggcagaaacggtaagaactgtattagtgccgagctattactccattagccgtagatggaccttacaggttacagctccctgaatccccgtgatcaagtttcttttcttaacataaaaattgtttaacacaaggccaacgctacagactgcagcaagaagccaacaacgcgtagacatgggcagattacgttagaatttcattacctctcgattctagtgcatactttgctcctccaaagggatctcaaagccccaaaaaaaatgtttatcgagacactagttacagaatctaggataaatgttatcattagctacgtaactactgtctcaagaaggcacaaaccatatatgcagcacggagtaatcaccggttattgttcaaaacccccacgatcaaagtttttccgagggtttttctttggggtcaaaatcgagctaaatcatgttcaggtcttccattccaaatttccaattgggatttgttgtgttgtttctctgttggaatattcgcttacctatgtagggtcgggtaggactcgcccatgataagaacaacaagcgaagtccatccagtaaaggacctcgcacccttaccctttcctttgttcttctggtcatagttttcccagaagaacccagtttcatggtaattcttcacgatgttcctgtaagaagcacaaaagtagcaacagcaatctattaaagaggctgcaatttaactattttattcagcttagggaagagagagggatatacctgatcaggtttgatcttagctcatcatacagttcctttgccctgtccttgtatggaccatcctcttcagagcagaacaatgttattagatcatcgtgcaaacagtaaaatttacagaagggtaaaagctgaatagttgtttagcagcatctgttatagagtttaccatgtgcatagtggtgtagtcctgaaagaatcatgtagttcatgtttatccaaatggcacctctccaatatgggggatcatgctcagtgttgcgcttcatatatattgaactggaccatggacaacagataattcagatcagagtaaccaaaagaccaaacaataatgctatgtatacattgttatgttgattttaattcattaacaagctcaaacgataaacatttaggtgttgggggcaatgcagacttatacccacttcatcccccgggacaagtcttaccaattgagtattggatcctctaaagaaattacacttttcaaataaataaatgaaatgaaatatctcatttattccagaagtatcagcttcataactaatcgtcttgatgcaagtttaggttgctggagatcaagtaggaaattttgcccatgattcaggttaaatgagttattatctttatatataccttgttcgagaaagtgaccgaagtccgtaatttgtccacaggatagagctatttgatataagatcaagctgcttctcaagaacccatgattcctgaacagagttgaatggtagttaatactttaggggatgagcatcactggattggtaaaagtgagaacaagtatatgtaggtaaagagcatacaggtggaatggcccccatcatgaaagggaacatgctgacataaccgacatgaggtactaattgcagctgagggggttgtaatgtttcacgcaaaagctctcgtctcataacatcattctctctaacttcataccatctcaatcgaacctgtaagaataatattgtcatcagagtttgaaagttatgaatcatgtccgaaaggcaagatggcaagatagaggaactgcaagagagaccttttctgtgtggttaccatagtcgaaataggcaccggttttatcatccaagtgcatctgtaaaaatgccaatactttcaaattactataggataaatgtgaccatcaaaacccttcctgtgacacaaaatgattggcggcaattgataaaaaccattttagttgctatatgatctttgaacgtttgatcaaaagtaagacttcctgacacagcaggcgtttatgcaaagtttattatctttatggcatatataagtatgtaaccataatattgcaatgatcacgaacagaaaaccaagcacaaaacaaaaactattagcttcgtctagtatgtaaaatgttaatataagaaaccattattgttataggcgcaagtgttagtgttggagtatcaagccattaattatatccaaaatgtagcagccattggtggattgatatgcagattaagtatctatctgacctaaaaaggacaaaagctcagaacaagaagaaacagtcagaactctcagagcaataccttgttaagtatcccaaaatctgaaagttgatttgacatcttgtagtaatcctgtagaagttcaagacagatttttttcaagagaaccaaaggctgagacaaagcataaggcacagtccattcactctgcagtaccttctcaagagagctgtctgttttaagaaactctgcaattgagcacatacaattcgtagctaaaagcatccaacaccggaggtcaacatggcgctcttcatcattaggatgagatgcccgtggatagtcatccaaaccagatgtcaaagtctgtagagtagtcagcaacatcaggagtgaacggttagtagaaatgacatagaaagacaaggcaagaaactgtagcgtaggcatgacaaaagctcaaaaacataaactgtaatgtaggcatgacaaaagctcaaaaacaaatttcttttgctattatttgggaccaattagtctgtggaagaaagcaactatgaagtgttccaaaaccttcggattcaactccctggtggccatgctgtctcttccatgccaataaaaggtgccttcgtatttccctaaaaaaaacaagtttgaaagtcaaagaagctatataggatagataagtcgaaggtgaaaaaagttggcatgacaaacaaaaatattggttattccacacatggaaagtacagccaatgttcattgacataacaatcaacaatgtccgccaaaaaggaaaaaaacaatcaacaaggtgatggaaaaggtaaagataacagtaattgcataatttctagctatgtggaatggtggctatagtttgcaatgacactaagctaaattttgcttagcacaggagcagaaggttattcccttcgctaagtaagtttgaacatctcaattgcatggttcctcttgggtggcagtgaattaaagttactttctaaagagtcaggaatttgggttcataactctctcgtccaggaacagtaaatgagtgaaacaacgactactgaataagttgacgatcaaaattattatttcatatagcatgcactgccttgagtgtatgtaaaatatagagtgccagggatatctgaagactaacatcatccaaaactgatgcaaaaactagtagcttctgcaagacaaaacggccagaaaattttgctggtcacaatcctattcacaaatcacaaatatgatagtacacttaaaaaatgataaaactataatttatgatagtactcttttatccaatcaaaccattcataaaatgtgaacatgtcatatttgtatatccaatcaaaatatttataaagctataaatagatacactgactgcatgcatccccaaaatatcacccttttttttactgaaaagtaagatattaatggctcatcatgttcatgtgttcaggcatgtattttctgaacattaattaacataataataggcctaaattaaagtgaagatccaatccatacaaattccatacttgccagaaagagggcaggttattctgtctgcagttattcacaagcaatcaagcatcattggttaccaagttcctaataaatagtatggaccataaaatgtcataacttaactcacctgtttgtgtgctattgaaccactgaaaccaagagttcagccttacataagcccttttaaggaaagtggatatcttttcagattcctcatctgaaaactggtttgcatgtattccacttgccaaatctgtaccaaaaagtggcaagttaaactcaataggatgttcgatcacagtttatgcacttccatacagtagcaaccttgttgtgctaaaccaaaatcgcagacagcgtgaaaattctcaatattataaatttgagacaaacgcactgaaaacagtgcaaaataatgtttttgtggtaacttgattttctgagatatactcaagtcagataatttagatactttgattctcaacagtactgctatactgcatttaatgtgtcatgacagtgaagagcaaggaagaaagcattgtctcaccacgcagtgcaagaaataaggttgggggatttccattggaagggtactgcagaacaaattcctcaggaactttactgcagaaatgtaaaaacagattatataagaactgacactctaaactcatagctagatatgacaatggttcattgctcgccaggggaaccaccttaaagcttcagctcctaatatttgctcccgaggaatccatccatccgcatttattagatctaaccagtgaccaattatatccatcgatatatgcacatcccagcgcctatacatcaccatcaaggatgtgttaaacaagcagcaataataccagcacagattcaaaaaaaaagcgagtgatgatatagtggcagaagccctgcgctacacatcaagatcgatgaaatgcttaccaaatgactaactgatggaagccctcatcccatagaaatccccttgggaagaatgagcgactaggcacagctgtatatagtgcagctggccaatatgggatatatttatccccatttttttgctgcaaggaaactcttgaagcattagattttgtttgagtgtgatgtgtaatcgcctaggatttatatcagatctacaaaagatagcacagtaataagaagggggggggggactaaatcagatagcataaagttcagctgcaatagctattaggaaaaggatctaattatcaggtaacactctaaaacttactgtaaaaccttttggaagtgcaatttttgactgcccatagaaatagccaattccaccaagaagatttgataaagcagcaacaccaacagataattctttgggattaatctgcatcagtgaaacaataatatcaactgctccatcacaaactttcttctgattatgcagccagtcacactacttatcttccaggggaaaaatagcttttaaaggttctttcaactatgaaaagtgtacagacttgaacaaaatggcaaggacactatcatttatacgcaatagcaattttatataatcataggaacaggagcataatgagaagaaaacaactgtatagactgctaaaagaagattgtcaaaactacaaagctcatccaagagatcacaccttattatttgcattgaaaatttggtcatatctcttttcaaaatccttctgttttgattcaagacgagtgctcagaacaggacctggcaacattagtgatataaaatcaacaagcaagatgaaatattgctttcaacatctctgaatttcaggttcaacagaaggaaaagatgcaggcaaggaaaaaaaaggaatggataccaaatgcaaggcagcaaaagaaaaggtcaagagcctatgcataccaaattatggaggacatggtatctatggcatgattgccatcccaaaatgaatagaacaaaaggaaaatcacatatcctatctccatgcagtatgagctatgcagtagagtcacctgttagcctgttaatgcgctcttcaatcattgggttttctgaggcggcccctgacaagaagactatgtcgacttcggcagaacgtttcatggaaacctgtgaagatgagagagagcatagatcacaatgccggaagagaacactatttaaatctgggtgtacgttgactcattggattctcatattgacagaataactttctttttcatctttgacgcacctgatatactattacatttgaagaatcttctgccatgtctggaaggttaaggttcccactttgcattgcctagaaaggtacacaggagcagctaaatggcaacttgagttcataaaaaaaaactgagacttgtttttgaccccccccccaaaaaaaaaggtaaatgtaaggagctaagacatacattagtcgcaagggcttgctgtactaggtcacttagattgtgcatactaattgatttgaatccagctctgtgaatttccaaattttcctgcgagaaaaacacagttctgtacatgtcaatattaacatcagtttatatggaattgtaatgctatataccagtagcgagtaaaatagaaaaataaaaaaatagtagcaacaatgtgacgagcatactgaaatatgctacctcagatctcaaatagactttccaatcaccaatctcctcacgggatccagatgccaaaagaacatgacctcttgacgaaggtatatgcgaatccatagtgattgagttccctgcttcatccgcgatgtagaaaaacaggtgtgtggtgctttcttggtcttcacttaaacttggcctaaattaagtataactacatggaataaatttcttttggttcctttggtaactttatataggtagcaaataaatgattgttaatatcatcctggtttgtgaatagggaatgaaaaagtcaatccagtaaaatttattggtcttttcaccttgtacttaaaactggaaaattgtttacatctcttcagtaaaaaaaacttttcagttttgtaactgacaaatatacacttacccatcagtcttcgcattcaatcgaactgcccaatctccaccataaccgctaccctctcctttctctttcaggaaactcgtggtcaacaacaagccatgatcaaccaacacttgatgtccataatccctcccattgtgatctgtccacccatatgtgctaagctcatcagaatcttggcaaacatgacgaagaaagtattgcccattctttgcaccaatccacattatcccagcaattagagacaacggggttctgaaatagaaatactattagcaagaagttgagagtgccaccatatcatcatcatacagcaatagaattccaactatgaggtggtaaggtggcaacattctaaaccagaaacaaaaacaatacgcattcaaggaatcaagcaggaaatataacaacatctttgttctcgacacatatggactaagcaaatgggaacaaaactccatagaagtgtttaaagcataaaaaacatatgatgctagcaatatgaacttccctgcatatttctagcatgccatggtggactaagagaactgaattgcttaaattagcacgctataagaatcaaggggaagatcaaagttaagcaccttgcacgaattccaagatatacattcggcctgtaggtaccccaatacaagctttccttgtgatctccttggaactgtaaacagtcaactatgagccatcagaaagctaaccataattaccatccaaactcaacagtatggaataacatgatgttacgtataaatcaatcagaactagcttacaggaggatatttaacagaaactggtacattttaggtcgtctgtcctagctcagatgacatttgcggctatgcacaattcatattcattttacctatgacaaaccagtcgtatccactatgtggttcaaacataaagcagcccttgtaaaatccaaacaagcagtggtcgattccgttattctcctagcatttttacacaattcaattaagttcttaactactactgttgcagcagattaagcagaagcgcactaatagactacaaccgcgcgagattgtaatctaaagctatttcacagagcattggaggcttgaagaaacaatgcgacgaacttaatggtcatcacctgaggcagatccatcatcctgggcgcgtcaagcggcgtgacggagcgcacggccctgcgcagaggcgtctcgacctccccatccgccttaccctgccacacgccggtatacaccacgaaggcgacggcgaggagggcgacggaagcagtccctacaaggaggaggttccgtgggctcacctccatgagccgcagggggccatggtcgccgcggccacggcgccgcgctgctgctgcggcggcggcggcggcggcggcggccgcccggcgcgcgtccggctctggacctgagcggctcctggcggcggctacgggtcgccggacactgctgctgccgccgccgccgctcatcggagaaaaatcccggcgatctccgcgtctctggttggtttggtccgaggactcgccgccacttggggagactgagacgaggggtttgggttgtttctacactagtcccgtctttccgttcgataggcgtaactatcaaaatacgccttccggtgatggatacgagtagttccagcttgaaatgtaatttgggattacgccttccacgcatcgggtgagggaaaattgaccatgttcagccgttcgggcctcgttttaatgggcctcagtatctcggcccatccacatgtggcctcaatccttcttggggcaccacgtggataggccttaatggtcttatctaagcgaggccttcactgctgagtactactagtttcttttttttttttgcggggtgctgactgctgagtactagtttctgttcactatattcgatgattttttttagaaaaaatgaatcgctgttaaaatgaagattctcaatgcttgttatcaatgtgcatccatcatgtttcatcctacttcttccgtttcacaatgtaagtaattctagcattttccacatttatattgatgttaataaatctagatagatatatatatctacatccattaacatctactaggaagaaagcccgcgcagttgcgcgggcaatttatttattgtttaaaaaaaacctaaaaaagcattatctcaccatattcactataagaaataaaccataaattttgacatactaaattataataatgtccatcatatccaaacaaaaatctttttgccctcatctatcaccactacttattatcgttgtcttgaaatatagatattttttaatagttagaactgcatctctatccacaaataaacccaatacataattaataccatataaaattcatatgtacttcatacgcaagtactcataccttacaggtatccgaatctatatgtaaatatttaaaaataccacatctaataattaattaatatgataaaatcattaacttatatatgaatatccctttaataaccagtgaagccgactatagccgctaagccttttttctccaatgccttgattcatgtgtcccttattgatatagttgtgctcctcaagacaagcttggagcactattttataaaggattgcatcggtaagtaggctagttgagctctattatcaatggtgacctcttactcggaccacttctgctcaataatgcgtactcttgccgtagttactataatgtagccagttgaggtccatgcttggcgccctttagggtatgagtaagagaaaatacaggtgatgaaaatattttttaaatgttttgaatcaatttattttatagagtatacataatttatttatggtgttaatcgatactactaaattttaaattttagtggtacatatataattttctcttttaaagattagcagagttgatcattggactctactttgaaaaatccaatagtttcagtggtgatgaccactaaaaaaatatttggtcaaattgtgatcttttgctaacatacaagttaatataggttttgattttttttcttctattatacatctaatttacctatgcatattcatgggactaacattcaatgaaatttgttaaaattatttgtgctaattgttaacactatttgtagagaaagacataaaaagagatataatgtagttacatctatgtttttttttctagagaacagtagtctctcgtgtggatgtttatttttccttttttttttctttttggatgattatttgtcaatcataggaatatgatgtacatttttctattcatagtgtgcatctgcatggatttatatgagctcatgtgatcgccttttacattgttagtaaataatactttaaaaagtttgacaggaagagggtggagcaacgggtggcatgaggtggtgtcatggtgtggcttattttaccaccttgctagaagtggtcacaacatctatgctcaatttagaaaataaaccttatagtcagaacgaatgagaaaactaccatatgggacagccatatacgcactcttctttttttattatttttatatatatctagcgtatgtatgtacatagaagttgtgtatgtacgtaaggagagattagacggtttttagatagagagattattgtcatagatctaatttaatggttgaaaataatggaatcgctaattttgaggtgtaaatagatgaatagttgtttttcttttattttatagttttcctagatactctctaattagagcgtcacataacatcttagaagcgtttgaaggagtatagaaattctattacccatagtcacaatctacttgtagtcaactattgtttatggtggattatgcaacctctacttgcctatcatttgttgatcgttgcacacttagtattgtcctttatcttcggtgcttgacgacatacatgctcattagatatcagttaactgttaggtgcattgtatacgaatatcttgtaagtgatatgacttagtgattagtaaagagtgacctatatataaaacttacatatatggggataagtgatgacatgcgattgatattttaggctaggatattgaccaattatattgcgtactacatattaagtttttaatacctaagtaataaatttaaggcagtgttgtaaagtgcttataggattaactactccctatttatagcgagtacgtttgtcaaactactatacggtgtattacacagtacgtgttttacaaactttttatataaaagttttttaataaatcaaatagattcatttgtattttttaatatttaatacccaattaatcctatgctaatgacatgtatcatcttgcacgtcctggataagcacacctaatgagctaaatcgatttaaaccacctaatgagctaaatcgatttaaacctaagtaggagataaaagacatcgacacgatttgaaaagaatatatttgatccttaatttctaatgatatataaaaaaagataactcacaatacgtgaaaatatattaatgataaatttagtaatattattttgatatatcaattatttttatagtagggagtgagtaattttgggaaagagtaattttgggaaatgttactcacaactgaagttgttttatttttaaaaatgtaagtctaatttcactatacaacatacaattatataatgcatattattcatttatttagatttttatggatgttttgatgacgtgcgtattgtagaatttaactcaaaatagcatatatttttacaactattagttgaaattattaatttggtttttatctcatgagagagaaaaaaaagaaaataaaaaaataagggaagggggtgggcacgtatgaggtatgtacgtacgtgcacgtacaggttcgggagggattgttatggacgtgcagctttttaaagataaatctatttggtattttagatctaaccgttaaaaatatggacccaccgaattaaatgaaaatcaatggctagatgttttttcaaaactttataatttattaaagtgccacttggtggcttaggagcgtttgtagagacgtcatgtggcggtttaggagtgtttgtaggaagtttaatggacttttaagtatataatagatatgaatgtgggaaatgttagaatgacttacactgtgaaacggaggaagtacatgttctgcaatgcaatatttcgtttgctaacttggttaaaagttcaggtaatcgagcacccatgacaaaagcaaacacaaaatgagattatcctaatccacacaacgccaaagctaattaaaacataggaaataaatcatcagactaataatgtgtatgcgtagtataatgattttttttcaaaacacgaaataaaagtaaacgctcatatacaaacgcgtatactcattctataaatcatttattttataggacagaaggagtatcactgtatcacacactctgtatgaatggctccagtctccagagagtgtcatattgattattggcgaaatcacccccatgtgcaaactatagtacatcaatttaatgtgttcagaactaatactactccctgagatatgaacaaacagagatgaaattgaacgaacaacatggggagaggcttcttccttccatccatcgatcctccaccgtccgtcccacatgccatcccaattctccagggcaatcaaacctcgagcacgattcaagtataaccccgagcaatattaaaatctacgacctctatttcagattataagacttcaaattaaccgagtttataaaaaaaatagtaatattttcgatccaagataaatttattataaaaatatatttaattattaatttaatgaaactaatttgataatgaaatatttctatatttatctatatatttagttaagcctgtagcagtttgactttaacgaaggtttaacccatcttataacctgaaacggagcgattatttagcttagctttgtcagcacgaatcagtgtatgcacttgccgccctcgaacgtccagccgatcttgcccatctgccgctcccaccgcggccgcgccacgtacctcctccagtcccggatcacgttcctcaggtcgtgcagcttgttctccagcccgatgcagcacgtcatgtgcacggtcgcgatgcggttcaggtcccgccccagctggcagaacccgctcaccgccgccgtgtcgatgaacctgatcctcacgccgacgccgccgccctcgcctgcgccggcggcgagctcccgcttgatctcgttgaagacgaactggtcgtgctccccggggaaccggcgccgcgccgcgtgccagtacgccatggcgcgcgcgttgcgcggcgtggccttgaagtagatgaacccggtgttcgggtagttccccaggtcgtccgggtcgccgaagtagaagtcgctcgacgtcgtgatgtccgccgccgccgtgatgtgcaccatcgggttcctgaaccacgccaggtcaacgtcctgccaatgccaacgcgcgtcgtgttcctcgtcgtcaacgcctcgtgtttctcccacaatcatggacgcctactagaattgacgaaaagatttatgtatgggtggagcttgccgtgaagaggaggttgtagccgagctcgaggacgcgctgctgcagcttgagcttgctccagacgaggtcgaggtagtccttggtcatgtagctcttggcgccggagaggtcgaggccggcgacctccgggagcagcaggtagcagtgcgggtggatggcgcggcaccgccggagcgcgccctcgtccatggccaccaccacgatgtgctcgacgaaatgcgagatgttctcccccaccctgaagctctccaggaacgagtccatcagcgaccccggcgccgcccacgcctcgttcaccgacgtcatgatcaccgtcctgtcctccatcgccgcccgccgcaccatcctcgcgaactcgtcgtcgtcgtccccaccgccggtctgcgtgcgaaatcatcacaattcacaaattagttcatcagttcttggactcggctggttaacaatggcgcatatcaagaacagcttacctgattagttcttgctgctctgcgcgtctctgaatctatccctttcgcccgtggagcgcaagccacggcggcagccttcttctcctgccttgtcgccggagttgcctccggcgtcggccacgcgggactcgcggtcgaggtgaagacgaagacgatcagcgcggtggccgacgccgcgccgaggaggaagacgaccaccggagataggccattcttggagctcgccatgcctgcacttcctcgcatgagcaaaaactctgtaatccgggaggtcgcaatctgtatttgtacactgctctgttgcaagagcttgacttttcatggaaactgacagctgccagttcgtggacgccctccaactcccatgtctcctgcaccatcaccgccgtctcctagccgtcgatcaagcgatggaccgttcagatttcgtgagaaaaaacagacgaggattgagatcatgagctgatgtgcgtgatcaaattattctcatcattgaggcctagagatcctcttttaatttgtagctgcagaagcttcagaggatatgccacccgaaaatattcagacatcgacatgcacgcatggttgttgggcatttttgtatgccaagaactcataaagaacagagatcaaagagatgtttatgtcttgatagccgttgcaccatcctactactattgattgttgcaagaggaatgcacataagtatttgtgtggacacaagtgaaaaatgcatagagatcttccggctagctctataagatgatgggctagacgccttgggttcaaagcctcatttttgtaattatttgatataagtttattccctaatattcacgtctttttatttgtgtggacacaagtaacacaaccgacacagcaagggacagatcctctatccccattgaccattgataggcagtgtgaattttgggtgacctcacaactgaacttttctctgtatatgaacagacgacactgctcaaaccacatagagtaacaggctgcagttctgcacatggtgggataaggcaaaagggcaagttggtcactaagaaaaccgaattgacctgtgtaattgaagagcaggcgaatcatggaagaacaaatcatttcagtgcacatattagaaggccaactgaactgtcagatggtccctctgaaagtcactggaattgaagcgtaagaaaatacagctgggttgagaaattgatcgagccatttcttattatttttccagcctcacatcacactcgagattctggagataacgcaaaataatttagtcgagcattttctattcattttgtttcttcacgtcacattcatcagttcagaggaagtaaaatgaggttgagttgggccttttgtattattgtacgtttcttcacgtcacaatcatcgatccggagaagaaagcaacacaagagacagagttgacagaagcttgattaccagcctatttgatttcctggcatccatttaattggcaacaggtccctggaactggaagaatcggaagatgacccattattcaaaactgtaccttttttgcctccataaaatgattaaagtagccagcaccactatcagaattcagaatctgtttcttttggaaaaaagatagtagtacatgccttcacagacttcaatccaaacataaaatacacatgcatcttctctctccaaaaaaaaacttaacctacgcctcttctaatacaatgaattcggataaacctcattcgtagtattaggagggattacattcctcgtaggttgaggttttttttgaaatggagggagtatagttcaatactagcacaagtacatcagaggcatcatagtttcccttcatctgaacaacctctcatttattcagatttattccagaatagctcagttcttacattgtcctagtgttaattcaattgataattaaggttcattgtcgattgacatatagttcatacaacaacagaatgctgcaatttcagtgacatcaaattagcttcaaccattaattctcttgacaatttagggatgaacaggtttacgccatccaatcgaattccggcaccgggtggggtacgtccacttgaaaccccccttcttcctctcctccggcgacatgcccgtgtagttcttccagtcggcggcgatgtcggtgaggtcgtgcaccttggtgtcgaggccgacgcagcagtcggcgtgcatggtgacggcgcgggcgaggtcgtcgtggtactcgcagaagccgccgaagtagagcgtgtcgagcggctcgatcctggcccgcagcttggcgacgagctcgtgcttgatgtggccgaacaccgcctggtcgtgcgcgccggggaaccgcggccgcgccgcctgccagtagcggagcatctccacgctctggctcgtcgccttcacgtagtagagccccgtgttgagcgggttgtccagcggcgcccgcgccgcggagtagtcgtccgacgacgtgctcatgtcggcgtacaccgcgatgtgccggaacgggtcacggaacaacaccatgtcacagtcctaattaacatggtacagaatcaattcagcaaatcgatcgccattgatgatctccagagctcaatgatttgctagatttggaagtggatttttgtccatcgaagaaacatcctctcattttgtacattgcgttcaaaaagttattaaaaaaactgaaaaaaattatcaagatatatcaatatatgatatatctttttgcaaacatacaagttaaaattcgacttatacaattcaaaacaaaaaacaagaagtttgaccgtgttaaaattgcgtgttcttttcatagtcaaatttgttaattttatttttattggtataagttgaatttgaatatgtatgtttgtgaagtggcatatcatatattgatctatcatactattttttttaattttttgatgactttataagtgacatgcaaaaacgagggataccccttagaggatgaatagttttttccattagatttgtacattaccgtgaagaggaagttgtagccgagctcgaggacgcgctgctggagggagagcttggtccagacgagctcgaggtactccctggacatgaagcgggtggcggaggtgaggttgatggacttgacgtggaggaggtagcagtgggggtggacggccttgcagcggcggaagccggcggggtcgacggcgacgacgaggacatggtcgaggaggtgggcgatcccctcgccgttcttgaagctgtcgcggtagaggtcgaggagggaccccggcgccgcccacgcctcgttcaccgacgtgatgatcaccgtcctgtcctccatcgccaccttcggcagcaactccggcaagcccgggaatttctcctgcacagggtgccatggcccatgggctcgttcaatctacatgggctgaacaaaatctgcctctggatgatgggctcaacagctagacaaaaaaagcccactagaaccagcagtttgaggtcgggataaattggcccgttactgcacggtgcaatctgccgacatatcctacgtactacgtacgtgctcaacaacgtcacgttataacaacgtacatatccgaaagactttcatctgaaaaaaattcatatgagaactaacaatttcatacgatatgaaacttgttgtagcaaaagaacaacgtataaactctctccagaattagccaagccataaatcaccaaattaaggggttttgcccgggcacaagggcgaagatagattcgggtgaaaatacacaaaaggaaaaggtgatcgcgcatgcatgtaactaatgaagctggactaatccatcaatttaatttgttagtttcttacctgttgagcaggaggaggagcagcgtcgccaccggcgcctctgagatcatgatccgccgccgccgccgacgatgatccaccactcccccagctcgacacgatcgccagcttctcgctcaccctgtcggacgcgaggaagaagagcagcaacgtcggcagcgcggcgccggcgaggaacgacacgacgtggttccggttgatcatcgccatgccgccgccgcctcccaaccccaaccccatctcgctctccctgctgctctctagagtacttgtgaaaggctaagagaggaattatgaagagcttagcagcagagctgtacttagctagctaagctaactactgtttcattgccacgtactcctactacttaaactacgtacggttctcgattcaacgatggatatatgagaatctattttgtcaaaaggatcgacagtgggattggccaatagctaggacgatcaagagagcccatcggaggaaaaaacaaaacgatatgtttacaaataaaaaataatttgtaaatacaaattttatatacatattcttaactatcaaaaaaatattaaaaaataaactacgataaaaaaaagtcaaaaatcaactttaaatttaaaattcaaagtataaacgaaaagataaggcggtaacactaactaattaactcgatggctttgacgtcaaaatcatcatggctacgatgtctggatttgcgtgtattttctcactttcttcctcctcgtgcccgcccgcggtaattaaacgactcagcgcgctctgccttttgagtgttgattaggtcatgtggaatttgttttcacctctgtcaagagtcaatggtgtaggtgatcaatgtgaagacttctcttaatccgtttaagtcgtacacgacgaagagtatacaccaatgcagcctccggtttggacttgtatttgcgcagatcacctgcgctatatagagattcaactggatgcacgagggcgacgagtacaatcacgcatagatgaacaaaaatgacaaagggaatgtttggagatctttagattctaattaagctgccggtgaaaacccagcttgtgagaatcaagagaaagcataaagattaatttctactccgtagttcattttttgattgttcaatgacaatttctcaaaattttaaaaactgaactatttggatgaatattttttattttatgagaagcagtataatgcattcgtcctaaattagtgtcgctttgattttttttaacgtttgaccattcgttttattgataaattagtacaaatgtaaaaaagataagtcatacttaaagtgcttttgataataaagcaagtcaaaaaaataaataataatttcatgattttttaataagacaaatgatcaaaagttacaaactaaaaacttaaagcgacaagtattttgggacggaggtagtagcaacaagactaaagattgggttggagtgaaaaaacaacaattgacctccggtgaaaattaatcagtctgttaattacaaccattgactcagtagtattatatttaaccaattaaccagtttgttagctaagctagttgccggaattcatgcagaattacagatgcagtaagagtagagatatcacggaagtggatttttgtctctcccggaggcacccgtcgttttgtgtataacatttaaaaattattcaaaaaaaattaaaaatttatcaagattgtcgacgtttgatgtcacaattccggtatttgcatagtatggggatcgttggtactaggatatacgtgagactgagataaaagagatggagacatggatttttatacaatgttcgggcccctgaattgtcaggtaataaccctacatcccgttggccgaagccggtattgctcttattcaccataatcacaccagtacaatatttggggtagcctatctaactgttgtcggcatggcggtctgaaggtctgactcgtggtcgacaacagggtagtcttccttctcgaatccgtgcccggcgagatcagagacatcgctagatccctacggccggcctctgaaggtaccagatagggtcgatctaggcatatctctgatgtcgatatccggcgacttgtcttggcgtatgttggcttgtatgttgtggcttatgttgttccgtgtatgttatggtgggtgttgattgtcccccatctcatcgtatagggccttgtatttatacccataggtgttcccttgtacaagtagaactagagaaacaaatatggatacaatctaagtagtccttatcgtttccatgtagaactctagttgtcttttcttatccggaactcctcctatatccgcaggttgtttccgtataattcctttgattcaaaggggccctaaaaggattcttaacatgaggtagaacctcatgttaaatttcctccaaaacttgcatgggaataggtattccataggaattttatgggattacataggattcattcatttgattcaaagggatatataggaaaaatacctataggaataaaatcctttaaaattcctatgaatttcctttcaatcaaagaggcctaaatatttaaacattaatgtttagaataagattcgattaaaacgttagatcgatttagtcaaagaacaaacaaaaatgataaagtaattgctaatcattgtattagtaaattactaatttacccataataatactggtagaaagcagcggagcatcactcttttcataaataagtaagtttaaatttcacctccacacattgtaaaaaaattactacgaatatacacatgctattagttgaaatttaatttattcgtcttgtcataatttgtagatattgaatgtgagttatatttatgaagtgatatatggtatattaatctattttgttataaaatattataactatttaagtgatatgaaaagagaaggtggtgtcgtctcgagagaaggtgatatgaaaagagaagtttccattctcggagcgattccgagcgaatgagagctaaaatagctggtcgatcattcaacctccattttgccaactaaatctagctagctgatcgttcgtttcttctgtttattttccccaacacaatccatccgtacttataatcgtacgtgcagccatacacaacgtggactatataccaaccttggcaacgcataatgaagagcttgcgagccatcaagtaaaattaaaggcgatcgatatgtccacgcatcatgcacgtgcatatatatgcatccatcagcaagaatacgtttttttttttttgttcttgttgttacctgttgcagttcgtgatcagtaagggcagcaccgtcgttgtaccccccatctggacacgatcgccagctgctcgcccaccctgtcggaggcgaggaagaagagcagcaacgccggcagagcggcgccggcgaggaacgacacgacgtggctccggttgatcgtcatgatgctgcctcccaatctcaaccccatatatatctcgatctctctttgaaactctaaccaaatgtggctggctgatcgatcgtgatgaacagataagagagagagagagagagagagagagagagagagagagagagagagagagagagagagagagagagagagagagagagagagagagagggcgcaataagaagcttggcaattgtctccctgcaaatatgtttcgtctctgtttcgtgcatggtagctgggttgattgaccaggccatggattactttgtcaaaagatttttgtgattgatcaacaaggcgactccatcatcctgcatgccgtttcgctagctaggcggcacgttacgcaactgcgtcagcgtgtgcatgtatttcttcattacaatatatatacccgtcattaacccaagcaaggccgcacacatttcctatccctttttttttctaaaatgctggagttctatttattcgaactgtccaagatttgtaacatcactcccttattttctaaaaatgcacatagtttaccagcttaattataaactacatattgtgaaagtatttcttacacgtgaacctaagaatataaattttatgacgttaaactatataagtttctaaatttatcctggaagcaaaagaaaaaattatagtagttccttttagagtaaacaatatatatatgagttggagtactattttctgcacgtgtattttggtctgtttataccatcagaagaacagtggcggaggccccccctcccaataaactattagaatcccctttaagacatcctaaaatttaaatccatatatctattgtaggggggttaaaatagactttatctgagattgttataaggcccaaaaggctgaggagcccccactataactttatcctggctccgccactgagaagaagaaacaagtagcttccggttcagacttgtgctaaatattattttgacaaaaaaaatataaatgttgggaaagtacgcgtacataaagagtcaaaacctgcaactgtgacacattcaaccacattgacagattggagcaaaacccttgataatccacggctaattattaacctatgtatagaataattaatctttgaccattcccggacttcatggtcagtgccgtttcaacgacgccttgcacttggccgggaacgtccacctgaacttgttggcacccttcttctccggcgacgtcaggccggccgtgtagttcttccagtcggcgagcacgttcttgaggtcgagcaccttgttctccagcccgacgcagcagttggcgtgcaccgtgcacaccctgccggcgtcggggcggtactcgcagaagccggcgaagaccgccgtgtccaggaacgtcgaggaggtagcagtgggggtggacggccttgcagcggcggaagccgccggcgtcgacggcgacgacgaggacgtggtcgaggaggtgggcgatgccgtcgccgttgtggaagctgtcacggaagaggtcgaggagggagcccggcgccgcccacgcgtcgttcaccgacgtgatgatcaccgtcttgtcctccatggccacctccggcagcagctccgccaggccggggaatttctcctgcgcatgtcgcagatttgccacgacgacacgtagcgcacggatggtcaagttgggtcaacgcaatatggagaatttttttcctttagaaaataaccgaaatcccgagtagcggcccagttgtggccctataaacctagagcctacactgccgaagaaacctggactaaatgcaaggcccgcacaaactctctgcttgttcaattacaacacaaaaaagatcggtttcccccctttttttttgacaagtaggaataaacattttttttgcgaggggaataaacattttctacttgggttgaaaagaattggattttacaaataaccatatttatagttggtatttggtacccactaactctaagctcaatatacaggtatggcatattatcacccactaataattattatctattgtattttaaatctcatataaatatgacatattatttataattttcttgtatttttagaactcaacattatgtaatagaataaaatcccggtctttgctcaacgaggtacaaccaaattcacgcaaactagcgcacataaacaagtcttaaaaaacccaccagcaaaagcttaaggaaacacgagctaataatcgctcacacgtgtagtttttattagtttaatgttctcatcacacattcctagtttagcccataaccaaagctatgtcaaatcatcatctctacattgttttcatgaaatatatacgttctattttgcaggacacacattcattcacatatcttgcaggaaataaagcgcgaagtatgaaatgcttttatacaacacgggtgtaaagtgcaaacggtgtagcaaaggatgattatattgcccgtaaggccgtaactccgtaagtgtaacatgttaacatcaataatgttaaaaagaatgaaatcacaaaattccagcaacaatactaatctgcacagagcttttttccccactgtaacagcagagataaaatcgatcaaaccttttctgctggggcaggtgctgagccatcgacgcctgtgaggtcaccaccttctcgagcagtagcacggccaccgatcacgagagctccattgcccaagctcgatatggtgggcagccgctcgctcacccggtcggaggcgaggaagaagagcagcacggtgggcagaacagctcctaggaggaaggaggtcaggtgatggtaataatggccactcatgttgccaagcgccaacaacccaggagggaagtacatggggaacagagctccaatatatacggaagcaaatgctattattcatctgatatctctgttctaaaattttagagaattttgatcatctagttacagggtcaaaatctcctatgtttttttttaaaaaatctcttatgttttcctatattttttaaataaaaagcctcttatattcgaagacagagtgtagtacttattagatatacaagtacatcaatattaattttaaagtatggcgtttgatcatttgttttaattaaatttattaaatgaagtattatttatcttgttatgatttattttattattaaagatactttaaacatgacttagaatttctttcatatctgtacattcagaatttctttcatatttatacattacttttctataaaacggatgaattgtcaaatataacgtccaaaggtcaatatcgctgtataattaaaaacagagcagggttccttccaaacgacgaccagatcggggacttaatttctcgagtgcacatttgacttggaaattttgcctttgagtgaagtgtcaatctgttttctccagaatgaacagtatctttgagtgctgatcccgtaacacggctcggtatttttcaatggtggtctcgacttactctgaaaccggttatacaattatctgacacgtggccctggattcgccaacaaacgcttcgaagctaagcgtgaaagaaaaaaaatgagtagtttacatgtatatacagcgtcgatctcccggatcacgggcgtagttctggagcctagcgcttgaagcgtaagatctccttaagaaaaaaaaatagtgcccaagtatgtacatgtagactgtagtattatccggaacgcgcacgtcaatatattatcctccattttcaaataaatgttagtagtaactcctaaatgatcaaactaagacgaacaaaagttccatataggatggaataaactttaacaatacactagtataattttgtagttttatttttttgcggaaaaagagtgatagaattttagaaataatcaatgttcggcgtaagttatttaaaaacagaggagggcatgggtctacttaaaaaaagttgttttgtttttattaaaaatattagtatattttttttataaacttgatggaacttaaaaaagcttaattaagaaaaaaaatcaaatgaattataatatgaactgattgagtaatttaaaatggaggagggcatgggcggacttacctttcatatttgaaagatctatcaaatgacaaatcaatttatcagcaaattagctgcatcatatgtcatcttttcaatactacaaacagcgcaacagctatcaattccttctcgtttgctagtctccctgaattacaggcgccgccgcggcggcgcgccacaccggccgccggcccggactcatcccctcttgtccggcgtcccgcacttggccgggacgctccacccggcgcggcggtcgccgccaccgccgccgctcttcttcttcctcccctccggcggcgcagggctcgtgtagttcgcccactggtcgagcgcgctcctcaggtcatggagcttgttgccgaggccgacgcagcagttggcgtgcatggtgcacgccctcgccatgtcgttgcggaagagctggcagaagccgccgaacacggcggtgtcgaggaagcggacgcgcacgccgaggccggcggcgagctcgtgcttgatgtagttgaagatgttctgctcgtggttcggcgggtacctcgcccgcgccgcccgccaccgccgcagcatctccactgtccggttcgtcgacttcacgtggtagaacccggtgttgggccagttgctcaggtcgtcgccatcgccgttgaacacgtcgcacgacgtcgtcatgtcggcgtacaccccgatgtgccggaacgggtccctgaaccacaagatatccacgtcctacaacacgaaatcatcatcgcaccattagctgaatcgatcgatctttgagttcctgattagaagaggaaactgatacatcttgctaatttttcacgaacacgtaaaatgattgcatgtcaatatattagaagaaaagagttataattatacaacgcaattagccaaaccggcttatgccaggggaaaggagaaaaagtaaaataaaaagttgaagcttagaaaacgatacatcttagcgaggttgatttgatcattaccgtgaagaggaagttgtagccgagctcgaggacgcgttgctggagggagagcttggtccagacgagctcgacgtaggcctcgctcatgaagttgttggccgagctgaggttcatggtgtccaccttgaggtggtagcagtgagggtgcacagcgcggcagtggtggaacgcggcggggtcgacggcgacgacgaggacgtggtcgaggaggtgggcgatcttctcgccggcggcgaagctctcgcggaagaggacgaggagggagtttggccgcgcgaacgcctcgttcaccgacgtgatgatcaccgtcctgtcgtcggttgccaccttgggcagaagctcagctaaatctgcaaaacttgactggaatattgaaatccaaattaagggtgtcgattggagatgtaaaaaaggataaattcttttgaagtgtagctattcacttcctaaatgagaactgcagtacaatttttgaatcaatatttgagtgttcagagtttcttcagaacagtacttgtgtgttcagattatataggcatcatgtctacgtggagcaagatactgttttgctggatcggagtaaatctctatttgttttcttgataatggattatataaccccacctcttcatcctaaatgaatgtacacggctaacagttcatttctaggaagtaggatcatgactgttttaatgagctagctaactgtgttttgtgaagggaagtactgtactgaatcttttcagcactatttgagaggtggcatattcacatatatatgatgaaagcatcattattcttattaagcacaaaaaaatgactatttgaagtggtttccgtacgttcctgcaaaactgaactgaaatcaacctcactttatacttatttatacagtattatataagctctaaaagaaggtaaggactaaatatgtacgttgatcttttctttttctgtgattttgtcacatgtgaatgttgtctgtggaataaaatctggatctttaatggtaatcggaataacatcattgttttccctttttgtcaatgcacataaatgttgcattactcctttctcctactcaacaattgtcacatatgccatttgtttttctatttttctgctaattatcaaatacgcaatacctatctcgagaaaaaacgatgatgcgcctcttgttttaacaggcctagattataataatatgtgttaactatagtcgtatcagaaatatgatcaatagaccatgattataatcataccgatcatgagacataaacaatacagctacgctctataatatagccgtacgattgcgcgggcttttccgttacttttgaagatataatacaattttctaaccgttagatgtgatcaaagattcgtgtttcccttcttaaagaaagcctttcttttgccgcgcaaatctaatggttcgaaaaattgtacttatggttcctcttcataaataaacattttttctgcttaagcaaagacaagatataagatttaatcatttggggctgtaagaaacatggtatatgaaactgaagattgcagattgctactgtcatgaactaacacagaagtacagaaccatacaacagagcacaaaattaaacagaacaaagaaaaagaaaaaaaacatcaccatacatatcgagatcgagtacaaaagcattattacctcgttggaattaccgctggtaccagtaacttcttctgatatgcgagaagaagcgattccaatctgactgcagttgcagacttccgccgccgccggcatctccggcgatccccccgtgttggcgagcacgcatagcaggaccaggacaagggtggccgcgagccacagctcgaagaggaagacgaagaagcggcggagattgcccttgatctccatggcgacgcgccgcggagagcaaaactcttcagcaaaaaagagttggagaaagggcagaatagacgcgcaaagcctgggattttttttatagggcgtttttatgaacttggcagaatacagctaatgatgatacaggttaattatatatatgggatagaaacttacaactatcttctatggtttgtagtaacgtatgtcccatattgtgaatcaagctggcttttaaatgcttatcgatcaggattttttttcttcaatgcattgtatatttacacctttcctcgatgaaaagttgaaaaccgttgttctctataacattattttctgctaattatcaagtgcgtgacacctatcattcttttaggaaaattactgtgtgatacctatcattagtccaagaaaaatctaagacgactactctgattattctgatgcccctatattataacggcatgaacaaactatagaaaaaaggttatctagttttcagacacctaaaaatatttacaaatttaaagctttttgacaatatagatcacgactaaagtatattaacctaatattcttcttttcctttttccatggtcgcagcgcacgtctccgaccactagatcttgagctcgcgcatgaggccacctccctaccttgcagtgcctcttccatgtgcctcgccctacgccagggccgatgaggcccgctagatgacccactcttcctccttccccactattcccgaagccaaagtggtggtgaggtgcccccgccttcttcctcatctttggtggctcatgccgccgcgaccacctttacctccacatccacctccactcataagttctaaccacttttgatctcatgtcacaaccgccgaccttgccctccctctccctgccttctccgatgctatggctttggctctaccgcctcccctaccatccctctaagcccaacccccttcgcctcctcccttcaacccccttcgatttttgggataaccaaaaaataaatctcattggcttagctattgcggtcgtttattgccatcgattagggttgcatgcactatgtcacgccccgaactagtcccgaccgaaactagcccgtgacgctccaaattaacctgttaatcgataccagtcccaggaaacagtgctggtatcacagggagacagaatatcacagcaacagaggtctctttattatagagtagatgtacagtcatgttgggctgcggacagatcccgagctcacaactgcattacaaaaggaaagcggaagccaggacttggaccaatcaacacaggcgcgacttgggaactaggccgaaaccctaaaactcatcgtagccggcttgctcctggaagaactcctcatcagcaggatccgcttcatcttcttcagcaactgggggggattatttatatagagcaagggtgagtatgggagtactcagtaagccaagggaagtaagtgtttaatgcaggcttcaaagaaaggctgttgtttttgcaattgattttatttgagctcttttctaaaaacaactaagtgagtgcttctcaaacgacacgggtgagacagtgcgtctcgtccggtcggagtatgtgcaatgtatcagtctttagaatttaaacaaggttggcacccggccaacagctttttcaacggccacccgggccaacaacttttcaaacggccacccgggccaacaacttttcaaacggccacccgggcctagctgatcccatcagctgcagatttttcaaacaccgaaccccttttcacacagcaatttcacaagcagtagtcaaaccaaactacgctaggaatcacctcacatccgcccatgaccgtgggcacggctgttcgaacagtttgttaacctctgtagagggggtacactttacccacacgacattactaacccggatcacccagcccgtggggatcagccacgtcgggagacctccaagctttcatgacaaggcatttccaaagccgacacaggtttaccatatgccgacgagaggggtcccagaccaacaacaggttaggtcccagaccatattgtgccaggaagcccaggggtcctccccgacaccaccccggcgaatccacatgtctctcggcatcaaggctcccctgataagttagttactcagccaggggtgtcccattccacccatgtggtcgtacttgtcttatgtttggatgaaattacaaggaatcggtccttaagtgcgagagcgggaaaccgtacacccggtacgtttcccggtccgcggttttggaaattcatttagttcgcaagcaccgacccaggtgtcgggttttccaagtcttttgtaaaactccagttttacccaagttgttactcagattttaagtttgaaggcgaccgtcgatactggcacagggtgcacgaatatcgaggcgcaactggatggttacaaggggacatggtatagcaattaacaatggaaggatcaaatgcaacaagttaggtaggtctgccaatctgccttgcagacggaacaacagattaagtgcaatcctatcaatgcataatattttgcaagcaatataattagatttcaaatataggctcaagatgttcaaaggtggcttgccttgctcgagatctggagcttgatcctcgaaatcctcgcactgcgggtcttcgggctccgaaactatacgcaaaacgggacaactgaacaaacggcgaaaataaagccctattaatgacctctaagcgtgccattagatagatctcgagatttgagaaattttggaatttgaacggagtcaaacggatttacggttgggaagatattgaatttctaagattattggatttttggtctaaaggttggaaaagaaaagaaaagaaaaagggagagggagggaatatagacttccctcgggcggctagggcgcggcccgatagaaagggcagctagggcgcggcccgagagaaagggcggctcggccgagcttaacgggccggccggcccaagaaggtggcccaaggcggcccaagacgcgcgcgcgcgggagggaggagagagagagccggtggaccgggctcaccatgcgcggtcccgggtgggacccgcttgtcagcggctcggctcaccgtgcggagggagtacgcggctcatgcgcacgggcgggggagggacgcggtgcacgcgcacggttcgcggtggacgcggatgcggcgggcccacgcgcagcctcacggctcgcggtggaacgcgcgcacggggagggactgaccggggtcggctcgacccggtctaggctaagctggctccgacgtggcgcctacgtggctgccacgcgggccggcgggaggtagacgacgacccggccgcgaatggacggtgggcggcggcggcgagcggtggagcgaaccacggcgatacgggcaaaagctagcacaccgggcggttgttcgtgatgaggggagacgagccaacggctcggatttgccggaggaagcttgacggcggcgaatcgcggcggcgacaaccggtggggagggaagagggaaacggcggcgaggccacgaggggtcgattcccggcggtgagagcatctacgcggtttcgggaactcgatgctagcgtcggattggacggagctacgccgagcgaggctggcgacgtgtgggtgctacggagctcgagcggcgacggcggcgagcacacggcgagcgacggcaacggtcggggcggcgccggctaactacggggagtctactcgagctactaccgaaagctagggggaggagatggagcgaggaggaagaatggagggaggcatcaccgagatgaggaggggcgctgtgacgagaggccgacggcgcgggagtaatctctccggcctcgggctggggaagaggaaggagagggcgcggccgaagtccccttccgcgtccttgctcgtgccgactccttcgacacgcgcaacaacgaacggcgacggcgaacagagcacgggggcggcagctatggcgaggaggcgaaaacgagggagattggaggggaaggagctggggtttaaagggggcggcaatgtcggtttgggaaccaacttagggcggtcaaggcgcgagctggcgctcggcggtcgcgaccaaagcggcgacagggaggatgacgccggcgggggaaaaaggggaaaaaggagggggagaaaggggcttgcccttttgccgattcgggaaaaaggaggaggggagcgggggcgacgcggcagagggaggaggggcgctgcctccgtcccttggcggcttgcgcgcggagtggcgggggccgggcggtgatgacggcgatgacgacgggcggtttggagcggcgcgacgacacgggcgacagacgcgtgcagaggctgacggcggcggcgaccgggcggtcggccactcggcacgcgcgcgcggcttgcaacgggcggcgtccgcgcgggcgcgcgcacgcgaacacggcgtgcgggaagcggcagcgagggagcggagagggaggacttggctcggcgcgggcggcttacgcaggcgcggcagagcgaggagaagggaagggggcgctcggcgcggcggctcacgcgcacgcgcgcgggcggagcg

SEQ ID NO: 9084 - DNA, 45258 bp, Oryza sativa
cccccagggggagatgggccgggaggaaatcggcccatcgacccccgggggaggcaaaatagacttttgcggaggaattgatttggaaggattggattcggaattggacccgacgatagatcagggattgagatcttgagatgacacggacactagacaacaagcaaagaaacaaatttcgcaattagggtttttaagagataattttcccgctaggcgccacgacggaacgggcgctacacactagcacccgtccacaggtatgtcttaaaaaaggaagtaaattacaaggacgcctctaaaagatcgctacaagatatgagtcatgcccgtggtcatcacaaaaatgtctgaaaagatatatcattcgttatttggactcatgaattgaggctagctcacttgattgggtatggatatacacctaaaacacccaaatttaagccctcatcaagaagggtttttatggccttttcttttcctaatatatacaaagccaccgagtctcataagttttcatatgttatatgaatgattgagctaaagtggcgatgtaactttttaaggttgatcttaaattctctagcttgcgctaaggggccacaaccattctttcgtgtgacatgaaccctaagttgaattatggagttctaaaagatgagagagaataattagaggtagaaaatagaggcaacagtatgaaataaaaaaatagctgttaaaaaggaaaaaggctatatataccaaacggttacagtgcaagctcataaagagtcttcaataagaaacttctaaaaataagaattttcgcacttcaatacttaccttttcttttctggcgggccatttaatacatactatatttgttgctttgttcagtagcggacaaaatgtgcacagctatctactccttcaccaaaagtcttatgcatatttggttttctggtctttctaaatgagatgggtatattggtagcctctatgcacccaagacttcttatctgtggtgctagattgaatcgttgatcagaacttgagcatccatcttaatacttactggttacatacatgtgtatagttccttaatttttgttgtacgcgggatgagttgattgcttcttttttttggtgataaaagaaaatacgtccgagacatttggatggaaggagaaatgctggcttttcccgacaaacagtttcaatctctcaacatggattttaattatgggtacccgaaaaaacaattggaatatatatctcagctcagttatacacctggccaggcaaacaattgataatgcaacaccgaactaatttaagaacacgtatagaccccccgcccctcctcttttccatccgtcttcctcacagcacgcgtggcagtgaatatacacgtacaatctttttacgtgttcgtgaaaaacacccatctacactaacaagctaaccgccttttgtttttttcttcagtgaatgcagatgccggggaccttccagcgcacgggcccctggcggcgctgctcgtcgggcatccgccggtacgcgcgccactcctcgagaaggttgcggaggtcgtgcagcttggcgccgaggccgacgcagcagttggcgtgcatggtgtagagcgtggcgaagtcgcgcgtgttgctgcagaacccggcgacgtgcgccgtgtccaggaactggatccgcacgccgcgccgctccaccagctcccgcttgatctcgttcagcacctgctgctcgtgcctccccgggtacgacgcccgcgcggcgcgccacgcctccatcacccccaccgcgcggcggctcgaccgcacgtacaggaaccccgtgttggggaagttggccgggttgtaggcgccgccgacgaagaagtccgacgaggtcaccatgtgcgccgccatcgacatctgctcgaacgggtcacggaaccacaggatgtccacgtcctgcgtgtatattgcgatatttgcatatttaaggggtgcgttatcgataaattacccaatgtttaaccattatatatttagtgagttgaattaaaaaggcactatttgaaatacatactactacaaattagtactttaaatttcaaagaaatttttgcaacgtttagaagcttagtaattaagcacgtatatggtgataattcgtaatattacataatctattactccatctgttccaaaatgttacaatctaatatgagtctttcagtacaatgaatctagatagatgttctatctagattcattgtccgttgtaatattttggcgtggagggagtatgcatctagaatatgctttagaaggatgcttttagaaaatgtgcttatgtacgtggaggacctttttgtgaaatgaaattagtagtacgaatttttgttttgtccttttgtgaatttataagatgtagtagtactgttccaactgctacgtagcgtgttgtaacgtaccgtgaagaggaagttgtatccgagctcgaggatccgctgctgcagcttgaccttgctccagaccaggtcaaggtagtcctcgctcatgaacaccttctcgtcggtgaagttgcggccggcgacggcgaggcggtagcagtgcgggtgcacgtcccggcaccgccggaaggcgccgtcgtcgagcgccacgatgaggaggtggtcgacgaagcgcgcgatcccctcgccggcgcggaacccctccaggaacaggtccagcagcgaccccggcgccgcccacgcctcgttcaccgacgtcatgatgatgttcttgtgctcgtcggccaccgccgccagcagcttctccagctccttctcctcctcctccttcgccgcctccgccgccgccgcctgcacggtcaaaattttcaagtcaacttttgccaagccaagaaaatttcagacaaattaaacacacagaaaactacagttttgtatactaatctgaattccagacctggctgttcgtcaggttagccttctcctcgacatgagcagcggtgctcgtcaggttggtctccttggccgtcgccgctacagtcccattcgcccagctcgacaagtccgtcgtcgtcgaccagccgccgccggccgacgagaagaagaagatcaacacggccgccgccgaaaccccgaggagaaacgacaccagctggttgagcgcgctctgctggccacccatcatcattggctggccactgccaagaaacggagcaaattaaaggattcaaggagaagagggagaagaagcgtgcgagggaaactgctcggcgtgttacttaacacttcggttttttggacgttgatctcttcaaaataagtcgccagtagccaatgagaccaattctacttggtcacacgttgctagagcattggtgcatgatatgaccgcagtttctcctctccctctcggcatgtgcgtctctagctacttctcttgtacaaagtcaatccctcttggggtttttgatatggaaatgggaatgtgctcttcagaagcagggttgcatgcatttgtaaactgttggggccatgtgtatatcagagaatcttcttattgtgtgcttattgtacacagtttacatggtcagcattgataattttcttcagattctctgactgtaaacatgttctgtgcaagtacattccttcttatggtaatcatctgtgtatgattctctgattttttttccattttttttcacagatggacacatcaatgatcaattgtcctgtacaagtatacagtgtggccgatgcaactgtttttttgaatgcttaacaggagaaaacttgttgtcatgacagtacatggctacatgccatcgttgaaccattgccagttgctttcgccaacaactctcaaaatgatatcacgtgggccttgctcatgaaagcgcacaaaatatttcaaaataattcgtcttccaatgggcgagatggatccagtatttttccaaattgattttcaattcagatgacaatcatagctgccacctgtccatgttttgacgaagttagtagattacttgtcccgtccgtaatccacaagtgttttttcccctcataggtcagtaatctgacagggaagtgagacaagtgccagtagaaaaaaagaaaagcaagaaaacgaaatgccactccacagttatattgaggtgactactcaaaactcaaaatggaaattttggccttgattcatcaaacgctctgaatggagaaaagagccatgaacttttgaacaacaaaacagaggtgcccaactaaggccctggcccgtcaaaaactttcctgaaactcgagcagtttaggcccaacacgtgctcatcacggcccagtataagattttgcatcagctgggctatcttggcccagaaccatgagacgaagtacagtagtgcaacattagcgcgttgagcacagtcattccaactccaaacggggttgccgccgtgacggacgtcgccgtcacgctgtttccgaggccactaatctccaaattatcgttgtcgcctccctcaatgcaggtgggccagcccagctgtccacgtcagccatggcccttctggtggggccacgccaagtcaatggtttcactggtccgcggggactgagacgaactcgactccaaagcggacggctcagatcgtcaccgctcatgatcggacggtcaggatttcgcctttcgacgcaaatagtcaaatccccgcgcggcacgagtaagaaagtcgtcgtcgccggacgggttgcctacgagaccccgttttacccgatccaaactacagttttattattgctcaagctatttttacagcacatatccgattatttcctacatccttgaaatcaaatgcggttgatatgataaagatgaattataatgcactaaacgagaaaacttctttacacatgattaattaattattgactattataaaatttaaaaataactttatttatttatttaaacaacatctatcacaccatttaacggtttgatgaaaataagaaatttaaaatttagagtcaagaaaaagaattgggcctagtcctaacggaataaaccaatgaacttttactactgatgatgaatttacagtgacttcttgtcgatcaagaaagaaagaaagaaacactctggtataaaacagtagaggcacaatcgggcatcgattctgttgttttcatgcccgaaaagaaagaaagaaagaagcatcaagcagcacgttcttcttgttccctaggccaagaaggttgggggggggggggggggggttataaaggtcaattcctcctctctctcccacctctgaatcctcctctccttcccctcgacacctcccgattcaaatcgatacccaaaaaaaaaaaaaaattcacgcgagagctctcgatctagggatccctcgtgttgccgcagagtcgccgcctccgccgcacaaaaccctaggtctagcggcggagccccctcctccaccccttcgctcccatggaggacggcatctactcgtcctccgcgccgccgtcgacggcgacggcggccgcggcggcggcggcggtggggtcgtcggtgatcccgatcgtgaacaagctgcaggacatcttctcgcagctggggagcagctccacgatcgacctgccgcaggtcgccgtcgtggggagccagagcagcggcaagtccagcgtcctcgaggcgctcgtcggccgcgacttcctgccccggggctccgacatatgcacgcggcgacccctcgtgctgcagctcgtgcaccagccccgccgccccgccgacgccgaggcggatgagtggggcgagttcctccacctccccggccgccgcttctatgacttccgcgaaatccgccgcgagatccaggttcccctcccccctcgcattctctatcttctatcgatgttgatttaggcgttctgatggttgattaactgatagaggtactagtttggaaccttcgcttgtgctcttagcgtattctactgctcgagagttcactggtaatgttgtgttatgactgcttgctagggtttcgaatagtttgtggtgatttggatgaataattagtattgtactgctcgtgagtctactggtaatgtactaatgttgttgtgtaatggcagcttgctagggattcgagtagttctaccaggtttggatggatcattagtaatttgttcggttttatgatgtatgtgatgccggttaggctctataggtttagtgcaattgggtacattctaacactaccaggttggattgggggataacccttttgggttatattccatcttcagatttaggggtggcgatattttctcatagttgcttttatggtgacttgtgctgatgtccatttgtgtttcttcaaaggtgtgggtgtattgccttatctaaaatctctttgatttgttcattgcctttgagatgtttgtactttcagcctttggtatattgtcagtagtttaaacttagtgatttgcttgaatgtggagattgtatatgcctgtgtatttggtgacgcttatcctattctgattaattaccattgcttttatttgtccggaatgaactggtcgctgagtttagtggttatgtaaaatctgttattggagaagtgtgcacaatagtacctttgatttaatttttttttcagtatatgctagaaaaattgtaccatttgttgtgttatgcttttattgattcagttatgctggtttgtttagttatgccaatgcctgcaagtgttgaacaaactgtaccatagggcatagagcactattaatcattcccccaatcaatgcaggccgaaacagacagagaggcgggtggtaacaaaggtgtgtcagataagcagatacgactgaagatctactcaccaaatgttctaaacattacgttggttgacttgcctgggataactaaggtgccagttggtgaccaaccaactgacattgaggccagaataaggaccatgatattgtcgtatatcaagcacaagacatgtatcatcttggctgtttcgccagcaaatgcagacttatcgaattctgatgctcttcaaattgctcgaaatgctgaccctgatggtattcactacagactcaatccattagataattcatgttaatatattttgtttcttattaataattgattcattgttcttgtaggttctcgaacaattggtgttataacaaaggtttgaccctggtcttgagttttttgtctggattaaataagcattgtgttcataccagtgacccagtttgatcttggcttcacttctattatcttccagctggacataatggacaggggcacagatgctcgtaactttctgttgggaaatgtgattccattacgactaggctatgttggtgtggtaaaccgcagtcaacaggtactgcattctggtcattctcatgacttcgtgagcgaactcattctgtatgtctgtatgataaccatagcttccagatggtgtagttgtctagcatcagcctgctgattgttcataaaataatgggtaacaaatagagatgtgtatactaccttgtgattacaaacttgtcctagtagtttgtagcataccaaggatgtaatcctccataacctggacaaatgcttttccattgtagtgctaagtttagtgttattagatttctattatatagttttctcggcgatgcaggatatcaaatcagatctcagtatcaaggaagctctggcgcgcgaagaaagtttcttccgtaatcatccagtaggctgcaatgaattttgttattactttagtgcttattttcttcttacatgtttgtgaaatgcactttccttgactttttaggcgtataatggtcttgctcagtactgtggtataccacaattagcaaagaagttaaaccaggtatttatgtaattaaattatcagttgtaatcaatctgataactttcatatttctgttgtgatttaaacgaaaatacatctgtatgtttcagattttggtccagcatataaagactgttctgccaggattgaagtcacgtataagttctcaattgacaactactgctaaggagctttccttttatggtgatccagtcgagtccaaggtggggtttgaattaaaaaagaaattttgtccaagtgttagaagcataaaatttgtttgaaatgtttttcaacaatattacctgactttttttatttagggcttaatgaaatcaggccaattcatctgtgttctcagctaattttttgtcctctttgttgatggtccatctgtgtttctttactgcaggctggtcaaggtgctaagcttttgaacattctggcaaagtactgtgaaggtaatttttgaatcatgactaactgtgctggcaatttttaaataatggtcaattgtgccatttaatactgtgtatgattaaaagtcctgtgttattttttgtataagtcttatcatatactacctctgtttcatattataagtcgttttgactttttttctagtcaaactcttttaagtttgaccaagtttataaaaatatatagcaatatttccaacacaaaacaaacatattatcaaaatatattgaatgctacatttaatgaaactaatttggtgttatcaatgttgctattgttttatgaacttggtcaaacctaaagaaatttgactaagaaaaaaaagccaaagcgacttataatatgaaacggagggagtgtgtctattcttttgtttaagctgtatgtgataaattgtgccattttaagttgaaacatttttatgttatagctttctcctcaatggtggagggaaaaaatgaggacatatcaacaattgagctttgtggtggagcaaggatccattatatttttcaatctatatatgtaaaaagcttagaggttcgtgattttgttgcatgttcaattacaaccttttcattatgttgtaccacatcattgttctataatgaagttatagaactttttacacaggatgttgacccttgtgaagatgttaccgatgaagacatccgtatggctatacagaacgcaactggtcctaggagtgctttgttcgtacctgaggtataccatcccactttaggaagaacgattgtaagagtaattcatggatgatggccagttaagctgacaatttttccttcgctaacatttctcaggtaccttttgaggtccttgtacgcaggcagatcagcagattgcttgatccaagccttcagtgtgcaggtttcatatacgatgagctagtcaaggttagacctgacacctttttttgccacttgtctggcattgccgtatgctaatgcctagtatatctttgtggatatgctttttcttaatatgccacttgcacttttgatgcatctatctggttcacctcacagcatcaactaacattctgatgtattgttgctctgttacttcttgaactgacaatttaagtttttgtgtagatgagccatcgctgtcttgctgttgagctgcagcagtttcctctgctccgtaggagcatggatgaagtcatcgggaggtttttacgggatgggcttaagcctgcgcaggatatgatagcacatatcattgagatggaggtaataattcctcatcatgttggatattaatggttaacaaatttcctggtagccattggagtttagaaatatgccactagcaatatttgaatatagtcttccataaatagtgctgattactgacccccagacccacaatttatgaagtatgtagaaaccaagctatttcatctaagctagtgtttgggccattgatagctgatgttttttttcccctgatttactcttgactttgcatagatatgctataatctttttcattgtcataacctgcaactctattttggttcaggcggattacataaacacatctcatccaaatttcatcggcggcagcaaggctgttgagcaagcacagcagcaagttaggtcttctagactggcagctgtggctagaagagtatgtatacatcatatgcaccattaccttttccttttcgttctgattttctaaaaacaatttaataacaatatggtagaatcactgccaagtacattgtgtttgtggcaattgcatattgtcaaacaagaacaatatttaatgaatgatgtacagatgaactatcttttcataagtgacatgtgcttctacttaattgcatgaggattgccacaatttgaggaccattggaactaagagctacgtgagcagtacatgtaattctataataaatgtttagcagctaaaaatagtacctctccatgacttttaacatatttcatgataaccgctggtatgcccataccataatggatatccatttgtttgtattcaaccattcttttttcatttagtaagaggcatggctaaataaactcatggtgtacaccatgttaggacttgtgctatacttgctgcacactactttggtaatttggataatctttacagatactttaattctgtaatttgcattatcattttttttgcacatttagatatttgttctcttggaaaataggtggtgtgacttaggaattcatatccttcacctgcaatttccgctcttgattcctcatattatcaactatcttaagtatctaacgtactatactgcaggagggagtagatgctgataagtcacaagcttctgataaaactcaaaagccgcgtgcgcttttgggtagaactggtgtaaatggagtagtcacagatcatctccaggtttttgtcattaccattttttttacccttgcaatgtctataattgttaggcacttacacctggcatttcttcttttgattttgtcatccactatcagggtttacggcctgctgctgaggctgagaggccaggatcttcaggtttgaattttgctacaaatgtcatatcttaagtctgttgtgctaacatatgtgaatgctaatagtatacccttctctagtgttgctcttactgctttgattctttctttttggggggaaactataaagcgatttgatgtaagcccagtttattggccatcttttaggtagtggaagcacatctttctggggatcaatatcaatattttcttctactagtgatgatcgtacacattcttctgcaaaagacaactcatcgaacaaatcttatacagcttctacttcccacctggagcattcactctctacgatacagttgagagaggtgagctatcttatcaatgccttaatattttctcatcagtgttatttgaatttgttgagtgattgattgaggtaattgtcaaacagccaccagttgtcttgaaaccttcagaaagccagtctgagcaggaggcgcttgaaatagcaataactaagttgctactgaagtcatattacaatatagtgcggaaaaatgttgaggacttcgttccaaaggcaatcatgcattttctggtccgtgatcgttgtctcacttttctcattattactcgctttgcataggatggtgatttatttggcacattatttcgattataactaatgtttctggacatgtaacatgactttctatgtactatttttagtgtcatggtaagcatagatgacagtaaacaaatattaagacataacattttttggggcaatgtatcctgtgcacacaagctttccatgtacacaccgtgcacatcaactaacaaatttcaccaaaaaatctagaaaacattgtacatgtacttccaatagcattacagttttaagggtataaatcagtcagaattttgtcttttttggtgctccacatatatataatgaatttgaagatgagactttacacttaaatgtgatactactaaaagtacatgtacaattttttctagaatttttggtgaagattgttagttggtgtgtacacgagaaggcttgtgtgcctaggacactttctcaatttttttaccacaattgtcaagcattgcttcttaaaaagcaagtgcaagtggatcactaatttactattagtgtggttgtgtgttttgcttgagtattgattatatttcctcctttttgcgtagcatttttatgttgatgcgactcgttgattttcattgcattggatggatcactaattataaatggttccttattcttttctggccacattagtatattcaaataaatatgcctatatcttctccagttatgattcagtttcatgcatatttctagtggcagggaagctgaccagaaatcctaattatccatgtctgtaaatttcctcttggggttgctgttgcatgttctttaaggatttgtttcgcttgcaggttaaccacacaaaacgggagctgcataattaccttataactaagctttataggtgagggaagccttttctactcatatacattataatgtttcaaacgctggatgtttccctataaatccgttataacatttcaaacgctggatgtttttgtatgtatcgttgcagagacgacctctttgcggacatgctcagagaacccgatgaaataaccataaagaggaggcaaatacgtgacaccctcaaggtccttcagcaagcatacaaggtatgttttgtcagaactaagttttccattttaatagcatttcatactgattgatctaacattaaattatttattggccttgtgacatgcttcagactttggatgagataccacttgaagcggacacagttgagagaggctattccctggatgccgatgcaacaggtctaccaagggctcatgggctttcttcatccttccaagatggaagctcgccatattcgaccccaaagcaaccaaggtcaaggaaatctagccactcaggggagcagctgccattcaatcccgatgcaagcggtaacggattttgatctcgccattcacgaccgtcacccgaacgaaccagtggttgaaccaggcgatgtaccgtggttgcacgcattctgcattcagtttgtttgcaccagatagatgtatgcttttctagttctactactattcttttcactcagtgttgcgccccaatgaagccatgacatggagcgagttttgcccgtttgccccctttgtacagtatatttcgctgcccaatcgtttcatcataaaatgatatatcagtgatgggtatagttttagtttaagcccagggaagagtctatggttgctcggtgttagtatcgagcgtccgaatgcctgtatcctaaaagacggttttgccttgcaaaatctgacaaggttggttggtaaggatacgcaaaacaaatttgtgttgcataaagttggtggtctgtaccagtataagtttggtgatttcagtcgatcactggtgatttgcaaagagaagctctgttcatttatttgttcttttaccatgcaatatcctggaaagttaaaaatgctatttttctttggttgatcatgaaaaatgctatttttctttggttaattatgaggggtttcctcgtactgtggcaatccctcgcgatagtttcacaatgcaataacccgatcataagatgaatacatgtatgtacagtaatctctatatttctgaacaaactagcagaacagctcatattcaatcgagtggtatcgctacgctgcttggagtgtgcatattgagcgcctcactggaatgccccttgtttacacaaagggagtgttcatcttgagctcctcctagcatatgccccctgtttacacaaagttttgagtgctagcaacatcactaataccaatttataggcattttaaggccctaaacaacatgcattaacttcctcatgggtcatgagtataaagatagggtacctgcaaactatcgccttttggtctagttttcatccttcaactttaaaactggacaacttacatccatcaactaccacaactttaaaactccagtttacatcctcactccagtttaaaggtcgttttatcctacttagcatatatgtggcgctgacatgacaatctaattaacaaaatattattttttttcaaaaaaaacactagcctctaaccatgtactacacgggctatttttacgattatattaagattattttttaatcatatgattaatatatggttattttttcaattaaacaaattgctcatatcatttgcatctttttaattatgtatttccaaattcaaaattaaatcaacaaaatactaagttgttcatggtataaatttaggaagaagggagtatgaggctgatataagagatgcattttttaaaagaaaaatgatgacgggagtactggacagatgtgtcacccccatgtcagacaaaaccgccttcaaacagggacaagggtgtacagtagtactagaaggtattaatagttgaagaatgcattttgtccggtttcaaagatggaggatgaaaactagaccaatgttcagggatgtttgtaggcatgttgcatgttttggtgaattttcattcgtcctgtcaactaacaacattaattgggaggtttgcaaccttagagatatgaaccttggaccttttctcttctatactatagaagcacagaatggaaggtccagatactgagacaaactaaaccagataattgggcaagttctttgaattacatgaatcttccgggtattaaattgatgcctggttggagggtgttaaattcttcaggacccacgttaattacacaggtaaacgtataccagatcttgtcacttccagccttccagatctagcaaaattgtttctgtaaggttagcttttcgggtgtctacttggctttcttcttcttagctttcttctttttcttttgaactgcttccgattctcgtttgaagattgccagcacttcgatgctgcgtcagtaattccattcaatcaatgtgatcaagggcatatcaagcagataacacaaatcactcatcttgataagtaatgtactaaaaccaagagtggatcaaatggggccaaacaaaaggggcggcatacataaagttctttacgcaagtcattgaatcaagatagcttagggcaggttagttaatagcttatggcaagctaattattttgatcatttaaaccaacttgatgatcagacacagaatgcaaatgagaaatcacaccaattatgtcttgattgctgaaaagaatgtatagtaatgtttcatttcccctatctgagtatcagagtatgccaaacttgaaaataaattcatgtctataataatccaaggtaggtggcgtcagggaagagttttatgttcctgcgatgccctacaactttatactatccatggtaaccctaaacagactttcacaagatcaatcctcacaatatgctagtgcaacggaataaattcaagtttagagcccagaatacctatcagtgccagggaagaaattaaaagcatgagcattctgcaaatgccaagccttactggacatcaagcttttgcagtcctgttgaagaaatggttataaacgacataataatcgcaccaggatagccagcagccaaggtacatattttggagagagctcataattcaggttcggcgaactagctgagtgcgtgatatatatgtactacctccgtcccaaaatataacaacttttggccatttatctggacaaaaatatgtccagatacatagccaaaagttataatttgggatggagggagtaacttttaccttcttaaaactgtcccatccgcagctaatgtatataagagtttctggccacgtttcactacttccttccaatggtgtactatcaacctgaacagctgcctctcttgctcttaggatccatggcctcttctcatctttgacctttgtaagtgtactgtgtccatgtaccaaatatcactatcaataaatttaccataacggacacgaaattctcaaattaagaagactcagatggatcatataataaaagcatgagagcacagaactgggaatgatatttccaactatctctaccttttcgccttatatgccttgcgttcggacaaagcaactttctgtaaagcacagataacagaggggtgcaatcctttcctgggtggatccacaataacaacacttgacccttcgagccaatgaacaggttcctggtatgatgatgaaggttccaaatgaatcctcataatatgagatgtaaccatagtagaaaatacaagtttagttacatacaactgaagcatcagtgttgtgccaagttatggtacaacccaggtttgggggaagtcggcttgctgatttttcaaaagacatttttgacaatttgttaatctcaacacatttcacagacctggaagtaaaaaaaaaatcatgaaatacctgaataaaagaagcatggcacctagaaggctatgctaaaagtaaacatggacacgcacaacccagaaatacctgaataagagaagcatggcacctagaaggctatgctaaaagtaaacatggacacgcacaacccagactgacccaaaaatatttttcaaggcttgagacaactgggctactgaaccaggcccacatgttctaataaatatcttagaatttttttaaaataaatatttctagtgaaaacacatttgtttgaatttcccaggctgagtttggagcttgttttggttgagacagaccaggcacgtaaacctagcattttcaggtcaccccaatataaggtttggtcaggtcaagcagaaacaacacaatatcataaggcaaaatttgctccagaatactctagatttgtaatgaagtgtaaaccatattataataaatccaccgtacctcccttgataccagtactattctactgcatctgacttagtatcctacaaacaagataagttccgcaatccgagctgatgcctccaacagatactaacaaatataatgaacatgaagcaaactcccaactcttgtttgtgaatcaagcaaagcatttaggttatgattttttttcaacatatgaagtataaaccaaatgaggctgttgctctttggtagcctaattgtcaagtaatgaagctatttgacaagccccaaaatgaaatacagggataaactcacctacatttcttcgaagcagcaagagataatccaataacaccagcaccagaatacaggtcaacaactgttgacccacgtggtacatatttgtgcaacgtatgcagtaacgcattaaaagactgaaagacattgcaaagaggtcacagcatttgtaagacattgatggtatggaatttagtataaactaacatagcctgtgaaacttctccgactatatctaaagattcatgcagcaaaaggatatatggagtatgcttgtatacaattgatcactatgtcctagaaagttgaattgtctagaattttggttttatctagtcctttgcatagttaagttctacatgaatcagcgataacttcaatcacacgtaccaaagtattagcctgcccaaagctataaggatccagagaaatatcaactccaccataacgctcccataagtcgttctccccaatgagatgtctccatttatgcccaaaaattatctgcagatgtaagaacatttttcttgaataaaataaatcatatatcctgaaggtaatgttcaattatgtctcttttaacttgtaagccaacagttatagcgtaagaaaagaaaggtgaacatggagaaagccttggatatttttttaaaattctagtccactagaatttttccctggtgtgttgcacaaatgctgacattagcatagtagcttttatatgggggcaggaatacagacatacagttttgcatatgtgcatcctcttgacaacgtggctaccaccagctaatcagagggagctgattgtacatacttgatgaatgtacaagtaagcttattatataagtgccactgttttcatccatatataatggatatgttgagatgttaaaccagtagatctgagcctctaaaagtgaattgtacaatgtccaacttcagataaaacatcaactttttcaagtatccatcatgaaaatggtaaacacagtatgtgcatagccaacaaatgtacaataagttcagttgtatacactaaaatgcaagggtgtatcttacattgctggttgatgtctgaaaattagcccatatagagtgaatcagatgaacattacttcttggtcccccatttctccataagaactgtcgcaaggagcacagagattgaggataaaatgggaaaaagaggagttgaagtactgatagaaaacgtccaaggaaacgcgaaagcaaaatagcagctacatgtgctgtagctgcagaacctcaatttcatcaacttacttctgacaacaagctcaacttctctgcatttttggatcgctcatcccttgaattccaaaccaacgaaacttgaactcttcctggttaagcaaatagcgcatttaaattaatttggaattagtattagacaagaaaagaaacttagagcattcagcgcatgaggaatcaggctaaccttgctcatatcttttagcaactggaatagatgtgttatacgttgtcacagccatctagagaatatgtaaaataaatcaaatgaccaggatcactaacataatgacatgggagtttttgaagaaaaagaatatgattgataaggtgacgtttttagccagaaaaagatgcataagctgtcattcatatagtaatatgtattatgtgcatgctattaagaaacagtttacctgcacatatctcagttcgccggtactcgcatcctcatcaaatggctcaatattcaactcagatatagctaaaagaacatagttactatatattaggtttctttggcaatggaaaggatatttttttttgcatatcccaatgaagcaacaaacaagtaattgtaggaacatgccttgtcttagaagcttgacagtagcattgatgcttgggtgatgagctgaagaaaatgtaaaacaaaaaggattcataaactgtcatgaaaaaataaagcatatcacaatgaagctcaaccagatcattgcagcttcctttgtaagtagttctcttaatttcataggtcatgataactttcttttttgaacgaactggcacaggatgtgccaagttcattgaatataggaggtatgtcgtggtaactaacctctgcactctggaatatctgcaacagcgtgtgtcccttcctgatataggccaatcaacgggttctctggtgttccacgtatagctagctttgcacggcaccgccactccctctaaaagcaccattctcatgtttagtggagaagcaaagccatcataattcttagataacctaaaacatttactgagagatccatacggcaatgtggcttagtacaggatttgcatgccttcagacgtcacagctctaagaagtaacgcatcacatggcatagccacataggccatcaaacaaacatataatcaggttgattgggcatctattagatctctgttactacaattttgcattaaaaaataaacataattagctatacaaaaaacaccgatgctactttcaactaaccatgatctatccctgcacaattgaataagaaattcagctagctagctcgctacatttggatgataaaattttctggtggacgcattgctttgatgtcctcaaaacaccagcatcagtttgccaaacatattcccaaatgaacaaaaccatgcacgactacatatatatccaaaatagctaagctaattaccgaaccgaacctgagatatcgtgagttcatgaccctttaaactaatctcggcaccaggtaagtaaattagacaaccaaacagcacggattgcatacattgggcacggccaaaattgtttagaagctacacgtaccagcctgcctctgctgaaggtgaaatctccaactccgtgacccttgaagaaattctccacctcctgcagcaccggcggcttgtccagatccacctcgtgcgtgcaacccgaacacctgcagagatcgcgcatcagaaaaaaaaaatcaaaaaaatcacttcgccgtctctcacacacgcgcacacgcattcgaggagagagagccgtacgagttgaagtggacgcattcgaggcacgtggaggtggagggggacaaggtgggggtgatgatgggaggcagcgtcgcggtggccgtggttgtgctcggcgcgacgacgacgacgggctcgagccgaggcggtggcggcgggggaggagcgggagggggtggagggcgaacgcgagtgcgaggaggagggcgcgtccgggtcggggcggccaggcgcgcggcggacggcgccggccaggggagcagccccgccggtggaggcattcgccggcggcgaggaaggaggtggatgaggaggcgggaagagggaaatgaaggggataaggcggtgaggaggagagagatttttttcccgctttttgtcggaatataggtcttgttctttttctccaataaaagttgtttggatacatgtggcatattttttaagctgctaaatggtgtgtttcgtgtgaaaactttttacatgaaagttgttataaaatataaggttaatacatttttcaagtttgtaataattaaaactcaattaatcacaagttattaccatctcatttggtgtgaaatacttaatttttatcttcatcttcatctttatcttcagaatattctaacaccaccatatatgtgactgatgaagtctcagtgatgatgacgaggatttttcttttcctccgaaatatggcagtttttgaaatgttttgtttgcaagcgaaaatgcacaagtgagcttcttgttacgggtgtaaactcaattgttttgacttggacaaaaatgggtctcaatccaaatataccgtgtgcactactgaaactggaagtaacaaaaatgggtctcaatagtaattgatctgacaaacagtggcatcaaacaacttgtaaagccgctcaaaaaataaaagttatgcaattccttgccattgccaacatagacggaagttagtttttctatgtctctggattggtgttttacatagttgtcttatttttaatcatattatggtttttttagtttatagtattttatcatgcaaggctgcaacccctgtaatagttgtggctattattaaaaaactagcatcaaaacaaactgcattaggatgggtttaaatttgcccaactgttttctaggccactcatgagaaatctatagattagctttattttaaggaaaaaattctatataaaattacatgttagtttaattcaatcacaaggaaacattccaaaagggatgatctaaccaccctttgaatttttttctctgaaacattttttttcaaccattggatcaaaatctagccatttacattattccccataccactaatagctaggagaaaaataaccacgtgctatcatcgtcgccgccacccgattcacattgcacttagtcttcccatcgcctccacctaggtttacattgctcctatcccctcgccttcactgccgaccgccgcctctcgataactctctccttgtttcctccaccgctaaccacactcctctcctgatccacggcaccacaccatccatgagcctccctctatactcgtaatcttcacccctttcctcttccctccctaatccctctctccatcccaacctcccctccaatctatatcataccttatattctaaatctgtcatatgtcgtcactggagaaacccaagagcttatcgaagtttgttagagatagattgacgaggtgatgcataaatctttgagcaagatctaaaggttagaaaatcatgggttctttgtcttaagaatcattcggatgttttttttaagtaaatcggttgtcaaaatttttctatatgtgcggaagcatcgatggtgtgatgatgcaattgtgggtctagaatttaggggttgtttggttgcttccttgagaatcatgcctaactcaggcatcgatctcagttgttcgattttagtcgcctgcggctggattgatctgtctgagtgagaacgctcaagtgagggcagcaaccaaacatccccttaaatcttgatggatacaaaaaattatgcacacataggtgtcatttttagtaggattttaataagattaaggccgatggtgttagcctctttaaacgtgtgtcaagagtatacttacagctagtgtcagatctaagaattttgttgagactgaacggccatataataagtactcctacagatgaatctatacaagaccattttgaccattaacagtagaaatagtgacagatcaaactcgtgatttaggagcagaaaaacggggaaataacttagatcgataggacgatgcttatgtcttactgatggtcatatgagtgttccaagccatggtgcgggcattaacagttttgcaatttatctcgactaatcttgccaccaccagggtaattaattactattgcaaattgcaatgctgtatatgcacttcattagaaccaacagagagcagtttgctattctactttgcaacttactatatttatcctaaaatataataatatttagctataaatctgattaaatatctgtcgagatttatagctaaaaatatttatatttagggacgacgagtatatactgtatattatagtggatatttgattaaatctcttaaattaagaaacggcccaaaattcaggcccagtaagcgcaaacagtcccagcctgtcagctcttaagtccggctcggtcgaagcgatggagaaagaaagggagccacgaaacgaagctggaagcaagcaagcaggaaggggaggagaatccaatccaatcatgtaagcccgcctaatcgatccttcctaagctgttcctacgcgcatcctgggatttgttccacaaattcttcatctgatcgaacaaatcggagccattaccgatgaattcgcacttttcgtcagttcatgtagctttaggtgtgaaaaatccagcggtgttctttttttgttgaatttgaagcttttgttgcaggtgggcgtcgattaatcggccgccgaccccgaatcgggaggaggatccgcagaaggagctttccctcagagaaatcatcaacgtcaaggtacggcttgctcttcatcctcttgcagaaaccgtgcaggaatctgcgaaacagtggttgtttttttcttttccccttccaatttgctgcggaattgaagttcttgccacttggtgccgaaaaggcggtggactctccggctaccggtgacgtccaatcacccaagaagagggtaatcttcgattagatttgattagggtttggtttagtggatcttttttgggtgggtgcttttttttttaatctttgctgctcttgtgttcgagtgtggtgactgacagtgaggtggtttttttggtttttgtgaagttggtagagagtggggagaaggagaagctgatggagctcctccgggagcggctcgtcgagtgcggctggagggacgagatgaaagctctctgcaggtttggttccttgtcccaccaaattcttgtatcgtttgtgatgagtttctgcttggtgatcctgaattccggcaacgattccgtgcctaagcctctgtgaacaatgatctgtgtcttctgtttcctagtgcgtatagctaccagtttgcttaatgtacaaagcacaagcgtttgtaaggctttaacatgaatgaatgaatgaaggaataattagcttcaacatattgttgtttcagtcaatatctaaaatttctgcaattaatcacttgttttactcggtatgctgtttctgaaacttgcccggaggtttataagtaaaccagacagcatatgggtctttatacatgctttttggctgctcattgaacattatggggggtgcttttaaacttttcctgcagaatgttactttaactgttaggtttccatggtggctaggccatgtagtacatatagtacgattcttcttaaccctagtatgcagtgttgttatagaccattgctagagagattagaaaacccaaagacttagaccacattacagatcgtcgctgacctacacgtgctacctgatgttgtcatgctgagcccattttggaatttgtacacattccacggtttaaaataggtcactaaggtttttcagcatcaaatagattttgtaccatcattggttctatgagctgttttatttctgtagggcctatgcaaggaagaaaggaagaaataatgttacagtagatgatcttattcatgtcattactccaaaaggaagaggtaaagctatttttgtttctccaatttttctcctacaaatgtgtgaggaattctatttactgagtcgacggcacaccaaatggtctgccaaatacaatataaaagtataattatattatagtaacatactaacatagcactgtcacacattttgttttgtcatcttttctcatattttgctaccaaaattggatttgtgagttaaggccaaataaatggatattaccttttaatgcataaatggatttgtgatgttactaagcttacatcctcacctcaatgcctcatatcatctgttcatcactcggttctcaatgtttattgctggtggtattacaaatttacagtactgggtggggaagttctttttttttcctttcaaaatatctatctctcgtattattctcattatctcttgtctctggaacagcatcagtgcctgattctgtgaaggcagagctcctgcaacgcatccaatcctttctcatgtcttcttcctcacttcggtagtccatttgtcgtaatcactggagccgcaggtatgaaggttcgaagctgatcatgtggggaggagctatgcaggaatacaatgcatcctgtaatatcaacaccaaaacgatcgagtgatatttatagtgttgtcgacaatgtttctcttgtcaggcaggcagttgggcctgttctcagtctgtacacctctttaccctgcttagatgtgaaccttgaaaaatgtattttgaatggaagcttccagcttgttatgctgcactgtgttgtgttggctttggttgcccctggatgatcgaaatcataaaaattatatatcttgatagtgttcatgtgtcacatgtcaaacctgattgattaaagtgatcttaaatggtgggccagagagaaatagagtcaatagacaccatgtttttattgtgtttgtgatactcgtgagaggataatgttaggtgcttttgtgtacaggggtcgtatgggctgccatatctgacgggttttttggctgatatccattggtcctttcatccaaacaaaaaacgagcattcaaattcatttttacctagtcgtttttgcagttcgtagccaggtttgcaagcccaaaataacggtgtagaattcgagttttttgcacatatattgcatcgctgacactaaactgatcaagtagtagttagaaatatcagaaatgacgaaggcaacggtgtaatcatccatatcctggggcagttggcttgtcattatcataagctcgatcaaaagcgctgcacaaacacgttggcgccatcaagcagaatgccaacccacacgaatcaggcttcgattcatggcacaaatgccaaatcacaaattctgcaagatgttacgacacacagccacgctgaattgtcaatgaaaggaaaaaaaattaaaagtttgggacaattggtattgggtagagcaatccaattgtctggcgtcaatcaagctatcccaaacaaaaaaggccatcacaatttgccaatcaatcacattgctaacctattgaaaaaagttggcatggtatcccacatgtcacatgcacttcccacagattgattacaaaattgacaactgagaaaattttatatccataaagattcatccagatatgcacaaaatgatcatttcttgagctagatatcctcaccttacagttgatttaacatggatacagcacatgaattctcaagagtgactattcacttgattattacaaggatatagtgctctcaatactagtcttctttacagtgaactcagggccggatcaggtagtatattgtagatacagctcatagaagggaagcagccatgtcaaacagcacaaggcccaggggtcatcttctgcctcctctcatctaagtctagggtatgaacaaaagccggcaagcaacagcgaccggtgtaccacgccttctccttgcgattcttcgcttctctgatcggcgtcggttctgtgctacacgtggagctggactcagatactggcttcacagctgcagaaacaggctggaattgctgcttctcattcttgctgatgtctggaacagatgcatcggtgctatcttcggaaccattctgcatcgcctcctgcaagagctcggctagttttctccttccagttggagaaggttcaggtgatttggaattctgtacattatcaggtacaaagacattgctcataactgtttgtgttctgggttggtagtttggagtgctgccacgagacggagtaaaatctgcacacgaaaaaacatacattacacatgaattgaaaacaatcaaaatcacttggtacagtagaatatctacttgttcattgaacttccagaatgatgcagaagaaatggagtttcttataatttaagtgtatagcaagacttctgaaataaaggaccccatggaataggtaaccgaagttaaaggtggggggtccaatgcagctaacagattattagatgctagaaacatgataatgccaaaagacgaaatcaaaggcctcaaccttttgtctcaacaagcaatcaaagggctaaaataagccccttagaatccagagagacagataaaactgtatcatcaccaaatcaatcagcgcacatgcaatttggactaaacaaaaagaacaggcctcatgctagtatgctactgatacaataataggatagacttgaaaaggaaacagcatgaacaaggcactggcactacagacatgccagtgagaaggaacctatttactctgcatcattagattacctccattcacactgtagaagtcgtcctcgcaatcagaatctaaccatgcccgcgagtcaaagaacatttcatccttgctacctgcaaattaagttctttaagttcctctatccattaaaaactgcatattcaggtcagacaagcatgtgtaaccatggtataaattcgatcaggcttaattaatgaacacacaaattcaacgaagtgcccaattgacaaacaagaacattagaatacacaaaacagtcaacttgcacatctcgtcgatgattggtaacacaaagagcaagcagttgattttggacaaagtaatactagatacaaacacactgcaacccccccccccccccaggctaatcaaatggccatgaagcaagttcctgatttggatgaacctgaatcgaaaaccagcttgtatgaacacttgaacagaggtccgtttcagttaatatcatcaattcctactgaaacaatcagtctgtttgatcttcggaagctattgttaataccaataagcaatctttttattcttcataaactacttttaacaccataaaacttccctttcaaattcttaaatccagacccaaacaataaatcaatcaataaacaaacccaaaaggcctcttttcttcttcttttttttccacagaaagatcagccaagtcatctactcatctccctctttaacctttcaagaatagacttacctagctaagcaaccaaactgatcaatcaaacaaccatctgaaactgaaactcacttcagaaaaagacccaagagagccaagatcaacgaatcctaccagaaccggggctcctgacgccaacccctgccgccgccgcctgctgctgctcctttcgcttgagatcaacagacacaccgccaccgccacccttcccgttcgcggccttcttctccttggtaggcgacgacgcaagaaacagcttcttggggaacccgaggtccttgtgaaccgaagcgcaagaacccatctctctctctctctctcccctccactccactttctctctcctctcacacccaacctttttcaaaccacagcgacacacatctttctctcctcttccccgtgcaagaacgagaaatggaagcaacaaaaggagagagaagagaagagtagagagagagaggagagagttcttgggagaagaggaagaagagggacagaggagaggagagagtgggagagtgtgtttctttactgggagtagcgcgtgggcccgggctgtcatgctctcattttgggccgttgtgggatgtggacgggccccacgggtgtaactagagacggtttttggcttttgcagcattttggggcttttaattccagcggcgtttttggcaagccacatcggatattatatagagtattgtattggtatttgggtactaataaaaaaactaagtacagaatccatcagtaaatcgcgagacgaatttattaagcctgattaatctgttattagcaaatatttacggtagcaccatattgtcaaatcactgagcaattaagcttgaaagattcgtctcgcaaattagtcacaatctgtataattagttattttttagcctatattttaatactttatgcagattgttcaaacgtttaaaattttcctactgccgtgaaatgaaataataatggatgggagagaaagtagtaacagaaatgacttcagaaaaagtttgttgtcctaacctaaaggtgtgttcagtttctgaaaaaagttgaaagtttgaagaaagttggaagtttgaaaaaaagttgcaaatttatatgtgtagaaaaagtttttaatgtgatatgatgtgatggaaagttgggaataggagatctaaacacggactaaaaatcaaatccagatagaactttatgtgttttcatggtgctcaacgatttggtaccattggtgagaaaaaaaattatagctttgtcgtcaccggattaaatcgtaaattacaccctctctattttcaaacaattgataatgctgacttgttgtttagttttcaataatatttttttaaatggaccaataggaatataagattataggttcaataaatcgataaacgttaacaatatggtatcttttcaggtattcattcttatttgaaaaaaaatatgagcggtgaaagtttatagataaacaattttcgttaccgctaataaaaaacatggccatgttgaaacttagtactttgaaatgtatagtagttctgtatgacttgaataccaccattgagaaaaaacaataaattgcacaaaacaagttgaaaattccagtggtgaaattggagagtagctagtatacatagacccgaaagtgaagtttataggttttctttctcattataccctgtttaaatggaactaaaactttttaagtccctatcacatcggatgtttggatattaattataaatattaaacgtggactattaataaaaccaatccataatcttggactaatttgcgagatgaatctattaagcctaattaatccatgattagcttatgtgatgctacagtaaacattctctaattgtggattaattaggcttaaaaaatgtgtctcgtaaattagcttttatttatgtaattagttttgtaaatagtctatatttaatactctaaattaatgtctaaatacatagactaaagttaagtccctgatccaaacaccacctaattaatctgctagtcccctctctctcctactcctactaagcaatcggtgacaaggcaaagaatttgacacttgaagtgttggtacgtgtgatagctacggagtacaatgcccaacccccctatgtggctttcatcttggaaaacttggcagagacacgtgtgatttttacgttctgtctagagagctagagattctaacaaataggtagtgagtaaccaattgatgagaataaaaaaactaggtttttagtttctaactattaattcgtttcctaaaatctatagcttataattatttgaacttaggtaaaagaagtatgaatgtttgagttgagctggagattccgaggcaatctacagctgctacaaacttttctaaacaaacaatgtttctctcgttctccacgtacacgctttctaaactgttaaacaatgtttttttaaaaaaatctatataaaagttattttaaatattcatattaattcaattttagtttaaaataactaacacttaattaattatatgctaatggctcacctcgttttatgtatcttctcaattttcttttttcttctccactcaggccttgtttagttcccaaaacaaaaacttttcacccatcatatcgaatgttcggacacatgcatggaatattaaatgtggaaaaaaaaaatcaattacacagtttgtgtgtaaaattgcgagacgaatcttttaagcctaattgcgctatgatttgacaatatggtgctacagtaaacatttgctaatgactgattaattaggcttaataaattcgcctaacaattttctggcggaatctgtaatttgttttgttattagactacgtttaatactttaaatgtgtgtccaaatatccaatatgacaatcaaacttaaattttttttcctaactgaacaaggcctcagacactccatagacgtgtacatgtgttggaccacaagtctctcattctcatatattcttcaatagcagatagcaacatccgttgatagtaagtatgcttccatgctcaattcaaagattcagccatccgtctcgtgtcctcatgtgattttgtcgatcgatgcaagatctttttagaccattcatactattcctagtggaaattgatgtaggctctaatttgtcgtcatcttagcacagttcggaagcgtgcaccttgttttcaatcaaatttacaactactaaatcgcatgacttgatatctgataactaaaagagtaaaatacaccagcggtctttaaacttatcggaaggtttcacttaggtccacgaacttgcaaagcgtacatcaaagtccctaaacttggtttattgtttcatcccggtccaaagccacgtttaaccgtggtcttgcctatgtggcacgccatgtgaacaatgacatggaattttttttctccttttttccttctttttttcaccactgcgacagcccctctcctcgtgccgcctctcaccaccaagaaaaaaaagaaggaagaaagaggaaaaagaaggaagaagggataaaaaaataaaaaaaaattccatatcattgtccacgtggcgtgacacgtaggcaagaccacagtcaaacgcggctttggaccgggatgatacaataaactaagtttagggacctcgatgtgcactttataagttcgtggatctaagtgaaacctcctgacaagtataagaaccgctggtgtattttactctaactaaaatcagtactccttctttcaaaaatactaggacgtattctgaacaagttttgataataaatttctcttacactatttcactttcggttacggaatcatagccataagaaaatgctttcaaactgcatatacactatatttgaacggatgggggtgattaattcagataatatgaatccaacaataataatttctttggtcaaaacctaaacattattatatcaatagccggtcaaaactcaaaattggatagccaaaatacgcgctatatttgaacggatggggtaattccattttacgtatagatcaaaatcataattcattttcaaatagaaatgtactagtatctcgttatactacaatctttgatgaaataactactccctccgtctcataatataagggattttgagtttttgtttgcactgtttgaccattcgtcttatttaaaaaattttagaattattatttattttctttgtgacttattttattatccaaagtactttaagcaatactttttattttttatatttgcataaattttttaaataagacgagtggtcaaacattataaacaaaaacttaaaatcccttatattatgtgacggggggagtactaaggttatatgcctcaatgatagacatgtcgatgtctccaatagtagcaatccattataaatttgactgagtcaataatatcttctttggcgtgttacaacttacatgcccgacaccctcaattggctagtaacgcaatacaatattgctcctgacgattaccttttgtctctacctgaaatttttgtcaaacaacggcgaaaaggtagacgcaacgagatgatgataagaaaaggtgacattattatatattttacattttatatttgtaaattccaataggtggaaaatttttccaatatccatgtaagccactgaaattgatcttcaatgttactctaaaaactcgaatacattctcctgcaagggtaattcatacgtattctttattctcatcgatataagatgccatctggatgaataagaataatttgaaagttatataccattttgcatggatgttatataccatttcaatgactatcagcctcatcgtttgcccttaaaaaatcagccgttatcaatttttaaatattaaaacttcaatttttttaggatattttgaacgtagttttttagcattggcatttaagcaatcaaagaccatatataaagttgaaatttaattttttattactaataaaccgttagtcatatgcttaactcttggccaaatgacgagatcctttagaataacaaaaatcgaagcaactagataacatgcacctgtgttattccagaaaacaccatatataaataattggatggataattaatacgcaacagtacatataatcccagctaagttgttttcagaaggacaataatcgagtatcgatcgtgctctctcgatgtagacataagtaatacgcgtagcaagcacagtgtatgttagtcgttacatacaggccacgtcggcaaggtcaccgagtcgtgacatcaatcaaactggcaaatatatgagaaagatatcaacagatcgagctaatcaaagataatattactctcttagtttcaaaaataaaagtatttttataacacgtatcaaatagtggtcaaattataatactactcccttaatctcaaaatacaagtaattttctcataaacgtctcccttaatctcaaaatacaagtaattttctcataaacgtctgattggtcgaagatatacaatttttttcattagtataaatttaaatcctagaaaatatatatttatatttgggagcacatcgaatggcatctatctgcagcgtacacagcggtgagatcagaaacggtgccatacttcgcatgacacttgcatggccaaattcagatcgacagatacgacctgtcaagctgatggaaaacgaccgcctaaatgttctgaaaaatgcagtgaccgatttagtagtaaaactgaaacaaagatagtagaagtgtaactgatcgtcatgtaaggttcatgaacgagagagacatcgagagaattcatgtcctgcacgtcagggaattgaagtaaacactggaaaccctgcaggcaatgcaacacgaccacgacaacggcttggcggttgaattgtggatgaaccgaagtagaacagtagcttttaatatatttgctaatctccaaataatttaaccgtactggtgtactaagagtagtacttgttagctaaactgaaagtcagcagtactaaccaactactgtgagctggcaataagcatgatacagctaaggtagagccttgaatcaccgggcatttcatttatctctctctccatgttacggatcgggtcattcatgagcaactactgctatgatcctatctcgatctgcaagtgtgccactggtacaggttggttgtggtcaacctgcatttgggtgccattttcctgtgaatcactggatcgtcacccttgtatattataggtaaagagaattgtagatgatcctagttgctgcctgctacttgcaagtcacaacacagcatggtgattgccgacctgaaagtgataggtccccatcgtttgtcttattttctaataagtcaaaacggtttattaggaaataaaaatgaatttgtaggtgaaacttttataaatgtgttcttggtgacttaaaaaccaatgttgaaaaagaaactacattgaaaatatctcaaaatcaatcttaaaattaagcttaaaaattcaaaatttggcttttttttggctgattaggccatccgatgggagccatacttttcagaatctctttttcaaaagaaaaggcttttcagaaaaaaaaaagtacaaaatctctttttcaaaagaaaaggcttttcagaaaaaaaaaatgtactggtacttgtaatatcgatctgaattctgaaacgttgataagcttgagttgtgcttcgtctcggttttcggcccactgattccattaggcccatggacttccgtggcttgtgcgaccggcccgagctggaagaggcccgtgggcactgtggagagccggagacccaaccaacacgacggcccacgcaagcgaggcaccgcggcgtgtgcgtcgtgaccgggccacctagggtaggcgcgttcacgtagcctcgattcgattgggccaccgcgttggtgaagtgtttggaccatttttgattgaagtcaaaatgtgccccaccaaaattttcatagcttaggacttgttcagatcgatttcattttaaaccatatcattatttaataaaattgataatcatatggttatattttgtttgttaccaaattttggtgatatctataaaattttgacaacattatattgagcacatcctattaaaacttggtaatttattaaaattttagcattaccaaattttgaaaaagttattttggcatcaatcagaacataattttaaatagaatgttagttaggaatgaaaccaaacaaaatttatagtacccacacttaatttggtcacattctaaaaactttttcactatactactaaaatttagttttatattagcatcgaatcaaacatggactagttaactttcatttaccaaaaaattggtaatgcaaaaaatattttagtactaccaaataaattggtaggctagaattgcgttgcaggagtagtagtacagtacgtacatggtatgatcggtgatatgacaagcgacgaacacaggtatcgtacgaggaaccaccgtcccatctctcccatgctgccaactcagatcatctctcgaatttgtccccagacaaattaaggttcattaggcattataccttcttttaccttagtggaaatgggtgataaagaagcacagctaattgatgggatctctgatgatcgccaccgtactaaacaccttctctaactcgctcttatgtgacagttgattgtctgtggtgacgggagataaaagataaatggtccaaccatcttgactcacacacactccctaagaaagcgccctttcagacctccatgagtcagcttacgcacaatgcgatttgccttcaaacacgttgccagcaaccaactggttagcagatggattagccaccacatgattggattggtcatatatatgaagatgatcgatgataatgatttgacaagtcaaagagatttcattgactaccatgtaatattaggtcacgggaaaaaaaaaaaagcaatatcatcataaaagcattttgacaacctaggtggtgtttgaatctcctaaatattaagatgaaggcttggtttaattcccaactttttctttaaacttctaacttttccatcacatcaaaacttccctacacacacaaattttcaacttttccatcacatcgttctaatttcaatcaaactttcaattttagtgtgaactgaacacacccgaagaaaaagattaagtgattcacgcaaaacaaggtggtaataacgtgtgattaattgagttttaattattacaaacttgaaaaatggattaatctgatattttaaaacaactttcatatggaaagtttttacacgaaacgcactgtttagccgtttgaaaagcgtgtcacgagtatctaaattttcatctattttttatacaagaaacgaacgggaccctaatcactcaatatcttctatgagtattttccgtggtaacacgtgctccgctattccgttcgatcgcgccgtatggacagacctacacagtaggaaattaaaattcagtcacatactccctctatccttaaaaaaaaacttaacctagaaacgaatgtgaccctccttttttccagattcattattctataaggatacgaggttgagtttttttttttgacggagcgagtagttcgcatcatatgcatatgttaatatacatgatgttttgaatcaaagtatagtactcgtctactcgatccgtattgatctgtatacaaacaaattcaacaacgcaacagttgcagcgacgtcaactcaattgtgaaaaaaagaaagctggctacaaaaagttctacgacggaagaaggcgattgccaaatgccaattgccacacgacgaaagcagaagagatgcatgggcagacggatgctctgatcgacagggaagggagaaagggaaatgctgcaacgacagcgattgaatttatcgaatagaagcatgcagagaagcatgaaaattctggaattgtgtgctaagccatcgatcaatcgagctaacctgggatttgcgggtgagagcaacgctatctttagtatttttaaaaatctattattgtcttttagggggaaaatgttttttggggttatttgtaaccagtacttctgttggtaggtttcattttataggtgattaatacagcaggacagcgtatcaaacagccatcggtgagtaagtgatcggatacagatgagaccaatcataacatgttacagtgtttcgagttaataaaacattaatgatccatcctttgtcttatgcttatatttataagtggaactttaaattttaaaacttaattttcaagtttatttaatgggtttactttatcgtagtttattttacaacatttgctttaaattgctaagagtatgtataaaaaagtttactcgtaaagatataaaatatttttttatttgttaataagtactctctctatccaaaaaaaagacaaactctggtttctgtgcccaacgtttgaccgtccgtcttatttgaaaaaaatatgaaaaaaattaaaaagacaagtcacacataaaatattaatcatgttttatcatctaacaacaatgaaaatgcgaattataaaaaaatttcatataagacgcacagtcaaaattggacacggaaacccagggtttgcctttttttaaggatggagggagtactatggataagtgtaagtataaacaaaataattggtctataattagggatgtaaataggcagccccgctacccaaataaaaacccacttgctagttcatttcccacatggtagtacaaaatttagaagaaaaaataaactagaagtgacataagcgggctaaaaacatcccgcttgcccgtcatgtttgcatccctacatataacttacttggaagaatatctccctttagaatgtgtaataactcaacaaagattgttcaattgtttctttatgaagattgtgaatgtatgttttgggtgaatatattccatgaaaattatttatattttcttaaagacatatttttttgtttgaatattggaataaatgaatgtcttgtgataattattcgaaagtaccaacgaaacaaacgaattaactgctataaaattttttaaaaaaacttaaaacaatatttaaaattccacatatatattttgtctattaatccatttacccatatttctcattattccagtgatagatgcgcaagatacttgtggtaactttccgattttatgatgcgctagttatttatagagttagggtgtgtatgttgtacttataaggccataggccttgtttagttctaaactttttcttcaaacttccaacttttccatcacatcaaaacttttctacacacataaactttaaatttttccgtcacatcattttaatttcaaccagacttttaattttgacgtgaactgagcacatgccattgtactgtgttaaaaaatactattgaagtaaatgtgacgagcttttatattaatataaatgtgatgagcttttattgagaagaatagagaaaaataataataataataaaaaggaaaataagggtcagggtcactccaataacgcaccagcaccaccttgcccgaatcacaaagcgaggcccacttccaccttttcctatttctcctctccgttctctccgggttcttcgtcgcctccatccacatcgtcgtcgccaccacccacgccaacctcgcatctctctctcacctctgctccaatcgctcgctgatccccccccccccctccccccctccgaccagacacagccgagctcaggcgacgacgcccccgcctttaatgggctttcctcccaccgacatgccggcgatccccacacccgcgccgcccccggtgacctctcctcctcctccttctccttctccccctccccttccgccgccgcggttgcgcttggagttgggggtggcctcggcctcggcccctctaggctcctcctccacctcctcctcctccactccctcttatagcccaccgccaccggccgccgcgcgcccatggccgccgtgttcttccaccatgttgtcggcgacctcaccgtcgggaagcccgaggtcgtggagctgcacgacaccgacacgctcgacgccgccgcgcgggccatcgcggccagccccgagggcgccgtgcccgtgtggcggccccgggcggcgcccgacgagccgccgtcgggcgccaggttcctcgggatgatctccgcgctcgacatcgccacgttcgtggccgcttccggcgtcggtgaccgggccatggccgccgtggtcggggaggtcgtgcagcccaaccctggcctgctccgggaggtcgatccaggcacgaggtgaggtctccgccctccgcccttcgtttcatgatgactaccaatctccccgcgtctgtagtatggtcacagctgtgcttgtttcgattgatctgcccactgaggtttgggggctattttatcataactataaccaattgtgatgcggcggtgttggattgatcagtaggtatagcgtttgtttcaattgatccatgagcgaaatagaaccttttccgcgttttgggtgctaaatcatgtccaacatgtactttcgacgcgctttgtaggcatcctaaagcgattcatgtcgtatgcagcggtaaattgataactctatataatttatatttatgcactgttgttcgtgttagcttggatccgtcactacttaaaacgcagatgctacatcagcccttttgtttaatgtgatctagttggtgattttgtcttctacgtagctttgtagtttgacgtttgattgtataagcaggtcgaaagctatcactaggtccactagaatttttaattgatcacatgggtttgttgtttatttaatcttggatgtgatgcttttgctgattgcaaatatcgattgtgttcctgaagttgcacgggaccttgtttgaaaaagggttaatgtattaagacaaacatattcattgatttaacacgcaagatctttcagatggaagcataatgaatgccaggtagtcctttgcatcttatcatgctaggccacgatacataattggtctgattgatttctggacggaatttaatagtggatcaagatcaagtgtatatttaagttaaaacatatgctcaagtatgcaaattctattccttttatttggtttctgtacacttaggattaaagtaattttaaaggaatgcatataactgtttttccaactttcttcagtttgtaatttgatggcactgtagaattgattcactgttacgtataactaaaagatgctagaaaaagacgtaggcatgcaaaaaaaaattaatatctagatgaaacttcctatggaatgatgcagctaaatggactttgatttgttatatttcctgtagacagcctatattattcaggagtatgcatcattttttcattagccaaagcagtgccatgcttgatagggtaaaattgcatcttagttatcgtatttactgcaacattgtaggtaatagtcactatcaatattcaatagtacagatgtgttaggttattggcatttatgcttcttcatggttcctctcaagcctgtccaggagtatgactggaatcattcagtctactttaaaagtctcagtcccatctaatgtgacattgagctcttatagtaaatcttacaacatgtatattttaaagaaaatgtgaacggagggataactttgatcctcttttctttaagaaggggctttcatttgcactctatttcctgaagaatcttttgttgaactttacagatctgggagatcaatgtcttaaatagtttcgacgtgaactatctctagatatttctattgcacatatcctacttcttgatttgtttagttgacatcacataacttggattttaagacccccgcaccgccgcactgagaactctggtttgttatgttccgttgttcataccatcattaggtcttttccccctttgtttgtttatatacacaagaatatagttagctggcctgcatcatttgtcttctgatgttgaattgctgagttatcacctgaaaattaaaattctttggatctgttttcttgatgtcatcctctatctgcattttcgttaagtaatattgttaggaaaattgaactccaaaagtgcattccactagcagaagtgcagaaagagtataactgaatatgtttcagtagtaacacctcgagaggatagtacttggttgttggtatcctgatgcatattggcggtgagctgagcagtcttctccttttagtatcatgttgtaaaatgatgatgacccagacttaaacaagctatcagatttcaagcggcttgcccttctggttgtgttatgataagggaacaaagtggggatgaggttctatttcgtggtaatgtaatgccataatcaggaaggtgaaaatctatgttgaagctgtacttcatgctattaatggatcatgtgtgaagacaataatttacatgaacccaacccacacaaacacatgcagagcagaccaatcatggctcaatataatatggaaagactaatatggttagatttgcaaatgattgcatgccaattatttctgcatttgtggaattgttttatgtgcttcagaaaaaagaatatataccctaataaaaaaaagaatctaatgtcttacttattgtaacagcatctttggactatatgcctttgcgctttgtaggtagttcatcttttccaaatgcactgctaggtctttaccctgttactaaatgagtgttattgttttttcttcaaggttgatcgacgcacttgatttgatgaagcaaggagtgaagcgcttccttgttcgaaaaaatggcgcctggagaggcatctccaagaggttttcagtgctttacaacgggaagtggctgaagaatatggaagcaacatctccaacctcagctagcagcagtagagagctttcctcctctaccagttccacctacaagttctgctgcctctcaagggaagacattctccggttccttattggatgcctcggtgcccttgcgcccattccactgtctccaatctcttcccttggagccatcaatccacattactgtcatgttgatgcatctgtcccagccatggaagcaattcagaaggtccctccagatccaagtgccgtagctgtagtcgagactacaccagatggaactcgcaagatattaggagatatctctgcctacaagctgtggaaatgtgactatgttgcggctgcatgggcactgataaacctatcggcggggcagtttgtcattggtgccgacgataacgaatcaacaccgatctcagccatcccagtgcctcccatcagctcatcactagtggaagagatcggacctgggcgctcacccagggcaaagaagttcagcagcaggagcatcgggttcctgaacagccaggcgcaccagatggcgttcggtcgaatgaggagcatgtaccgcgggaggagcgcgccgctgatgtgcaagagcacgagctcactcgcagcggtcatggcgcagatgctgtcccaccgtgccacgcatgtgtgggtgacggacgcggagtcggaggaggatggcgtgctcgtcggcgtcgtggggtacaccgacatcttcaacgcggtcaccaagagcgtttatccggcagcatcttgaatctctggatgcttgatccgtaccgtttgctccgttggtggttccttggttggccctagtgcgtgccgtgaactgtacactgcgcctggttggttcttttttgtctttcgagagttggggagttttttgtccgcatgagactgaaactgaagggtatattgtgaattccttgtggatcggtgctactatggcagactcaggcttgtgctttggtacggtggaatgatagtctactcattcgtatatgtataatgtatcgtttctctgtgctcccttaccaatggcccaatgggatcagagatggggtaattaacccagcagctgccatttcttgtcaacctgttcttttcgttctgaagggtataacttgttgataggcatagtatagctttcatcatcagaaacctaattagtctcaagtctgacgtcttaccactaactagtttgttctgaagttgccaatttcagaaagccctatcgcgccgtcgaacaataaacaaagcaacataaaataatttatgtgttgttatggtctaaaatttaatgataaaaataaactacgataaaatactcttaaacaagtttgaaaaaataattttaatataacaagcaattgatgatggtgtcatattgccaagcccacgaactcgatccagccatgggccatggcgagggccgagatcggtgtaaacagccgtggtgggccatggcgagagctcgacaaggcgatgccgtggtgggcggcgctgagtgaatttggtggaatccattgggcctccgaccaccctgcgttcatgttgggccgagtacacgtgaaagctactcgcggaggcgggcctccctcatccacctgcgaatccaaaatttgccgatggttcgcgtccgggcagagcggtgccgcggtggcatatggcacgccaccccgcgcattgacacgcgtgtagagagagagagagagagaccgaaccgacaagagacaaacaacccacgcgtaggagtacgtacactaggctgccggagcagcgtgtcctacatgcactgcacctgcacctggcacgctgggctgaattctgacgccaacaatcgaatcattctcgcagaatcgcgccagggaggaccatagtcacttgaccattttttttaaaaaaaaaaaactcggtctcggccttgtttctgatgcctccgtccgtcactccaggagcatctccgctgccgccggcctcggtatcatcgaccgcgcctcgcatcgcatctctcggaaagcatatgcacaccgcgtggcggcgccgcttcgaattcgtcgtgcactgccgcttgctcggtgcggtgcaccgcgcgcgctccgctgccgacgtcgcgcgcgcgcgaggtgggacgaggaaaacgcacgcaatcttggcgccacgtacgccgatcgagcagctagaggaggaggacgtagcggccgggtggcacgcacgtagtacgcggtgtggcgtggcgtggggttggctcgggaaagatcgggggctcacacaaataatccttcacatgacacacgattcgaacaaaatcaccttttagtcttttacaaaaacacgaaaagatccctgtgatctactaaaataaaaaggcgatttagacacgctgcttcataagcaaagaacaattcggcttagctttagtccggacctagtctctaattacagataaaaatggaaaaaaatccggatgtaaaatcaaagaaaataaagcagagagtactgtaagggtgaaaacggtcgtgaaaattcctgatcgacctaacattgtttccatataaataataccattttcgaccgtacccttttgcctaccattaaattctgaatttaaattttttatcatattaatatcgttattgagtagtttactccctccggttctataacaattgacgttttggataaggttgaagtcaaacttttataactttaaccaccaataactttaaatatatttagtttaaagaaactagaacaacatacataacaacatactacttcagtactcataaaggaagtcgtttagaatagctacacggtctccaaaacacaactttgacttcttgttttataaaaatatttatttaaaagtgatatatgtatacttttatggaagtattttttaagacaaatcttttcgtataatttttacctttttaaattcaataacttgagagttatttatgatttatattcccaagttttgacttaaacgttgtcctaaacaacttcctttattagtatggatggaatacatagatttatctttcaaaacactataataaaagtaaatatgtatttatttattatatatattataatagaaaaattaaggccaaaggtgtatttttaaaggtgtatttttagaccatatcattatccaaaacatcaattaaaataaatctgaagggactaaatgataaatatattaattatcttatttctaaaaagatgctcccgaccggtttttcaccctcgatggtagtatacgggggagagagagagatgagatggcgacataaatcaggggggggggggggggggggg

SEQ ID NO: 9085 - DNA, 20195 bp, Oryza sativa
agttgtgggaagtagcaccccggccactataaggattaagctcgggcctctgttgcaaagcactaccgtacttccacatgtctagtgggtaaggcttagtttgtggctcagtctggttataaacaaaagtacacggattggagatggatgaagtcgggggtcgatggacattctccagggcaaatgaaggctacacgagctgcggcccggtagtcgagatgtcatggcacagggctggcgtcctgctgctagggggctcaatcctgcctgcctgtcccgggggttccggccgtaggtggggttgggtcggtactcttgtctatggctaggatgggttggaaactatgtcacgtcttccgtccatataccgtggtggtatgtggcacgtggttacacgtgaggaagatgtgtcttgtgggtaaagatgtatacctctgatcagagtataatctattcgaatagccacgctctcggttatgggcaagccgagcaatgtacccaagttagtgttttaattcttaaaacctgcttaacaactaaaatgtggaatggttggcctgggttggcttgggacgagctgggacccagggtcgggttgccagttcggtctgaatcatcgtaggccttgggttaaggcaggttcgtgtgggttcacgaccttgtttaataatattgtatagctctagaatcgtgtttataaaatggctttgggtaactaggtgacttttaaatgcggtttactgcaaaacttaacccctattattatccccttgtacccccttgcattaatcatgcatctgctggtgtgacttgctgagtactgtggttgtactcactcttgctcaatcttttcccccccttcagtaagagaagctttggagaagaagtcttaggtggagtcctggcttataccccagttgagcgcctgtgaagatggagccgtaggcccgctagtccgctgctgtttatttttgattgccaggcctgaagtgcctttgtaataatgtaaatattatcgatataataaagatgtgtcttttatatcatgtttgtgtggtgtaccccggcttttcctgggacggggattaatacactagcgttcgggaaaatgcaaattttctcggtcgcgacacttatgtcgatgacttggttgtaaagacgcgtaaccaggaaacgttactctcagatctagcggaaacttttgagagtctccgctccgcccgcataaaactaaaccccgataagtgtgtgttcggtgtacctgcgggcaagcttctcgggttcttggtctctacccgaggcattgaggccaaccccgagaagatacgggctatagagcggatgcgcccccccagcaaacttagggatgtgcaatgcgtcaccggttgcatggccgccctaagtcggttcatatcgaggctgggagagaaggcgttacccttatttaagcttctcaaacgctctggaccgtttacctggacggaggaagccgaaaatgctctcacccagttgaaggcgtatctaagctctcccccagttctggtcgccccggagccagacgagcccttgttactctacttagcggcgaccccgcaagtagttagtgcggcattggttgtggagcgcgatgaggacaattctcatttcacgcttccccaccctgtgccgacttggcccgggagagagcagggaggagaggctcccgagccgaacggtggcccaaggcccccgacgaccggagttggccctctgcccgcttgtcagacggtgctaggagcccccgacccccaggaaggccctgaggccactgtgggaaggccgcacctatcgccctttgaccccgaggctaaccctgtgctgactcgacccgggaaagagcagggagaagaggcccccgagccgaacggaggcctaaggcccctgacgaccggagtcggccctttgcccgcttgtccgacgacgccaggagcccccgacccccaggacggccccgaagccactgtgggaaggccgcccctgttatcctccgaccccgaggtcatcagcacagaagacaagtgcgccccgcgaggctgcttggacgaagagtgccccagggatgcggcccctagcgaagaggatcggccccaccgaaaggtgcagcggcccgtctactttgttagtgaggccctccgggacgccaaaacccgataccctcaggcccagaagatgctttacgctattctgatggcctcgaggaaactgcgccattatttccaggcgcatcgggtcactgtagttacgtcttaccccctcggtcaaatcttgcataatcgagagggtacaggacgggtggtgaaatgggcaatcgaactttctgagttcgatttgcactttgaaccacgccacgctatcaagagccaggccctcgccgattttgtggcagagtggaccccggctcccgagcccgtctcgatccccgaggccagcacggacccctcgcagctgcctcacaccgcccactgggtaatgcagttcgacggctccctgtctcttcagggcgccggtgcgggggtcacgttgacctctccgaacggagacgtcctcagatacttggtccgcctcgactttcgagcgaccaataatatggcagagtacgagggactccttgccggactcagagtggcagctggactggggatccgccgcctcctggtgttaggcgactcccagctggtcgttaaccaagtctgtaaggagtaccggtgctctgacccgcagatggacgcctacgtgcgccaagtacggcgtatggagcgccattttgacgggattgagcttcggcatgtgcccagatgggataacatgattgccgacgaactctcacggctcgcgtcctcgcgagcccagaccccaccgggcgcctttgaagaaaggcttgcccagccgtcggcgcgacccgaccccttaggggagacggatgcgcctgaccggcccccgaggcccgtcggagtccaggcctcgggacccgaggggagtgctcccaactcccttagattgattgcttggatcgccgagatccaagcatacctcatagataagactctacccgaggaccgcgaagggagtgaacgcgtccatcgcatttccaaacgctacgtgctggtagaagggaccctctatcggcgcacggctaatggaatcctcctgaagtgcattcctcgggaacaaggcgttgtgcttcttgccgatatccatgaaggcgaatgcggagcccactccgcttcgcgcaccttggttggtaaagcttttcgccaaggtttctattggccgacagctcttaatgatgcggtcgacctggtccggcgatgtagagcgtgtcaattccacgccaagcaaatccatcagccggcccaggccctgcagaccataccactttcgtggccatttgctgtctggggactcgatatcctgggaccgtttaggcgggccccgggcgggtttgagtatctgtacgtcgcgatcgacaggttcactaagtggcccgaggcttatccggtcgtcaagatcgataagcactccgcacttaaattcattaagggcatcacggcccggtttggagtgcctaaccgtattattacggataatggcacccaattcactagtgaactcttcggcgactactgcgaagacatgggcatcaagctctgcttcgcctcacctgcccaccccagaagcaatggccaagtggagcgcgccaatgcggaaatcctcaaaggccttaaaaccaagaccttcaacatactcaagaagcacggcgattcatggatcgaggagttgccagcggtgctctgggcaaaccgaactacaccaagccgagcaaccggggaaacgcctttcttcctcgtctacggcgcggaagcggttctcccatccgagctcaccctgaggtctcctcgggccaccatgtactgcgaggctgatcaagatcagcttcgcagagatgacctcgactacttggaagagcgaaggcggcgcgcggccctccgagccgcgcgctaccagcagagcctgcggcgctaccatcagcgtcacgtccgagcccgatcactctgcgtcgacgacctcgtcctacgccgcgtccaaacgcgtgctggattgagcaagctttcaccaatgtgggagggtccgtatcgagtggtcggcgtcccccggccgggctccatacggctggccacgggcgacggcactgagctccctaacccgtggaacatcgaacaccttcgtcgcttctacccctgagggggggggtcgggtgtcaggtttcgggctcgggccaaccccgcaccccctcgggcgtgtagggttggccgggggctgccacacatgcacattcttatttctttttcagtatttcaataaaagcagtttcaatttcctaaaggctgtatctgtgctgttttttccttttgaagaatcttgacttgaaataggtcactcgtgctcaatcctgccctcgggggctcgggtcggctaaaatcgccaaacggggcccagaaccgagccgtgccccgaggcgtggtgaactccgggggggaatcggcaaaaacccacaatcgggtcacccataaccctcggtcaccacgttcccggcctggccagtctcgacatgtggatctccccaggcactagccccgacccgcgccttttgaggactagaacctgggcacgagcccttattcaagctaagacacaaaaggaccacggcacagatcatcctcatctcatactcatagcaagatgaaattaacacaaaaatttcttcatttttgattacagattaagttgatctatacaaaaaagaggcccgaaggccttagaagaaagaaaagaagaaaaaactgaagaatggcgggggtctgggggctcagtccgatgcgcccggatcgccggcctcgtcgtcactgtcgtctgcaccaccggcattgccctcctcgtcggagttgggggcgaacgcgagccgaggagccgagccctcgaagctgtcgacgatatggtcggcggcatcccggacctgcgcgcgcgcgcggtcctcggtcccaggagggaactcatccagcgccatccatggagagaaattggggtccctggcctggtaactcgccaggacgagctccaccgctccttgggcgaggttactcgaggatgacttaatcgtcttctcgagctcctcggggagccgttggagagccccagccatcttcgagaggcgctgggcgaggcctccctggttggcggcgtactttacggtccgccctctccagaggcccacttgccgaccggcgcaatctaggcgggagacggcgtcccaaagcatgccgggccctacctcgcctgccaagcggagggcttcgacctccccggcggacgagtctagcgcaccctgcagatcggcgatggtgcgttcggcagctgcgaggcgggcggctaagtcgctttcgcccgcggccgccccgccgctgcgcgccctcgcgtccagctccttcgcccgcgcctcgagctcagcggcccgttggttcagtacggccctctcggcgcgggcaccttccagattacggcgcgcctgctcctcctgcgctgcctcgcggagggacaggctgtccgccagctgttgcgccgcggcctcggccccctcgagagctcgctcccgctcggtgagcgcgtcctcgcggaggcggagcgtgaactcttcttcggcgcaggcagcctcgtgcgccgccagcgttgcttcccggatggtgacggcggcctcgcggtccgccagatccctctccacgacgcaggcgcgctcttccagcgccatggcgcgcgcctcaagggcctcttcgcgccgccgggacgccgcttcggtctccgccgcccgctgttctcgggcagtggcagcgtcaagcaccccctgggcggcgtcgagcttcttccctagctccgcctcccagctcccgtattgagggcggagggtgtcctgcgcctcgttcatcacggtggtggcaatgagggcagccccccgctcctcctccacttccttggcgatctccgccagcaccttcttacgggtttcaagctccgagacgtgccggcggtgagccttacggcccacctccaccatggcctccaccgagcgtcgcccctcttcgacacgcgcccacgcggcgtcgagctccgcccgctctgcctgcagggcctccacctgggcacttaacccatccaacaccgtggtgtttgcggcggccaaggcctgcagaaggggctctgcgttcagtggggcgatagaaggcgtggggaagagccgccttggagaggatgccacgcggctcgggccgccgatggaagtgccggactcggggatgtcccccggacccggttggtcctgagcgtcgcccgagggagtgggcccaagcgacgcgcccgcggcctcgtcacgagctgccttggaagtctccatcgcctcgtcctggcgaaatccggcctcctcccgaacggcttcctcggcctggcgggcccgggcgacttcctcccgagcggcttcctcggcctggcgagcccgggcggcctcctgggcggcctcctcggcttcccgtaggcgatccacggcctctcgccggtcagattcccgcctgcgggcctctgcggccgccggatcctcggcctcagactggccagacttggaatggcgggagggacgcgacgggatctcgctgaaacaaaagaaaagaccagaagatgaacaagatgggtgagtgaaaactcgcgttgagagaatgaatacagccacgatgggtgagagacgaacctgcgagggggtcggttaaacgaccactttggaggggaaatgaggtttccccgagatggttctgtctcccccatcttgcggggccgcttcttcttgcgctccccctcgggctgcgatgttggcgcggccccctccgggcgcctgctgctggcacgcgccaccccgccccctcggggaggagatgggggaggtgttcctccctacttcctcttcccccgggcgtcggcagggcggctgctccccgggcccctgtcgcgggacccagaagcacgaccccctctcggggtagattgttcccccctgcggctcccgcctgcgccgtcgtggccctttggagctcgctcctctgaggccccgaccaccatcataatggtcaggatggaggcgcggtctggatcgctgcagagggggaggattccttggggaacgagggccgcctctatggagttgagattcagcacccgttggaccaatatcttgaagtccttaggagcccagtcccatctcacttcctggtgggtcctcgtgaagtcttcggacccggtgtactcccaggcgccccgagcgcatcgctggagcggcgcaatccgacgacggaggtagtcgccgtacaccatggcccctgtgagcccctgggatcgcaggcccgccaggcggtcgaggacggcgtcatagccatcccccagatctaccggcgcctgccagctggaggcctgcgccgggggctggctcggaagtcggaggcgcgcttcgtcggcgaggggagtgtagaaccagtcgctcttccagtcgtcccacttcttgcggagggcgcaggggatgtagcggttcagcaccggcccccgtggctggaagtagcagccaccgactaccgatggcggcgacaccgactgcacggtgaagaaccaccggaacagccgaagagatgggcgcaccccaatgaacatctcgcacagatgcgcgaagatggccaatgtcatcaccgcgttgggggtgaggtgcgccatctggagatcgtagaactccagaacatccatgaagaaagaagaaaatggcggaaccagccctgccattgcaaaggggagaaagaagacggaccgccccgggtagtctggcgccgggcgtccctcgcccagcgtgactatctcccggccggtggcagattccggcatgaagcggcgcggcagcccagcctgcctctcgctcacgatgcgggaaggcggcagcacgctaccatcgagcagagcggagccccgtgccatggcgccggaggaagagaagattaagagcgagcgcgtgtggcgaaggtagggcacaggaaagaaggagttagggcgcaagcggcgaagacaaggggaataatggcgaaaggaaggaaacagatcccttcctcagtgcctttatactcttgccaacgccgtgcccggctccacgcttctcgcgcccactatttcgccccctcgtttctcgcgcccacgcttccactaatcccattcgcccgcttgcggcgcatgaggtggatatgcggttgtggcagtcgagatagatcatatcgtgcgtgcgttaattacgctcgccgaccgaagcgacgttaccatatctccagacgaaacgaatcgccatgtccagattcgtgtgctactcaagtaatgtggcggtattgaagagaccgctcattattgacagccgagttaccattgccgatgtgcgtggtttgtgaccgttggttttctgcccaattgtggagaccggtcccacctgtcaccaagccttaggagtggcgtcacgcccgaccgtttcccttaaagagggcgattgccctggcataacgccgggggctactgtcggtgacatgggatcaggagtatcatgactagaggtttgaggcagacacaatcgcacacgtggcctggcacccccgagggacgtcgggcccgagggtgatgtgttcgccctcctcttagtccccccgagggggtcgggccgcacccgcctcggccccgagggccgaggcgccccgacccctcgtgggtttttgctccgagtgtatgggttaggtgagcacagtggggctcacctaaccacattttttgcggtttggctgagcgtgtcacgccgcatgtaacgcagtgcagtgcactcatttatccggtctgtgaccagtcacagaccggtcaaatcgcgggttaggtggcgacaggcgatctgacgcacgcctcgccccatcccgtcaggacgagggcttctaggcgctcgcccccagctggagctagcgtgttacctcccagagatggcacgatagtcctggtcagatatatgccaggcttcatcctaaccattacaagcaagatgttgtgtgaagaagggcgaacatgtagattgctaagctgacacgtggtggacaagaatgaccgacgtgactggtctgacaccggtcatgtcgtcagcggacagccacgattccacgtcgcatctgctcccggcgaaagtggaggtagttgtgggccgtctcatcagaaggtgactcggacggcaactatacaaatctctgtccatttatgaaaaggtggggtaagtccccacaaaaaagagagaaatggtgcatgtggtatccccttaagatataaaaggaggaccttgcccacttagatgggggactggacttttccagattaggaactcagaacaagggagaggctggcatatactttgtagctccttcatacacagatctcccaaaaacacaggagtagggtattacgcttctcagcggcccgaacctgtatacatcgcccgtgtcttgtgtgtttcctgtctcgcgaaccttccacatacagagagcttagaatctcaccctgagtccccggccgaactggcaaaggggggcctgcgcggtctcccggtgaggagccccacgctccgtcagtaggctaagagaaaattacaaataaccttatagccaacaacaggttaacggtattattagccttgctgttagccggacgaaatagcaaggacggtcggcgccgcatggcgtcgctgttgtcgcgggataaataccgtctgtcaggatgacttgccgagagagtcgtacctgcgctctggttcagtttgatgttcccgagctggccaacaagtgagaaccccacggtcgtgcatgctggagtgggcatccttctaggcacgtcgacgccgccatgcaccaccattgccgacccggagtacgtagccgcgcgcgtgcactccttggatcgttaagccggtgatcgtggccaatgcgagcggcaggtagcttctcgacgtgacgagtgacgacacggggcgcacaacgtgtgattgctcacgctctcgggtacgagatcgatgtttcctgctctccatggacaaagctagcatgaactagtcattggtatagacgagttaatataccgcaaagcatatgctctacgtacatcatccaaaaattcatatataattgacaaagtgaagctttgatgcgccggtcatgacgttcactggtggaaaaaccatttttggtcggtcgaccagatttcacaatagtcccggttatattaaaaaccgggactaaaaacatctttagttctgatttaaaagctccagggtatttttcaatctttaattaccaaccgggactaaagatctatttgtagttctggttgataacaccaaccgggaataaagatctccatacgttttactcccgaccaaagatttgtagttccggttggtaccaaccgaaaaaaagatcgacgcagatatcggagagatgtgccgatcggatagaggccatctccgcctctccttttgactcctctcctctcctcaacattatcttctctctcctttaactcctctcctcaaccttatctctattcctctccttatctattcctctccttctcctctccttctcctctctactacagcggcggggcgcggagggccggccggcgcgagggcggcggggtgcggagggccggtcggcgcggcggtggctggcggcctcgcggcggcgcggggcgcggagggccggccggcgtggcggctgcggcatgcggtggcgttttttttttttggagaacttgtgattcgtatttgaaattgttgtgtgatgtatttgatttgtgtgtgatgtgaatatgtgatgaatttttcagaagttgtgatgtaatttttttaagattttgtgatgtatttgagatgatcgatttgtggatttggaggcaatttgaggatgattgatttgggattatggggacaggatggggtgaaatcaatatattaaaaacagtgaagaaaagaaaagaataaagaagcaaccggatctagcctctttagtcccgattggtaacactaaccgggactaaaaatgctttatctttagtcccggttggtttttactcccggttatttcacctgggactaaagatagcgtcccaaattcgtagtcccggttgaaaaaccgggactatataggggttacgaattgggagtaaaaaccacttctccaccagtggttgcacggtaattaatctgatccagcatgtttaataggataattaagattgtgacaaactgaagggttaatctgttaacagaagtgtaattgcacaagtgctaatcagacactacacgtgcatgtgtaaattattatcggagttggtgtaagatcgcttgctgattagcttaataataaatacaagctttagttgcttgatattaatatctctcatcatcattcatatcaatgcatttcaacggacgggcattttctagtatatataaaaaaacaaattcaatgtacgaatagtagtgtaccgttaacatctgaatttctctttttttcccttcatgtatagatcgaatttgaacttgatttttgatggattgatagatatcactatactctacatgacttcattttcatttataaaaaaatcataattttgtatcgaatttagaagaaaaaggtacgcgtgagacatcccctcgagaaattagaatccactcccattgctaaacctagcatcattttttttatatagataggagaaaatgagttgtgatcgtaaagaaaaataagaatggtgaatataaaatgctaaatgatttatgataattttattagtagttttgtgatattttatcttaaaatatatagttgtgtgataaatttattgttcaatttatagtttgtaatattttgattaaaatgtctgtagttttgtgaaatttaccaaaatgaatctggaaatcataatttatatagcatgataataaataaaagctaagctacattatttaggaaaataaaaaagcacacaagaaattaaaagttaaacttcatttgttctgtagttacaattttttctgcaaattttgttttagaacataaaagttcacattttcggttctatactatcaagagttatcggttactttaatagtatccaaagttccctctattccctctattccttttcttaaggactcccatcatgttttcaatcatttgccattcactttgactctgtttaggaagcttatgattattggaaatgtaagcaaccggctgggcagaatgtaaaaacatgttttggaagctttagattctttaaaaaaaaaagctctaaagaagaagctaagctagaaagtttttctagcttttagtttattttctaaatttacagctatagcttcttaaaatctagaaaaaaaaactagaatattcaagggagctattgattttagaagttgtatctaccccaagctaccctagacatgctctagaaaggcaggtttttcaccttctagcttctaattcatttttttaattttacaaatacatcttctaaaatataggcgaaaatatgaaaagtttgaagattctagaaaaaaaaaacaacagcaagaaaacccccatacagcacatttggcaaagattgactatatagaaaattccctttctatccaaaagggttgagcgtccatctatttctgtccccgtcccatttgtccgtaccacaagtacatggacacaccgatgaagaaatcatatctcgatctgtatatagtagaaacaactcactaaatcaagaatatcgagcagataaggaagatgcatttttgaacgatcaaaaaaaaatgcttcttctttgaagacctaggactgcctaaatcagtagacaaatttatccatccaagtccctgaagaatgcgagcgagctaggggtataaatacaccaccccgcaaaggggaggttccatggggaatgtgatacaatgtgctcgatataaattacaagatataattatacgcattttccaccatctcatgcaactcttctatacttgtaaaatgtaaaaacatgaaaacagtatatgcaactcttgttttatggcaactggtcatttctttgagccaaatcgcgttgaatagaggaaccacagaatccacattggagatataacaacaaaatatgcctgcagtttggtcagggagaaacttaaaaggtattccaacaggagtaacaccaacgagacaaagggagttgttgaaaagtactcaccaagcagaacgtaattatctcagttgcgaaacctctactgtaactattggatctcattgcatcctggagaaatatctggacctacatatatgtaattcatgaatttagttacatattcatgcgttggagtcacaggatagcaagttaaccaccgtcatgtgaagcccttttggacccattagaacatgttcaatcgtcaagacactgttgtatgtaatttttcttccacattatttatagacagcacatgagacatgatgtacaataagttgcttcctccgtttcataatgtaagactttctagcattgctcatattcatatagatgttaatatgattaagacagttaaaaacaagtcaaccaaatatatcaagggcaaaggactaaaagatgatattggaagatgggtaccttatgatgaaaattttgagccaataacatgaaaatcttgagttgtttataaggtgcagaaatacatgatcgggagatggatccacccaagaagaagacattaggcttatcaacatcgcgaatatgctggccacatattgccttacagaaccgtgatacctgtaaaaagttggaacatatgtcaggagcaatgacacaaaatcattatccatcaagaaaattaggtaccgctagcttaccaatgcttctacatcagtaatacaaagaacttttatggaagcatgaactaagaaaacttcaaggacttcgagtgcttagcacaatattttcatagataccatccaaccatttcaatatgttatatatatcacttatcagtatattttgcatgcttaatgcagctaggtgagaacatggtttgaattgcatacttacaaatattaataatgcatattgcctaataaataagaggtgaacacatatatgggttcaccaacatggaaacataatcatgtaggcacctcatggtagggtctgttcattgcttgtatgaaactcctgccatgtttatatgtatgagaaaagcaggactttgtgtatgatacccccataagaaaagtgccatgaagattcctgaaatactgcagataataaaaccatcaacaaagaactcttggaaatcagaaagggataaagattccagtttgcacatcatttacacaacaggtgattaatgatgtgtaaattaactgtggtactgaatgactgtagctcaatttgcataatgattctaagtgcctaaataaacttaggaatttaatcccattggcttataaatcatataagccaaaaatctgacttagaaaactaagccaataagcctaagtagcccttagtatggcagtataacgaattttaacataaataagtgaatgtagtcgtattttaaaaatgtaaataatcagagtctcagatgagcgtgtttaattaagctgtgaagaacaaatttctggaaggttttgataatgcgatacaagaccaattcacatcaaaatattgcaataaacttgtaatatttaggaaaagaaacatgcaaaatatatacattgtatttggaccgcaagatgcagaaattatataattcacaagtatatactgaacgcgaacatattaatatatataaactgtcaatataccttaaggactaaatcttttccaggccatttataagcagtctcggataacctgcttctttgatgaacttttgatgtcatcatctgcattcatttcacttgatgaataaactagtgaactacttctgcataatttatagcagcacaaatatatggtaaattaccttcgtcaacacaaatgcctgttcaagttgccgaatttggatccattgttctgcaattacaccttccatctgattcaaaaattgtgaaactaacagttgttaagcttttgtgagataggtataaaataaatctagtagcagtgtagcaccaatgaacattaaggtcaatcataacgacgaatggctgctttataagaatgttcagcacttcttatgtgtaagggtagctctttgaaaactaattctagatagctcaactgaaccacatagtttttgctcttcattgttaagacttaaaacaagctacagaagatgatttatatatttttttacaaatatctttattacaccatagcctcttgataagccacaaatgagcactttgaactttacaaaaataagcattaaacatgttattttcctctgtcgaaataattaatacaggtgacatgagtaatgagtcaaagaaaaaaaaattaaaacagtagcattcaaatcctacagagcatgattctgtttatctgatgacgaagaaggataaaataacttaacaaatttccgaccttgtctgaaggaaagtagatattactctattaaagattcaactgatcagttacataatacctttttgacttctgaactcagagattcaacccttttctcagcaccatttgctagggattctattgagtcagcattctcattcatctttctgaccactctccagaggagctgcacctgcacaggaacactgtcaggagtcacatgatgaattttccaattgaagtctgatctcatcatgttcaaaattttggtggagttttgtttgcaacttctgctaatttgcacttgtggaatttagaaaattctaaaaaatatatatatgctgacaagtaatttatacaaaatatgatattatgtgtgtgatacaacaaagacataattttccaatcttctacaagtttttgctcaaatagattagtgtggcatgatctacatttacatttttttcagaagtttctaaattacacaaaaattaatttgcaaatgtccctgggactagctgcaacttcctcataatattttactaatactaaaacattatactgaaaaatatatgtagctttagccagcagaatatagaaacaagtatatatatgtaatatatcatttcaaagatatgattatataatacacccaacaaaagagggaaacccaattatggcatgttatatcatggataataattaataaattattctaaagataaagcgagaggtacctcatcttccaaagctttcacattgctttctgggtaggatttgctttgagatttctacatccagagagtgtaaatattagcatatgcgaggaaagaaattatatgtacatcagcagttggacaaaatttctagaaagatgacaaatagttgaatacatcctactgcagacattttcacaataggagacataaaatcatcagagtaaatgctgaataagtcagttggatgggtcgtgcagtggtggttaaggtcaaacatacacattaagttttaagcaatccccactaacatgtcatctcactaagccattgaatttcaaatattgatagagaacatagaaactgagatcttttaattgtaaaaaagattcataaaaaatagtatatgaagaaaattatccactcatctacagatctactattgcagtgctcatcttatctgctccccaagtccccactaatatagccatagatatttgtttcggtaagaataatatgaccagctaataaacgaagttatacgagaacgatactgtacactcctttttcaaaaaatgtaatgtgtgcatgtagattttaattgatattctacttcctttgcccctatttatcacatcttctcttagctgcattatgatttaatactcataccaattattttctctcatatttcctttgtacttaagtatggaagacatgattatttcctcttcacttttttctggtttcatacccttcttcatctttgttcccatccaaagtaagtcttatattttgaagaggaggaagtacatagttagcaatgatacatccacaccattattcactttattagtcctaaagtggttttctacaaaaaagaattccatgatttttgaagaagagattatgtacagtgcaagtgatgtttattcatctacagcgagatggctaacttgttacagagcaacataacacaagcattcactgatataaccgcataccttggtactctcatatttgttcattaaaatctcaatatcatgttccatagttccaataagattgctgttctcttccaaattgtttgctttactcttcaaagtttttgtgttttcctccaacaaagattctggaacaaaaaatataaattttgtaaaggttgaaggatgatatatttatcaaaattcaaaacaaatgccattggctcaatcagcagtaaagaattccagatgcaattaaactatattgttgacagtgtcaaagaagcttcgtaagttagattttgcaaacagaactagagcataaagggtcaaaaacatattggaaaaccattacatatggtgttgatatgatatgctaccaggtaagctatttcgattcaaaggagaatacaatgtaaatgtgtgaccacgacgcacagccagctgcagaaaggcaacgactccagcacagcagcagcattttcaaccaatcaggatccggtaaattgattctttcatctctagttctctttgttgttaggattagttaactattgcaacgatccagtccatatttactattccattacaatgggtgttaggacactcggtatgtaatgtggttcgatatcattgatcaggaataaagcaaaaggagattaatcaatctaagtattagatccctattggaaatcccagcatctagcctattctctcccctagctagctagtaaataccacccagctatgacaggctgtcctcccggtggtgtttatcccctaaggatccaataacatattaacatcacaggcaggtaacagtctacagttaggcttaattcaactaagtctaggaaagcttaaccggtctcattgtgatagattgaattcaaccacagaatgaaccgacaacgaataattagaaatttgttcgtcaatagcataccgccatgaggatcatgtttatgggtttcaagttttatgaccaaacccaactgcagaagagtaaaagaccaaatcaatggatttggcaagcagttttaaaatcataacactaaccctgcaggtacaaacaaacaaaacaggaactagaatagcataaataactcacaagtacacaaaatagccagaagaatcacaatcattcaggtccttgatccactttttacttcttggtcagattatagaaaactcattgaattgtgattcttatattcatataatgcaaaaaagtacactgccaataaatttaaatgaataacaaattataagtgcaatggaacttgaaacagagttttcaaattctatgttagaaacagttgtacttttaaatccaattattgtggaaacgtttacattacaaacgattaaaactgcaaatagtgttacaaattaaaatattataacttcaggaatagcatataatgtagaaacaatagcataaataatccctgaacctggagtcaatatcgaaagctgaaataagtacaagcattggtcaaataacattgtagttccaattctgaataagtttttttaaaccctattattcagacggtgtgattcaagcaaagtactcgtcgactcgtcgtttacttagtacgcccacgcaagttttcgagcactaatatgtcagtgtacgcacgatgagcacaagacatttcaaatctaagatatggcaagaacaccaaacagcgcgcaagaaacagcactctgccgaggtgggaaaggggagagggccaaagcaagcggtgcctcacccaaatgcagaaccctgagcctgagctcgtcgacctccgaccgcagggcgtcggcggggcgcgactcgatggttgcggacgcggcatgggtggtggcggtgaggagcgcggcgactaccacgacggcgagcagcgccacctcttcggcggagcggcggcggggcgaggggacggagacggagggcgagatgcgtagcccgaaaaaagccatgtggtggtggaggaagaagaggaccgcctccgccgcggcggccatggttttagggttttacggctggcggccaggggggtggcgggggtttgcgctctccgccgccgcggcggtgtccaaatatgagcgggaggcgacagggggggggggggggggggttgagttattaatgtgcactggcagcttaagcttcactttcagtaatcttacattggaaatctataaaaggtgaaaatgaacctatttttttttggagggatccatgatgaagttgaattttgtgcgcattttgccaaaaaaaaaccggggtttctttggccagggtcctgctacgattttggtcatcaaatgagtttgcatttgcctgtcttttttccaataggaggcaaagtgacaaggcaatgaccatatccactccttttggtttggaaatggaaaacatcatttcaggcctaataacttggattccttgggtgcccaccacctaagcaccacatcttattctttcctaggtaatttaattaagaaccccaaaaccctttgggccgttggaagtgggccattcctttttaaggccaaattgtttgtttagcacccaatagaatttcttttaaaaaagccaaccaattggtttctgctttaaaacaaccaatagcccaccttttttttacaggcattaagtgtgccccttttggaaaaatggaatacaaaaatttcccctggttttctttacttttggaagttaacattttttttcaaaacgggcttttggttttttccaagggggaattaa

SEQ ID NO: 9086 - DNA, 15950 bp, Oryza sativa
tcctgcagccccacaaacagcccagtgtccacaggataccatacggccatagataccgcgaacttgtggccattttcatgctgcttgtccacaaggagaatgctcctatgcttggcaatgaacccagcttcgtattcgatcgcattctgcacatcaaatatagcggctgatccatccgatgcgcccgagagcaggtaccgccgctctatcaaatcaacctgaccatattgtcaaattacaaaacaccagcgggagcgactcaggaattgcacaccaaatacgcaagattccatctacagggtgtacaaatcaaattgatctaaaccactaaggtgagagaaggagaaggggagtgagggagtgagaagggggtgtacctggagagagttgacggcgccgttgtgcggggtggtgaactccttgcggttggagagtgcgagtgaggcggtgcggcgcgcccgggcggcggtctcgaagcgccgtgccccaagctccccgcgttccctccgcctcaccgcctcacaccacatccactcggccgcgcacgacagttgtgtccctcttctcagcggtgacagcgggcgatagaaacggtgcggtgtgccagtgagggatgagcggcgcggccgagcgggagctatgctgaccggagatggagaaggattcggcggctgcactgggaagcttctattaaattaggcagtttcaatccgtgttgatttatgatggctcggatcctcccgtgtcccgtgttcgactcacatatggcctcatggggcacctgatggatgtttgtctctggctaatcatgaatgatgagttgtggtgtgaacattgataaatttacatatactataaaaatacacgtgttgcaatgagtgaatactattttaacattattattgttatatacgaattcgcttggacttttttttaagaaaatcacgagctacaattacaagtccgacttttatctcaagttagcatgtgagtgatttttaaaaaaagatttcttatacgactcctttcgtattttcaaaagcaaacgagcttaaaatctaactcaaacacatatctgtatttctaaaagcgaacgaacttaaaaaatgactcaaacacggatgatgtaccaaaataccgacaaaaacatcttcaacttttataatagcagagatagagaagtgtttcattatatcatcattatttaaatgggcttgatagaatatcataagttaaataaagagtgttcactacgatatcgctcgttcgttttattatcgaaataaaactaactaaatttatactaccaccatcttcgtatatatgacgttggctagttcaaacccggccgcctcacaccacatccactcggacgcgcacggcagctgtgtccctcttctcggcggcgacggcgagcggtggaggacggtgcggtgtgccggtgagggatgagcggcgcggccgagcgggagctatgctgaccggagatggaggattcggcggctgcgcttggaagcttccattgaattaggcagtttcaatccgtgttgatttatgactgctcggatcttcccgtgtcccgtgttcgactcacatatggcctcatggggcacctgatggatgtttgtctctggctaatcatgaatgatgagttgtggtgtgaacattgataaatttacatatactataaaaatactcgtgcattgcaatgggtgaatactattttaacattattattgttatacggtttagataggataaaattcactataggaattcgcttggattttttttttaagaaaatcacaagctacaattacaagtccaacttttatctcaagttagcatgtgagtgttctttaaaaaaaagatttcttatacgactccttttgtattttcaaaagaaaacgagcttaaaatctaactcaaacacatatctgtatttctaaaagcgtacgaacttaaaaaacaactcaaacacggatgacgtaccaaaataccgataaaaacatcttcaatttttataatagcagagatagagaagtgtttcgttataatatcattgtttaaatgggcttgatagaatatcataagttaaacgaagagtgttcgctacgatatcgctcgttcgttttattatcgaaataaaactaactaaatttatactaccaccatctttgtatatatgacgctggatctatatgatttttttaagcaacttttgtatagaaactttttgtaaaaaacgcaccgtttagcagtttgaaaagcatgcgcacgaaaaacgagagtgggcagttgggaacgaggggaaacgaactaagcctaaagctgttactgaaactgccaatcctgaatacaaagtaacagctaacaagtagtcttcacaaataaaggtggggctcactgacttagtgacttctagataaaggggatcatgtttcgctactcctctgtgccttaaaccataacatcaaatggtaagctagaaagtcacaatgtgcataaatgatcatcgattagagtcatcaaacaacaaatgagtacagattaaggaaatatatctaccagaacaaaagtgacttaaacttagtgaattagtaataaaacaagtaaaagtgcaactgcattttgttcatgacctgaaaaaaaaaccttgtatcattctaatcaatagaaaaacagaattgtgcattgagctaatattgttaccaaaggacactggaagtaagaatatggccaattgcagtggcaaaagccaaatgaattctaatagccagaacaggaataatgaaacggcaccaaagcattcctgtgacaactgcttttttttctatttgtgcggctattaatttataggtttgtctcacatactatcagaggcacaccatttcctagccacaattttacagtgaaagattgacgataaatgtcaacttacggatgacggcaatgaaaccaaagaaaaaaaactaccatacggatgagactaacatgtgaatatgcagatttagagacctaggagaaagaggacggggagtacaccaaccttgggaatagttgtcgcggactcggggaggaggcgggatgcgacgggcggcggtggacggcggggcgggtctagggttttgtcggcggcggcgggtgacggatttgggttgggaggtgtgggagaaatttcattatgtacaatctaatacgctgaactttaaggctgtgttcgctatgggttgttcccaacttggaacagtagcacggaaaacggagcgatccattagcgcgtgattaattaagtattagctatttttttttcaaaaatggattaatttgatttttttaagcaacttttgtatagaaactttttgcaaaaaacacaccgtttagcagtttgaaaagcgtgcgcgcggaaaacgagggagataggttgggacaatggacgtccgaacacagcctaagagtctagcactcaattcgtaagactttaaaagattttaccactaggatagcgaatttcttcatttcatactaatccagtctagaggtgaaaacggaacgaaaaccatctttattattttcgttttcatattatttttagaatcggaatcgaaaaaggaaaccccggaaacaaatattatcgataccgaacaaaaacgaacaggcgcggatacggtaatgaaaatttatcggaataaaaaaccttttaaactgagcttcaaacttttatcaagtccaattctcaagtctcaacggtcaacaattcatcgtaaaatacaattatatcaaatgaaatattttaatggggcccgactataagctggtccaagatgagtcaagcgctgagggagaggcgtgggtcccactctctttttattttatcttcttttcttttatttctctctttcctccttgtctcttttctctctctccctatctcttttctttctctgcttctttgtgcttctcgaccaggcagagaggggggcggcggcgaggcagggggacgacgcccgggcgtcgggcggcgaggtcaggcggcgaggcgtcatcggtgttggtggtggtgaggaagagtcgccagtgggcatcggcgttgaggcattggtgtcagcggcgtggacggcgacggtgaagcacagagaggggcgagacgccgggggcagggacggcgagtgacggcggggggaggacgacgcgagacggcggtggcgcgagacggcggcggcgtagggggacggcggccgacagcgccagatctggctgcgtgtggcgtgcctgcgtggtgcacacaatgcactaccattgctccaaaatccctagcctctgcctctgactctcactctcctcaactagggttagctgtagtgggttgggctaggcaagcgggaggtattatggactttgtaacttcgaaattccgagagaattttcggaaagtttctggccgattccgagttccgacggaaactgctcttatcattttcgattccgtttccgagaaaatattttcgtattcgtttccgtttctgaaaaattccgatcggccgattccgttttcgaaaacctacccggaatccggaaatattccgtaccgttttcacccctactcccgtcaaatttacagctcattcgtctccttccgtttacaccaatgcagggcgccgccgtctccatctccaggccctcccttgccgccatggcgcacgtctttcgcctttgtttgtcatccccgccatcgtgcccggaggccggagctgcactccatgccattgcgctcgggtgagcataccaccgagtgatgatggcagtggccgagttcgagtactgcacgcgtgcgacgacagtggcatggttggggatggcttcacgccgctgcatctcccctcctcactctggccactgcatcttccctcatcatcgctcctctcccctctctcctctggtacgtgtgggtcccgccgcctgagatgaggaactcgtagccaaaacttactccgcgttcttgaggaggccacgcggatggacgatgtggcaacaaatatttggttttggggagggaggctgaacgccacatcggcgcattgtgaacgccctaagggtgttcttagcttttcatgtcagcttttgccatcttctattttagtcctcacatgtttttaaactacataacgtataaaatttagcactaaacaccctcaatttcagaaacaaggatacaatttctccccttccatcattctctctattccccaaccaccacaactcgatgacggctggcagcacagcgagctccaacaaaggacggcggctccccaacctcctcccaaacagcggctcggagggcgacggcggaggcgcaagaactcgccgagacccctcctctccttgccggcgacgagcgctcgacgggcgacggcggcggcgcgggagctcatcggggcccctcctctcccgggaggcaacgagggctcggagggcgacggcagcagcgcgagagcttctggggccctccactcccagccagcaacgagggctcggaggacgacggtggcagcgaggatccggcgtgagagctcgtcggcgccctccacttccggccggcgacaaggagacggagcgccgagggcgacggtggcggcacggatccagagcgacggtgaccccgacggtggagagagaggtttgtttcgatggtggggaggtgggggtgatggtctacagcctggattccatgcttttatctgctttttccgttgagcttctcatgtcttaagttagggtgtgtttagttctagggatgtaaagtttttgaagtataaggaaacacatttgaagtattaaacgtagactaataacaaaacaaattacagattccgcctgtaaactgcgagacgaatttattaagcctaagtaatccatcgttagcaaatgtttacttagtatcacattgtcaaatcatgtcgcaattaggctaaaaaaattcgtctcgtaatttacatgcaaactgtataattggtttttttttcatatttaatgctctatgcatgtgtcataacatccgatgtgacgtttttagctaaaaatttttgggatctaaacaaggccttagtcccgtgttcctcacaaagaaatggtcccccactgccacgttagcagctgtccttcgtggcgagatgccacgttcctgcaccgtgaaggcctgaagggacaacatcacaaaagtcagtcaacttgagaatcatatgaatcattgaaggcggtgacagccaaaaatatcatcttgacttgtgctacgatttagattggatgaggccagagcagaggactcatagcctccttgctttgcttcttgggtgtatcatcaataggtagcagagagagtagcagacagcctgtgaaagagagcaattgtatggcagaatcgctgcttctccccgtagtgcacggggtgatcggcaaggcgaccgacgcgcttgtccagaaagtcacccgcatgtatggcgtcgacggcgaccgccgcaagctggagcggcagctgctggccgtcgagcgcctgttggccgacgctgagtcgaagagcgagaccaaccccgccatcaagcgctggatgaaggacctcaacaccgccgatgacgaggccgatgacgtcctcgatgagttccagtacgaggtgctgcaccgcgaggccatgagcctcaagtcgctagggcacaaggtacggagctacatgacccccctagagttccattttaccatgagaaggaagcttgccaaagtgctcaagaagatcaacgagctggttgaagagatgaacacgtttggcctgttgctgcgagatgagccacaacaactttcttaccggcagacgtactcagtgctgccatcaaatgaattagatgatatctttggcagagacgacgacaaggaggtagtggtgatcaaactgttgctcaatcagcgagatcagcacaagtgggcccaattgtggggatggggggtttaggcaagacatcgcttgccaagatggtctacaatgactacagggtttagaatcacttcgagctaaagatgtggcactgtgcgtcagacaactttgaagttgtttcccttctgaaatccatcattgaattggctacaaacaaagcatgctaactgcctgaaaccgtccagttgttgcaaaaggaactacagaaggccgttggccggagaaggtttctgctcgtgctggacgatgtatggaatgaagaaaagaagaagtgggaggaagacctgaagccactcctgtcttctgttggtggtggtgatggaagtgttatactagtgacaactcagagccagcgagtagcatctataatgggcaccctagaataccataacccagcatgtctgagtgatgatgattcatgggaattattctcaaagaaagcattcagtaaagaggtacaacagcaagctgaattggtaaccgctggcaaacttattgtcaagaaatgtaaggggcttcctcttgctttgaagacaatgggtggtatgatgagttcaaagcaacaagtcaaggaatgagaaacaattgcaagaagcaattaggggacaatgacaggggcgaagatgatatacctatactaaaattgagctacagacacttattacctaaaatgaagaatgctttgccttttgttcagttttcccaaaggaccatgagatggacaaagaagtgttgatccaactgtggatggcaaatggtttcattcaggaagatgaaacaatgggtttggaacaaaagggggaatatgttttctgtaatttggtttggagatccttcctccaagacgtgaaaccgatcaagacattttctttcactgctgatgagtctataatttgttgcaaaactcatgatttgatgcatgacttagcaaaagatgatataccgaattttcctatgataatgaaatgagtctaacagtgggattgctcaaaatatcatcttctatccacactttgataactgcatggttactagtacatattaatgacttaagacagatgtcattaagagattttggtactgacttgagacttatgtcattaagtgctttgggtattgtctgtattcgggcttgcccttctcatagccaggtgatcaatccaaagcatctacgatatcttgacctttctaggtcttagatggatgtgctgccaagttcaatatgcacgatgtataacttacaaacactaaggctcaacgattgcctacttctgacatatttaccggaaggtatgagaacaatgagcaagctcatccatctttatcttcttagatgtccattgaagaggatgccaccaaatattagcctactgaaaaatcttcgcactctaacaacatttgttttggacactgaacctggccgtggaatcgaggagctcaaggacttgaatcaccttgccaacagattggaactggagagctacggccaagctggaaccggtcggttgggctactcagagagttctctgataggggagagggggaaaatggctggggagcgagcgcgtgagggagcgccctcaccgcccggtggacggccactccggtgtccgacggccacattccaaaccccagtttggttcctggcgcgacatcgtggtggggattggggaccacacgttaggtaaggctgagaaggaggcggcttggatagaggtgagaaggaggaaaggagttcattcaatggcgacctaccggcgcccaaccactcgtccatcagcattcaaggcggtgagggatatcccctagtggttgcagggaggtgtttcaaatgccttggcctagggcatcagaaggcgcagtgtaccggccagattcgttgcttccgttgttggttttcgggccatcttgcgagtttttgcaccgagcatgacgaagtctcttcaactcgcccgtgctcagttgctcagcctgcttccctcgcttctctagctcgcgtgcaccctgctgctcgccccgttcagccgacgccatgtcctgctgctcgtccagcaccgcatacagctgctcctacttctcgccagcgtccgccatccccgtccgctgcttcgggtcgcacgcgtcccggcctgctccgcctgccgactacagagtggttgggcgagctgaggaagaagctcatccgcgggacgtcgtcaagtcttccaaggagatggcaggttttcaaatctgcgcggctagggagcacgcctacatggagggttttcgagtcggcgagccggagctgcggctggggactggccgttgcgtgctgtcctggacggtgggcatggagcacaatgaagcttggctcaaccagcactcgctgttggccatggttctgaagacaagaccatcggtctcaccgggggagatgttagaagccatcgtccagcacaccggcatcaacgagagcaacgtccgtgtcgacgtgacacatacggaggattttctggtgttgttccgcatgctgcaagatcggaaccttgttctccattgctctcatgagattttcgtgaagggggttcccacgtccttcaagctgtggagccgccggagttgggcagacagctcggacttgaagttcttcaccaagatttcgctcgatgggctccctgctcacctgtgggagcgcgaagtggtgcgcaaccttgtcaacgagctcgagggggagctcatcgagagcatccctgccaacgacaccagatgtctgggcctcttcgcctggttcaagaatcctaacaagcttcctcaacggcttcaggtggaggtgcctaagaagataggggcgggcggctcctggaggaagtcgtcttcgagctctgctcctcctcgagcgcctagagcacggccctcttttactgtatggcgtcttcctccacgttgaagaggtgaacgatcccatgctgctgcatgcccctgataaattctacaacgatgatggtgacgatgatgtgacaaggcgcaacaccttcgactgctgggctaagtggttcaacagcgcaggtctgtggccatcggaccggggaggcagcactcgctatggaggagcatcaggttcagccgggggtttggaatgccaagcgttcgatctcctgccgtcggtgatacagcaaccagtccgtcttttcaacacggaggaagctgtgtcggccatcgttcgtttcggttcgtcggctacgggggaggatctgctcccgtcttctccagacgctgctgctgtcgtcgggacgagggagctgggcacacaagtgccggtaacgcagggtttcgaggtagcggcgacggctgttggtgtggctgcttcggttacccctgaggttggcgctgcttgccgtcgtcctatggggtctggttctctcctcagctgagacgatcaacgcgtcgcttcaggtggcgcaagtcaacgacgtttaacaattctcgccgttgactcaggtgatggtgctggtctcgcccgaagtggtggtcgacactgtcgaggtgatctcgccgtccctacctcgtgtgttcgagcttgctgtaccgggtgcaggggcgatatgatcccctgttgctgagctcatgttgccaacgaggtgctcgcctgttgtctccgattcgctgcgtctgacggaccaagagcaaggcggcggaggatggtgcggcggggtcgaggtacacgccccgacagtctcgttcgtgttggcggtcgaggagcaaggcggaggttcacggtgcagttcgccgatgctggcggacgagaaacatgacggtggcccacggtacagagaggtcacgaggtcaacctctcctgtggcacaccattgcactgtggacaaggttcacggtcgcaactcccaagacgaagagagcagtccaaggccagcctcggcgcctgcttcctgctggtcgctgcagaccacaccgctccctgctagacgcctttgcttcgacgacctctgtttggatcctccattaataggggcggttgaaggcagcagcccccaaggtgggaactcagcgggggaacattttcgagctggaggtccggctcctactgaagtcgtccgtgggttgtatttggcaattcctcaagtagcccaggaacaggtggtgccttttgaccgtgtctactctcgacgaaaggaggccggctctaaattgggcatgttgccaactcagatcgctgtgtcggcaacccaggaagtgcagagcgcagccgcagcggcccaggaagcaatcctcgttgcggccgatgagaacatgtgcgtacaagtcaacatcttcgtcgacgctatctccacgccgtcctcatcgtccgtcctcagcaagccgcctgcctccgtcccaatcaccaagagcagatgccgcccggtgatcccagttgatttcaagccttggagaagcccacggctggctctgcaaggctcaggcgcccgacaccactccatctccaaggcacagcgggtgactatgaagaatctgggaatcattgaagaagaagaggaagcaaacgatgaggcgatggaggaatatgttcaactcttcgacgaaccgctgccgcctcaccattttgaggccttggcggagctgcttcatcttgaactggcggagccggagttccaggcgctagcggatgtggcacctttggcagttgcttctcctgcttgattttgtatgctgtgttagccgggggctgggggtgtctggttgttgtaatgtcaggagtgagtttcaatcttctagtatggaatgtaagagggctaaacaacgctgtgaagtgctccctggtgaaggagtctgttgtttcctccaatgcgttggttgtgtgtttccaagaatctaagttagaagttgttgatcgtgtcactgtctttgaactttgcggccctgattttgatcgttttgaatttcttcctgctcttcaaactagaggtggaatcattgtggcgtggaagggggatctattccagggcactcttgtccatgttggacaatggtcggtgacagttaatctggattggcgccagggagggagatcctgggctgtgacctcggtgtatggccctcaaagggatgatgagaagctgttgttttcggaggaattgtctgtcatcaagaattgttgtttgggggaatggatgatagccggtgatttcaacctcattacagcagccgaagacaagaataacacaaggatcaatcggcgcttgatgaatgcttttcgcagtaaggtgaacgatctagaattaaaggagatgtatctttttggtagaagatatacttggagcagtgagcaggcaatcccaactttggtgaaactcgacaaattgttcatttccactcagtgggaggatctcttccctgaagctcatctgcaggctctaagttcttcaggttcagaccactgtcctcttcttttaacctggggtaaccgagtccctaagcaaaaaaaaggttcaaatttgaaaccttttggacaaagcttgatgatttcaatgacgtagtgcaggagtcttgggggagtgaggtcgatagctctgatcctttctgtattttgtatgtgaagatggcaagattaagcaaggcacttggtaaatggggacagcggaaaatcagctcgttcagattacaacttcagattgacatcaatggcactttaagtgaccccttcaagcctatgagggggctaagacaaggggatccgttatctcctcttccttttgtcctggtgatggatactcttcatgctatgttgtagaaagcaatgtcagccgggttgcttgataaagttaaccaccggagcagagcaccaaataattcgctctatgccgatgacgcagtcatcttctttaaaccggttcgtcatgaggccatgctagtcaaagccgtgcttgatctctttagtgaagccactgatcttcttcccaacttctccaagagtgcagtttcaccaattcgctacacagaggaacaaagctccttggttcaggatattttacattgcaaacttcagaaccttccaatcctctatttgggtcttccgctctccgtgaggaaaccaacaaaagcagagttacaacctctttttgatcgcttggctaaaaaggtggcaggctggaaatcaaagttcctttcacctgacgggcggctctgtctgatcaaatcaattttgatggccattccggttcactttctctctgtgatgcagctgccaaaatgggccatcaaggacatcgaacgccgctgcaggggtttcttgtggaaaggtcaagaagaagttaatggggtcattgcctagttgcttggagagccgtcagtatgccagttgaatttggtggtttgggaatcagggatattgagcttttcgggaaggttttacgactgaaatgggagtttaacaggcttgaacatgaagataggccatggacaatggctaattgggaatctgataaggatgtccgcgacattttcagctcgattgcacagcacatggtaggagatggccgtcgcatcaatttttggagaggtaactggctgcctcgtggggaaagtattgtaaataattggcctatcattttctgctttgtcggtcgaacgaagatcacagtggctcaaggactgacgaacaacaggtgggttagagacttgcaggggtccatttccaatagggcccttgctgactatctgaatttataggatgagctgcaacaagtgtctcttcaagacgggcagtcagattcggttttatggaggtttacagcaagcggcgccttctcggtttcctctgcatatgagttcttcttctacccttcggtgaagtgcccccacggtgagctgatttggaagaccaaagcgccggcgagagtgaggttcttcctttggttagctgcgaagggccggtgtcttacggctgtcaacctcagcaaacgaggctggccacatgatacgacatgtacactgtgtcgagctgcgccggaagactgcatccatctgtttacaaaatgctctttcactaacagagtgtggcatcagttgagaacttagctgaatgtggcgtttccccttcctgatcagctcggtctacagcttgcagaatggtggctgcaggtgcgtctctgttttcggtcaaggtacagggccgcctccgattctctgttcatgttggtctgctggaagctttggaaagaaagaaacgcaaggattttttatgacagatcaagggtggtagaacacttggtggcagacatcaaagaggaggtcctgatctggagagcggccggaattttttcttgcggggagtagcagcatgttttttggccccctgtaaatagttttcctgttctttttcgaggtttccctcgactcgacagtataatgttgtgtatattgtattaccctcttttatcttaatgaaatttggtcgacttccttccgccgacccagcaaaaacaggttggaactgtacaatttgagtaaaataaatagcagggaaaatggaaaagatgccaatctccatctgaagcaaaatctaagtgaactagtactttcttagggtggtagtatattttgcatgcctgaaaacaagggatgcaacgaggaagaagtgttggagtctcttaaacctcacgctaagctcaaaattttggaactacacggatatagtggcctaaagatcccacaatggatgaaagacccacagttgttgcagtgcctaacaaatctccacattttcaactgtccaggatgtaaggatctatcgactgtgtggtttttggtctcgcttgagggtctgttcttatctaaaatgaaaaacctaaccacattgtttatgaatgtcgctggtgtgaaagccgaatgatactacatccctctgcaaattttcccaaggttaaaggatatgactctatgccagttatcaaacttggagaaatagacagaaaatactgttggcgaggccgatactattttggttacgtttccggagctcgcaaagctatatatcttcgattgtccaaaacttgcaagtgttccagattgcccagttctaaaagaattgaactcagctagatgttgcagtcttgcaatgagctcacttgcacatctaacaactttgtctgaactcatttatgaggacaatgagcgtgtgagaatgtcgttgggctcatggccatctctcacgaaactagatgttagttcgtcatataacaaaatgtccactctggaggtcggtacaaaccaaggcccactagaaaaccttcggagtttaacgctatatcgcctcaactgcttcacagatgtatctggtttctcaaaaatacatcttgggctatgtaaatgctttgcctttgtggaggacttgtctattagtggatgcgacggccttgtgcgctggccaatagaggagctcatgagcttgattcaccttcgatccctgtctattgaaacttgtcgtaaccttgagggaaagggttcatcatcggaggatggtcaattacatatcccgatgctgcctgcatccctcgaaaagctatgtctagtatattgcccaagattggtggcgcttccttcgaagcttggaaatttggccaggctaaagattatgagtttgcagcactgttatgacctgaaagagttgcctgatgggatggatggcctcatttcacttgaagaattgaagatttggaactgcccagagatagagaaatttctgtagggtctcctacagcagctccccacactcaaagagctacttctatggggatgccctagcttgcaaagactgtgcagagaaggcagtgagtattttgatctggtctcgtccgtccaacacatagacatttcaaaaccagaaacagaactggccgaatggcccgaatcagaaacagaacagaccgaatcaagatgtaacaagaacaagcagcttgtaaagaggctcctcccctct

SEQ ID NO: 9087 - DNA, 14564 bp, Oryza sativa
atagtaagtgacataccatacataaatagttaagtgacatagtgagttacaaattagaaaccttactaccgaaaatactaattgagaaacatatcttttttgtaccttcttacctacattaataaatactaaatacataattaatatttaaataaaaatattattatataatatattaatataaactaattaaaaaataaaaataatttattaaaatataatacttaaaaataataaaaaaaaaaataaaaaaaagttacaataaaaactcaaaatcccttgtatcgtgggacggagggagtatataaattaacaagtcaatcatggagcgcttttgcatgcatgcagcgcgcatgtggaggagagcatatatatatgcttctacgtgcaaatgctaaagaacccatcacaattttttgggtgaaagaactttgaaatctatctagtatatggtgttattacactatagctgtactgtaatgacattttaatctctatataacttacaatgtactccgtacaggatatatagaattaatgtatctttgtttccaatacttatgtaaaatctatatataaattataatacaaaatactcatagaaattatatatgttagttttagtactgtataaaagttaaattttgaaagtgttttaaaataagagataaataactagcctaatattgtccaaataatctacctcaattataggtaaaaggaagaatctatataagaaggtttctaaggtaaaaggtacaaataatctatctcaattatatttctaatgtatgcagactcatccaaaactgctttcgatgagtgacatttcacagctaagaatactgcgaaaaatataatttttggcggaaaagagagacatatgtacacatgtatctccagtttatctaaacaaaggaagtcgtgaagaaaaaaggaagtactactccgctgatgttagccagctcgtgaaatcacagtgttgagaagataagcattaagcattgacgagcctcctagctctctatagaaggagtcagtctagctgaagagaacacaccagagaagcaagagtagtagtttctcctgcctctctaggcagttttacccaaaaagaacacttctctatagatacaaggaccaccggatgcctatacaagatgcaagctaagaataagaactaccaaagaggtttctcaacaaacaaacaatgatatataagaaagttacttcatattaaacaagtaagcttacatacggttttctctttcgggaccccaaagaaaggtacagacaagttttctcaccttagaccgtttatataacatttgttgctcccaatatactagaaaggtaaattattaacattactacaggactaagaggctgaaggttcttaaagactaagctagaggatcttgcttctctggtctgtgctctttagctggaccaactccgtttatagaggctagagaaggaggctttgtcggtgcttcgtgcttatcttctcaacactgtaatttcacgagctggctaacatcacagagtagcacttccttttttttttcttcacggcttccttcatttagctaaagtggagacaactttgtacatatgtctcactttttcggccgaaagttatattcttcacaatattcttagcagtgaaatgtcactcaccgaaagaattttgtgatgaatctgcaaacgttatcactctttgcttgtagtgttcttctgaactattcttccctttacccttgaaatatagttgaggtagtttacttgtagactattaggcttgccacccctgaatgattgataaatccttatcaattgaacctttcttatatattgaactttgaaatctatctactacctatatagtgttagggggcaattgcgtttttgatcctattttaaggtctaactatcaatttaaccctattttcctaagtttgctcttttgactctcttttttaaaaacgaacgttcggtctggccctattccgttaaggcaacgtaacagtgttaattcagaaaaaaatagcctttatgcccccactcattttcatttgactctactttttcaaagtgcttgcctaattttgtgtatttttatctaaaaatgtgacaatttttttactaacataagtgacaaatttaacttaggtttgagtgatttgacaattttgaaatagatctaacttcttttggacgaaattcacttagatttgatatatttttgagaaacttaacatacatttgacagatttttgataaatttcacaaaaaaaaattacataatccctccagcaccagcagcatgccgtcctcctgaccaggagagcaccgggcaagaacaaagagaggcgagagagagatggagagcagcagcaacagcaaaaacaaagcagcaaaattctagcggccagcgacggcgagctcccgcgccgcgcgcctccctacgcgccctcccgcgccgcgcgcctccttccgcggccggcggcggcgagctcccgggccgctcgcctcccttcgcgccccgcgccgtgcgcttcctcccgcgcgtgcgtctccttccgtgcttggcggcggcggcgggctcccgcgccacgcgcctccttcgcttcgcacaccgcggcggcgaggtcccgcgactccctccttccgcgcggagcacgccgagagagatggggttgagagtgactggataggattgggagtgagatgatagtgttgagttcaggggtattttggtcagtttgaataataatttgatcttttttttttctaaatgaaaccctaacggtgtaactttttaaaaagcagaatcaaataagcaaactacgaaaagtagggttagattggtagttagactctaaaatagggtcaaatgagcaattgtcccatagtgttattacactatatagctgtactgtaataacattttaatctctataaaacttactgtataatccgtacaagatatatagatttttcgtttgtttctagtacttatgtaaaatttatatataaattataatacaatatagttatataaattacgttaattttagtgtggcgtaatatagttaatttttgatagttttttaaaagaaaccgtcgcaagatttttcttgatagtcctacttgtgtggcgatagctcacatgtggaagtatgatcgggtctggccccattaacagatttgtggagccatcgtttctcttattcatggaataagcgaaacgacgtatttataaacgaaaagtaatttgtgaataaaacttttatatacgtgttcttagcgatctaaaagcaaaggctgaaaaataaacttcgatgaaaaaaccttaaaataagtttcaaatttaaggttgaaaattttaattttggctgataagtataagcataagcgaaaaaatgaggtccttgagctgtctttcatttttatttttttcctggaaaaagtttgtttttcatccctcaatcatatgacaagtttaattaattcacatctcttaaccgtagaaccaggtataaagactcgcttaacgattgaaaaccggataaatttacctccctacggtggcttccctctcacctcggctggccgtggctcctaccctccttcccggggttggaaatttcggatgaaattacttcaattttttcatgaattttggtaatacttgttcaaattcaactaaattttatttaacatttcggaaattttgaatcgaattttttaaaatttcagtatttcggtgaggcccgatcagatcggcataaccaataggatcaaccctgctccttctgcggctcgctcaactggcaggggcaacgacactggcgcggaggtcagcgacagcgagaatgaagggatgcacgtacgtgtcaaggtgtgagccgaggccgcgcgctcggttcccgctgctgctcgctttcctacggagaggagccaccgacgccgaggcccttccttcccgccaatagccactgccgaggagaagcagtcgtcgtcgcgccgggatggggatcgaggtgggtgcggccgtcgtgctcactacttgctgtcgatgcccctgcgcactcaaccccacgaaggtgacagatgaacacgagcaggaggccgatggcagcggcctcggagacgctgacatagagcaagaggagccatcaccaccggcgcgcggagctactagctgctggcctcgagcgcgacgaggaagttgtacgggaatgccgtggaggacacgaggatcacgccgtcgagaacttcggccgccacagtgcgcctacgcgtcttaggtcgtcacgggtggcggcggcgggaaccttcaattcccgccagcagcgccgtgttggctgtcgctcattatcgtagcaaaagtcgctccgcgaggtcgagctcttcacggcaaagacagtgagcatgcacacgcttgcttgcttgcttggtgccaaccagtatgtcagtggggatcgaactgaagatgggttgttgttgccttgttggtctgattgttgaacagctccatttggggtttttatttgtatcttcttcttttcgattgtaatgcaatgtaagcgtcacctacctgccatgttggacgaatacctggtcgatcaatctgccacgtaagtaccatattagataaaatcatctcgcaaaccatcgagggagatgaattgatccggtttctaaagttgagagaatttttatatcctgtattgtgatcgaggcacaacaattggactggacatataattaccatcgaggagatgaatcgatccggtttctaaagttgagagaatttttatatcctgtatcgtgatcgaggcacaacaattggactggacataattaagggacgcagaatcgacttaattcttttttttccctctgtcacagggctgactcagcatttcaagcccaaacacagttgctttgcccctaaaaagaagctatataataacacacctaataaactaagtgacgtatacgtaaccttgggtaatgtacactgttggagaaaggggctttactcccggttcgtaacccccctatagttccggttttcaaaccgggactaccaatccgggactaaagatcactatctttagtcccgggtaaaaaaaaccgggagtaaaaaatgtatctttagtcccggttagtgttaccaaccgggactaaagatagagctagcctagctagatcggttactttattattattttcttttcttcattgtgtttttaatatattgatttcactccatccccatcccaaaatcccaaataaattatccccaaatccccaaatcggccatattcaaatagatcacaaaatcttaaaacaaaatttcatcataacttctacaaaattcatcacaaatacatcacatatttacggacatcacacacaaatcaaatacacagattcgaatcacaaattcttaaaaaaaagaaaaataacacaggctgctggccactgccgcgccggccgccgcgaggccccccggtccgccgcagcgccgtccgccgccgcgaggccgcacaggcctccgcccgttggcgccccgcccgccgcgggaaggccgccgcccgggcttgtgccccgccacgccgcaaggccgccggccgcccgatctatcagtgggatgatgggtagggaaggagaggagttagaggagagaagttagagaggaggaagaggaagggatgatgggggagggaagttgaggagttagaggagaggaggaggaagaggaagagatgggatgaagagataaggttaggagaggaagaggtgaagagataaggctgcccatctcctcctcctcctcgatctcgcagatggcagatgcctcatactctccgccacgatcttttgttccggttggttttaccaaccgggactaaaaatagatctttagtcctggttggtaacaccaaccgggactaaagatagtatgcatcttttttcccggttggtgttaccaaccgggactagaaatagatctttagtcccggttggtacattaaaaagcagctctaaacttttgaatcgggactaaaaataatttttaatctcggtttttattacaaccaggactattgtagattttggccgaccgagtaaagatggtttctccataagtggtaaccagggtcaatagtctgaacttggccggggagaggacgttaagatgaatcaaacaatatcagtttcaatcaatttgtgaccagacaatggagcttatcatacaacagacgcagcacacgtacatgttgtgtggtttgcaggcctagttctagtgcacaactgctgaccaaaaaagttcatgaacaaccctctccggcaccggtaggcctccccacacacatgcacacgagcggctttattttattggagccgccgtttgcagggcggacatacgtatacttacgggtgcccagaaattcagtttagaaaattttgagctatagtttatctattttcatcatatatatattatgttagtttaaacttagacatctgtatcaagtaaagcaagcgagtggacagtaaaccatatcaacttgtctatgatggcctatctatgacagactgaagtagctatcacagatgacatcatgtctgacgggttaaactaaaacttattgtagataaggctcaaggggatgactcgtcacaggtaagaactcatctatgacagtatgacgggcctatatcagaacacagcacatgacatctctaatgggcttacatataggcccgtcacaggtgaccttcaacctgtggtgggtgttaagtttgcaacctatcaaagatgagatatctcatctcaaacgagttaacatcttatattcgtcagaaataacttaaaaccctcccacccctcatccccgcacctaccccaccccctgtgccccttctcctcccgtcctcatcttcatgtctcatcttcctctcatcactctctccttcacatctccagccgacgcctcccgaccgctggccaccggtgcctcccccgtctcctgaccaccggctgccggatctgctcggatctgcctacggggcacggatccgtccatcgcggcctctcccccaaaggttagccaccttctcctcagccaccccaccgtcggccgcaggatttggactcaacgagtttgggggacacggatctgatggcagccgccttcctactggccactggatctcgtggacttatgggacgcatatccggccaccgcggcctctccccccgaccactagccgccttctcctccgccacctgactgtcaggcgccagatcgggcctccgccacctccattccatagccggcgtccgcggcctcccctcctcccccgattcttcctctgccaccctaccggcagcagctggatcccccaaccgaccgccagcatcctccaccgtctcctttacccaagagcgctgccgccgtttctgactcttgtaggttatgcttgatttttcttatcttgcaaattttcattgccaaatttcagattgggttatattctcggttgcttgtatggatttgtagtttgttaagatggggattattactggtgtgatgtatattgtcactcaagttgtgtaatctgtgatgtacttgtgtggatgtgcttcatgtgtagctatatctctgatgttaacagatatgtcaataaagcgcaaagttacggtgtcttgcatcttgagatgttgcttcatgtcgtgagctatgggtggtgaattaaacctgtcagagatgtctatcacctcagatggcaggaaagagccacccatcacaagtgactctcatctgtgacgggttatttttatgtggcccgttagaggtgttaatcatcattgacaggcttccacccgttagagatgagatgcagtcatcactgccactgatcattgatgcgagagccgaacccgtcagaggtgatgatatgggcctgtcagtaatgtgcggacccagtgtagtgggaactcccctcgttttattatagctcccccgctgatgcttggatcgatccggcccgtcccaccccttggacgtacacagtgaggcgattttgctagatatttgtcatcaaatttctccccctaatatttatcagatgtaattacagtacaatcgtagtgtaattacactgtaacttacatgtaattacaatgtaactataatgtaacttatatgtaactttcaagaatctctcagtaacatgttatttcagtaaaatagaggtcctgggaataaattctttcacatatgtgtgtgctgtgatttttttattcctcaccagaacaaatcttgtaatagatctaactattcaaaattacgtgaaacttacatacaagttacactgtagttatatgtaagttacagtgtaattacatacaagttacagtgtaattacactatgattgtactataattacatctgtcaaatttttagtagaaaatttatcgacaaatgtataggtggtccccagtgaggtactgacgcacaaaacaagtactagtactatttgactcagatgacacacagtgtgtacgaattaaagttgagcgtatatgtaaattataaaactacatcggtgcagtaacttggaatgtaaaacatgcattcacaaggtatacatctgataaacaaaatgcaatgttgtttgtacacaacatattaacagagcgaaatggagcgtgcttgtgcgtagcatatatcgagcaaaaacccaatgtaaattaacgatatgtgcatcgcctgcatcgcatgcatgcctgctcatcaatacgagagcaggctcacggcgaccaccgcggtcacgacccctgcaaacgccgccgcccatcccgccggcgccatcctgccggcggccgccgtcgccgtggcgtccacctccttcgacggcgcttcgtcaggcgccgccgccaccgacgacgacgacgcggtctgcggcttcccgtgcttccccgccgccgcgggcgcgtcggcggcgccgtagtccttcttggcgccggggccgaacatgtcgggcgggaggaggacggcgtcgagcgagtacacggcgagcgggtggccgtcgcggagcggcctcccgagctcggcctccaccaccccggacgagacgcgcaccctgtcctcgccggcggtggtgacgttgacggtgcagacgccgcgctggccggaggcctgggtgcgcaccgggttggtggtggtctcgaacgtgacgaagccgtagtacctggggaggacgtggtacagcaccagctccgcctgcgcctgcgcgtccatctggttgagcgtccccggccggagccgcccgaacgcggcgtccgtcggcgccagcaccgtcagcccgtcgccgttccggtcgttgttcagcaggctgctcacctgcgacgtcacctccgtgtccttgagcagccggacgaaggtgttgtagtgcccggccttcgtcaggatctccgtcaggttgaggggccccgtcggtgccgggcttggcgcttcgccggcgccggagacgacgacgacggagacggtggctagggttagggacagtacaagaaatactgtgcttggggaggaagccattttggatgcttaattaatttgctttctgtatagctactactgtactgtgcggtgttagggctggggtttaagtagggagtgagagttggagaaggagggctttcaataatttcttgcagttaaataacggccaaactgttggttcgaccatcctttttctagttggagcgggagacgtctccagttttgttgtggttatgttggtggtgcatgcttatccatgaaacatatacggagaggggaccaatagtgaggtttgctttgccttttcatcttctgatcagaataagctaacgatcaataatactatactaatgatagggcgccatatattgcatgatggatttattgcgatatattgtatttttctatatgcctctatgtgctagtagctctttgatgttgtaacttccaagtgtcaagctgggctactatagctaccgtactatatcgtgtgatttatgaattagataggaacattcgtgcatgcatgtttatattctgcattttgtagtgggcatgatcaatgacagtaacggatgtttgcgccatattttctcgaaaggacagctgacctagacagtcacattaaccacattgtttgttaagactaacggcatatgtaccggtacatccgtactttttacttgctgttatatttggacatcgccacttcaatacacttaaggctgaaaaacagacagcgacagcagcagcagcaataataataataataatacaaaattatccgtctgaacttacgcacttgttcaatttagccctctaaattaattatagaaccacatttttaaccctcaatacttgtaaacaagagtaaagtaacgaggtgaacagtgggattttacgatgaacatgtttttttttttggctatttgagtcgatcagaccgcgcagtgtgcgctggtcagatcagggttgtgcggatggtcagatcaggtaactcaacggtctaacaggttagctcatgtatggagttagcttccagctgtttagttggatactcatgattacttcatgttatgacttctatatgattactatgcatatgtaatactattgtcagctaatattaggttaagttgagaaagcacttgtgcttggctagtttagattataaatcggataaatagtttagaagaaaaaaaacttttaaagtgcggaagatggaaatatgagaagttagctaactgagctgcacaagggtcttatccttttttaaagagcaattttactgtttttgaggaggtaccatgaggtatcactttttctattgtaaatttggtacctcttggtacctaggtactatgaggtaccatgaggtaccaaattttacactaaatttttggtacctcatgttacctcctcaagaaccgtagatttgctcttttttaaattgtcgcacaaagagactgagggggcagtggctatgcatgtaggtattcatgtatgagagagcatgcgtgtaatgtgtagtagtggacacccgatttttcctcttaagatcaggcgctcgagttgcattcgccaagttttgatttttggtctaccattcatcactcctctagtaggatttctccttgtgtttcgatcctaagcttctcgcgcgcttgccacccctccctccaatggcggtgccggcctctcccagccgcagcgatcggcaatggtttagttgctgccctgctgcccctctccacgacatactggtccccacagtacgtccctctccgcgcagctctgaaccaatccctctttcttggcaggaggacacagggaaggcaggggacgggatccggcggcagcaccatcttcttcggtgatggtggaggtgtcgtgcacacacttcaggtcatggatgagtcaactcgtcacaggaggactggtggatcgagtaaatcgaacttattgcaaaacatcaagcggtaattcggacttcttccaataaaaatccccaaaattaactctaaaattagttttgaaaattcaaaattgatatgtggctgataaccaaccagcagaccatgtgagagcctcacatcattgatttatgacctgttactccatccgtcccaataatatataaacattgctaaatagtctaaaggaagtgcatttatttggattcggcttctagctttaataggagaaattaagggtgaagaagaaaattatgataacacttattaaatgaagaggtgttcaggagtaggagtgtagtggtaaaatagggtgaaaatcaattggatcatgattaagatgaaaattaaattgcctgtactagtgaacattgaaatcccaaaattatattttgggacatagggagttatttttttatttaaaatcttcagttaaattactaagatactcaatagagagtccaaggtactgaagaaaatgaaatatcatataattattgtccttgacttttagaattattaaagcttaagaaaaactaaaattgagactacaggcggagtacaacttggtctagtccacgttagttacaacttactaactattaattaactttttttcttttttgagaaagagaggattcctccccgtgttattaacaaactcatcaagcgactactaactattaacttataaatttaatttaataactattaaatcaataaatattaccaaagcgtcactaggatgagtatacatattattaaatttgaaattttagatatttaaagaaataaaaaattagtttatgatagcactccaaaattaagagtatgcacaattaactttatatttattgtatatgtttaaaataattaagttatggtattacaaaaatcattagagtgaattttcaatacaactttgcaggtatttttgaagtagtaattaaattaaattgttttgttcttaagccttaaagttttcatgtatacaaaatatgcaatgcaaatacactactacataaatgtttttgctagacgagaccctggttaggttgcagacgaaccataactgcccgcgtttgtaaaattcggtcttcattttcgcatacggcatcttaagatgcccgcatgcaaaaatcgattttcgtaaatagacaacttaaggagctgcatgcgaaaataagaccatttttgcatgcggacctcttgagggaccgcatgcaaaaatatctcatttttcttttttcccatccacttcaatttttttacccatctcctgtcaagatatttcaatcctctcctccactcctcgcttcctctcctctcctcaatctctctctccctccaagtgggcggcgacaggcgggcggcggcgccaccgccatccccttcctcattgacgatgacaacgacgacgacgaggaggcgaccagctccatccacaccccccccctgacgctgccaccgctgacgacaaggaggcgacaacagtggtcgacgtcgggcggcaggcctcctcctacccatatctggcaacggtggtgagagcggtcggcggctcagcggtaggagcagcggcggtgggagcggacggtggcggctttcacgatggtgatttgcctcctcccgcccggatccagaagtggcgggcctcctgctgcctggatccgacagcaggaacggcagtggtgggagcggacggcagcggcggctcgcctcctcccgcccagatccgacggtggcaggcctcctcccgcctagattcggcagcgggagcggacggcaatgggagcagagggcacgacgccggcactcggctgacgtgattttttttttggatttttatttttgcatgcggcccacgtaagcaactacatgcgaaaatagcaatttagcatgcgggtgcaacgccctcatgcgaaaatcactatttttgcagaccttctcgtgcagacggcctggccatccgcttgcaaaaaccaaatctggctgtctgaaaaatctttttttaagtattgatagtctatacaaatgcaacgtgtgttgtccgccgactagtctaactgtaatagttttacattgggaagtccatcgagttttttaagtattgatagtctatacaaatgcaacgtgtgttgtccgacgactagtctaactgtaatagttttacattgggaagtccatcgaaccagatcgagaccaaactcgcgttatttttttaggcttgttagctagtgtcaagacaagataagttggttgtgtatgattaattaaatattagttattataaacttgaaaaatatgttttatttaattttttaaaaagctctatatagaaaaactattgtagtaggtcaggaagtgtgtttatagaaaaggagtggtagctgttaaatatgtgatccgaattttgggcccataatatattcggattagtttcctagtaggagtcctattaggtgtctttctattatcccctatatatactcttgtaagccgtacgggaaggggtgacgttcctattatgattcccctacgtttgtaatcatctcctctatagtgatcattgctggtcggcgcccgtggtttttcccgcaagggttttccacgtaaaattcgtgtctccgttgtgcatatatttttataacaagtggtataatagcattggagattcgatcaacaactatcccatcgtcgttctgcaattcggcgagattatccaccagcgcacgttcatcatcggcgacggcaggcgcgtgtcgtcgctcgtctcgtcgattcgtctcgtcttcgtcgtgctgcctacgcacgcgagaaaaaacaggaggagcagcagccggtctccacaccacacgtcgggggaggagaaaaagcagcagaaaccaatctaattgcgcacggatcccaaagtgaagaaaaagtagggcaagtcagtcagagccatcatcgccctgttctgtgaattcaatttcacgttgagaattgctatggccacct

SEQ ID NO: 9088 - DNA, 16118 bp, Oryza sativa
ttgaagaatatggcatcagcaaggaaggagaaggcagtatctagctagttttactcccctgtatcttagaaaaatgttttacaacacctttgagcattcataccttcttttatatcatattatgtgtgttcttcgtttcttaggccagaaatctacaagatagaagcagctgttgtaattccagatttcttgaatcttggtatgggatttgcctctcaagagtaactctgaacatacttggttgggatagtagtcagttcttgtcgccttaaatgaaaaatcatgcatgtatagctcactgtattatataacctgataatgatgatgatgaatcgtaaaaaatggacggaaatccaagaatgcttcgtaaatatatgtagctgaaaataaattgactcggataaagctaggaaaaaacagaaacaaagtctcccctcattaattaatttagtaggaagagaagatgacaagagtgctatctcattgatagaaaaatagaattggcggaatattactccctccttccctaaatatttttgatgccgttgatttttttaaacatgtttgataattcgtcctattaaaaaatttaagtaattattaattctttttctatcatttgattcattattaaatatactactactatagtttttaataagacgaacggtcaaacatatttaaaaaaaaatcaacggcgttaaatatttagggacggagagagtattacccaacaatacaattaaacacgacgtacgcacgatcattagactcaatttaaattacgacaatacaattagccagtctctcatagccgaccgatcagctaagcgacatacacgcgtacatgcaactaaatttaaattacgacacacacaaaacctagacacacagcaaactaaatttaaattgcgacacacacacagaaacgaaccttagctagctctctccaacctcactaaattgaacatgacacgaacacacacaattagtacagctacatagtactacgctactactcctatatgggacacaggtgcatgcgtggcacggatcgatcacactagaaaatgatcgaactacgaacgtcggcctgcaggaggtatcttcctgggcggcgtagcgtccctggggctgtccgacttgatggagcacagctcgtccgaatcctcgccatctgaagtccgagttatgatcaagtcgtctatgtccagatacatcggtggcagatctgcaaagtttattaattttacagcaattaatgcatgcaataatcaagtaagcaattgaagctatggcaataatgcaagaaatcaagaatcaagaagaagaagaagaagaagaaagctagaagttatataccgtgtttctccctctctcgttgtgtttcactcacgctctgctgcttctgggatgatgaggatccctgactttgctcaccttcacctccatgctgctccccggtgcccttctttctaccagacttgagagctaccctgtgggccgctagatttcctgtaggttccacagccaactcacaggaatattaattttcttgacggggttacttatacccacagaaaaattgtgttatttttgtaggttttcacacagacccacagaaaaatagcgctgacaagtaggcctcaagaaccatcaaataaaactcaggcagccaagtcccaaaacctaattccccacccctcttcccaaaccctcgagccgtcgccgcccctctattctctccagatccgcatggcgagcgcctgtgcgataccttcgacgaacggcgggtcggctaccgagcctccgcccagcgccatcggcaagatgcagccgaccatcaccaccatctcctgccggcgacgagcttccaccatcccctccactgccggtgctagccaccccaaggcccaagctcagaacctctagatctggatgccccaaccctgggaaccacggatccagccgtatcgagtgtgggtgctccagatctcgcggttctcggctccggcagcgccggcaggagaatgggcgctgcccctccttcccctcctcttcagtaagtaaaagcatccaaaaatatgtgtttcaatggtgaggaaacggtttggagcacctctgtccatgctagcatgtgtttccgctgctaatcccaaacaccgatttgttcagatagccgccggcggagatttctaggagttcaatttaatctgctccaaagttgcagccaaccattctccttcaggatgaaaaagtgtaagtcatactagtttacacttgtggattattttggctttgatccgtattacgtgactgcccagtagtagatctagattgggttattggcccttgaccacaagtttaatgattgtcagtggaatgtcagtagatctagattgggttcttgtgtcaaaacctgcgttgctgcattcatcaactaatctagattggattagttgatccattactgttgttgccaattattattttttctcagagctctgattcccagatattaagcaagacaagttggttcccatattgtctacattatgtgatttagtttctataatagaaatttaattttcttggattacttactcctagagtataatatttattttacatctaaatgatttgtttcttgtttcagccttgtaagacaattatgtctggaccaactaattttcctctagccattttgtgaagacctaatgttgtggcatgacagattgacaggtactcccacactagagtccctgctattcataaaactttgtttgtgtctggtactgagttgtttgacatggaattaatctatcagtggattatcatgcactatgctttcttggtcacatttagttagaatgcagatgcttttcttatgctatttttaccttgcaattcatggtaaggattgtgtgaataatgagtattatagtgttttattttctctgttttagtagctaagaaaacatatttttagctcaggttgtatgcatgaaatcattagtgctttctagtctctactagtgcatatacatacttcacaagtccaagtccatgtatatcttttggcaagtcacatactgctacatgtgttggatagatacatgccatcagaacaataaattagtttcagtctcttgtttttaaaattttcttatgtacaaaccctttataatttaccttgttcatggcactttgtatttttcttaacaggccatagcttgaatctttaagtgctgcagttaaatatctacagaacgttgcacatgatgaaaatcaaggtatgcttctcattcagtggatgaaatctttcttagtctaagatgtcctagcatttgcaccatgaaacttgtcatttaagcatccatagaaaatgagtttgatcctattatcctagcatttatgtcttatctgaattggcagagtactacaggaagtattttcatggtcacttttcatttcagttgccatatttcattttcatgctttgtagttgacaaatttatgttgctcacttcagtttttcctgtactaatctatttgtttctctataactggggtattcagaatcattgttatttattttgtaatgaagaaaattatgaaattgaacctcttttttaaaaccttttagcttcctttgcccaaggttgaagcaccacggaacacggactgctgctggaagacaatgttcttttacatatgtttgatgaattgtaactgaacacatttatcttttctatggaccctttgtatattactaaatccggtttgaatgaatttgtatgtactgaacttagatggactatttatgtaagctttgcagacttgaattttgatgtatggattgtgattgatgttcatatatttatccaaatcaccatgtgtttttttttgggcgtggaactcattttttctgacggtggatgatggtttttcctgatgggtccacgtcaaaaataagctttcacaaacctgacgccagttgattttttttgtgagccaaccgacaggaattcccgacagaaatgatatttctgtcaggaaaacgacagaaaaatttattttctccgtggtcttttttctgtcggcaaactctgacggtgcacccacagaaaagtattttctgacggtaattcatattattctgacggttttcggcctacagggtagacctcttgatcttctttttcttctcatcatcctccttcttgtcttccgacgactgtggccgctcagcacggttcttctgcctgtccattggagcttaatttgctagctaactaataactatagctaatagctaggcgctggctaactcgatcgaaaagagctgcttatcccacagcttgtctgcaggttgcgatgacctatatttatagtcagtgtacatcgatcattgaattgatctttgttcatgcttacctttaatttgcttctgacttgctgcattatatataatccaggtcttgagatgaccagatcagtgcggcgcatggatgtgtcaaaagagatcactgaacaagtatagtacatgcacgtgaactagctagctactgtaaaatggatcggagtacattgcgacagagagcacatacgtactgtgaaacaaattaaacatcataatctaattcttgcacttaaatgtccaaatgctagtttctcgcaatctctggttgtagcagaaagagccttaattttggatcttaagagctgctattattacttgatgacgagaagtctctgtactttaattagccgtgcatccaaccaaagagtgcctccatgctggttctcatttcggtttagaagaaaacggagacggcccagcaaaccaaaacgacccatctgtgagcatttaatttgcatgtgtacgccttacgcatttcttcgctaaaaaaatagttaaaatttttcgggcttggttttgtatatatatctctctccctgcccaagctcgtccaataactatcgtgggcctttttttttttggccagacttcttcggccccggggaggcaagcctagggacaatgcatatttataaatgaacaataatccaaatgatttaagttatttatatatattattatacggttggtcagtgttggagaaatttattacttctttccaaaacaaattaaccaaatataaaatgtttaaattcataatattatgatgtatcgcatctcatatttaattggtttattgtaagatagagggaatactattaggtacgcttgatcatgtggtgtgtgccttgcattcatatgaatactactctcttcgtcccttaatataagagattttgacattttagttacactgtttgactacgtcttatttaaaaaatttgtgcaaatataaaaagcgaaaagttgtgcttaaagtactttggataataaaataagtcacaaataaattaaataataattccaaaatttttttgaataggacaaatggtcaaacagtgtaagcaaaatatcaaaatcccttatattaagggacggagagaatagtattcatatcaaatggaccaaatagaggcagctgatagatatagggatgtgctacacaaagacaagctcaatgtttatgtggtgtgatgtaatcttaggagtgagcccatgaatagtgggataatgttaaagcaattcgcacaatgctattgctatggctaggatttaagtaaccataagatagggccacatgagatagaaaaaaaaatacttcagctcttgtttatgaggtgaatgagagagataaaaatattttaattttgtttgtgatagaccttaagtataatgtgcaccataaactaatgctacttaccacaatatatgtgacttattttataagtgtaattattattttaagattatatttttcataaattattattgttgcgctaacgccatatcgatcaaaaaaagtgagcagaggggaatatgcatgatatatagcatatcacgggtatgattttgactgctagctgctgctgtatgtatgataggcacaaagctggttggccatgcatgtactgcgtttgcgtggtccatttgaccagatcgacgtgagccaaagcttaagtgcggtatctccaatagggaagttttttttgctagtatcataacacttatcgttttgctaaaactgaaatcaaactttgtacagctttaactatgaacaaaatttaaaatatttattttagaagcatggaaactatatgtatatattaatattgaaatatactttaataaaatcatacattcatgatatttatttaaatattgtaatagaaaatagtgataaagttgcttcttaagattgtgtcccttgttcaaaacaacaagcatatttttaaatggtactacctccgtcccatataaattataattctagatggttgcatatattaaggattgagaaaaaaaactataatcgatgctccttattaaatgttctatatatagataaaagtggaggggtagttgagggtaaaatagagataaatttgaatgagaagtgattaatgagaccattaatactatattgtgataattattttgggacaaatttaaatcctagaaatataactattataggacagatagtaactagcactctttttaaaactaattaatatgggtgttaaatgctgcgtgcatcttggaatgcgttatatataggagtatactactagtagcttgtgtgcctataaatataatcgtatgtcatatttaaccatattaattgtgatatatattatcacgattgcatgcatggtcaatataattcttttatttattaattaatgtaagagtttctggcatttagagtaaacgcgatgttacctttattttactatgtttataatatatatagtccagtatatatatctgatacattggttgacaaacttagtattacttaaaaaaagatgacatcaatagcagtttatttcacgtacggtaaatcaatgcggcgtacgttgctagacaaaactagtgcgtaaaaagtttcgagcacacgcagtcataataatgcagtaatgcagatgaccaaggtgaatggggtagtgcatgcatatatacacttggtcaactctgtcgtatacagtagtagacatgtaaagtactaaactttattcggtctcgtcatcgatatatcgtcatactactttactgtagttcatcagctctgcatttgcatatgcatgcagatatgattcgacgaccaaaattaattaaggctgtgtttaatccaaagtttgatccaaacttcagttattttttatcacatcaacctgctataaacacaacttttcagtcatatcatctccaattttaaccaaaattcaaactttgcgctgaactaaacacagcctaaggtgatgtcaaccacacgacgaagacgcgcgatatgaagcggtccttgttaggataagacgtactacgagcgatccttttggacctcatggtcagtactccgcatatccgtactgacgattatattgctggatggagcggcttgttgcatttcatttccagtagatatagattaattgtttatttctttatttttttcttaaaaatccagttaattagattgcacagatggttttatatatgatcttcattttggacgtcaacgaaattacaggagagtgaatcgtgttagcctagataaagtatggttgggctagtttgcccatataaatatagtttccgtttggtccactatgaactctgcttgtctacctaccccaccaccaccacccttttctctcccttggtgaataatccaactttttttttcgcgaaatacattacagacggagacactcatatatacaaacgtgcgcatgtaccctatatatctctatgaaatatacaaaaatgccaataaggagtacatgacataaaaattgcaaattagctccatcagcatagactacgaccttcttttttgaaagtcatggggatacgcaaatgcaaagcattcgagtggcaagttatctactccctccttccctaaatgtttgacgccgttgacttttttaaacatgcttgaccgttcgtcttattcaaaaacttttatgaaatatgtaaaactatatgtatacataaagtatatttaacagtgaatcaaatgatagaaaaagaattaataattacttaaattttttgaataagacgaacggtcaaatatgtttaaaaaagtcaacggcgttaaacatttagggatggagggagtaatatagaatttggacggaggacacataaactactattgccctctctgcaaatataccttcgaaacttacttccatctccacacgaaaggcagatacacaagtatctggaacatattagcaacttggatcggctgcgaggagggacttctgaaaggttacaaatacggtgcacaagtacgtggagtgcccacctaaaggtcctgtctagacctacgatggtgaggcgaagactgaggcacagttacacgctgttctattgtgagcatgaatgggatgatgttgcgtgccgggcggctggcttgggtcgctgtgtgtcaacctcggacgacccaatagatagtggaacccgattagagcaaggataatagtgagatatgcttatgtggaggagagagaaaaaaaggtgttggctctcatgcaagagctagctttgcacgtgctccaagacaaatacattaaatgtataaatgagagaaaaagataggagaagaaaaatcaaagataatcttagagctagctctgcacgtgctgtttttcggaaaaacccctttattttttatctttatagcgctacctctagaagcggaattttcttttcttcgcattgtatttctgtgaaataggagggctttttcagaacaaacacaacagggtgttgtccagtctgaggacatatgcgatattttgtgcaaatacgaggagttttttttttttgcaaaatagccttttaatgaaaccggctccaacccacggtgcagacccatagcgcctaaaattgcgtttggccggttaccgcctacaagcggtcactcgtgcgcgcgcgaggagccaactacagcaaatgggcgacgtgtaaatttacgggatagctaaaaaataaaaaacatgagaaaaagggtacggttaggctggttattgattgatgataccccatctaccatggggcatagagagaaacaaccaagcaagtggttgtgccggctcaggtacgcacggagcccagcattgagacctcatacatctacaacagttggtatatataagcagtagatggaaatacattgaaatccctaagttaaggagctgcaaagacagatgaagtagcactgcaaaacaaatgtccctcttaggaggatgaaatggactacataaacacgagtttcttagtgcccaaatatatcaaccacaaaggtctgtaattgagcatagctgcccctgattttagatatgcagaccacagtgaatgattttcttacaagttccaagctaagatcattctacagttaaactcatgatctcaccataatacgctgggttttctctgggttgacaaatacactgattatattcatgaaaatcattaagcagtgcaatactacctacatgactcagcgacacacagaaggcaacgacggacgaagttatggcagaaacactcttaattttgtaagtgtttttgtatttggaagatcaacaaatcttcttttggatagggaaggtcaacaaatcatttgctcaagcttaatgttctcgcaatatcttctcattgtaagtgataaaacgaaacctgttagaaacttccgtttgaaagaacatgttattgaccctaaggaaagaatgtggtattgaagcattccaatcaacacaataagttattaaacagttgctatgatcacaaaaatgttcgttcttttagaaatcaaggtacaaaggaaaatatctggtttcatgttggagacatggcagcatctgattcatattcatgcggataaatcagttatcacatcttctgattatgtagagcttgtttttatacactcaacaagctgcaaccaaatgtcagttcgaccaaagtgttctgctcacatttcctaattaagtatgtccctgttctgctcacatttccttagctcacaaataacagaggatttttatttcgaaaatactgctaaggcttgggatctacggctcgtcctagggtcaagggggctctgataccaacttgtcacgaccggaaataacccaacgggcgttccttacgtgcgtgcattaatccttgtcccaggaggcaaggtacaccaaaagttgatacaattcagagtttaacaagcggaagcgtaaatagttaatttattacatgggcagcgaaggcccagcacacacaaagacaaacgagaaacagcggaagactagggcgacgaccacaggcacttgacggcaggcacgagctagacaccaaagccttcatcttctaggagctcctcttctgagtttgggaaaaattgagcaagactgagtacaaccaccgtactcaacaagacacacccacaagtgcagaataaatgcaagggagtacaaaggagttatactataaagggttagggttgcagtaaacagcatttaaagacattagttgctcagggctattttgcaaacacgattctagtactatacaatattatttatcaaggccgtgaacccacacgaacctgccttaacccaaggcctacgatgattcagaccgaactggcaacccgaccctgggtcccagctcgtcccaagccaacccaggccaaccattccacattttagttgttaagcaggttttaagaattaaaacactaacttgggtacattgctcggcttgcccataaccgagggcgcggctattcgaatagattatactctgatcagatgtgtacatctttacccacaagacacatcttcctcatatgtaaccacgtgccacataccaccacggtatacagacgaaagacgtgacatagtttccaacccatcctagccatagacaagagtaccgacccaatcccacctacggccggaacctccgggacaggcaggtaggactgagcccctagcagcaggacaccggccctgtgccatgacatctcgactaccgggctgcagctcgtgtagccttcatttgccctggagatgtccatcgacccccgacttcgtccatctccatccgtgtacttttgtttataaccagactgagccacaaactaagccttacccactagacatgtggaagtacggtagtgctttgcaacagaggcccgaagaccggtccttatatggccgaggtgctactatcaaaaccatgcaccccgagcccagcctaaaaccattttttggggattttgagtagagggggcggtgtgaatccaattccacaatactccaacaattccataatatctaggtgatatgaatattcccaaagtctagagttgtgaaaccgcctaatgttacctaattaaagcgaagcatctacctaaaatcatactagtgataccatgagtagagtgtccactagttggggttttgtttattctagggtgaacaaggaaataataacaataacaacaataataaggtcataacaaagataaataggcatggctaaataaaacagtgattacgcgggaatttaaataaagcgataatgcaataagttaaatcaacataattttacaaactgggattcaatatgttcaaagatgatgtgacttgccttgctcgctttcccaaacgccggcttcaacctccacgaagagcggatcttccgaagctgcagcgtctacacgtccaacagaaaagaaacggcttttactctactaaactccatataacaagcagaaacaaagcacaaaaatgggttcttgacttcttaaggaaaaattagagacttgaacggtccaattccgagttcaaatggccaagttatggccatttgaagtttatatgctctttaaatggatatttacgaatttcttcatttaaattttaatttaaaatcggatttattgcgtcagccgggagagaggagcgcgcggaccgggtccacgggagtggggcccacgcggcagcctctcggtccacggtggaccgggagcacgcggcttacgccggccggcgccgtgggtcccacgcgtcagccgcacctgagggcgcgggcggctgacggccgggccccacatggcagccacggggcgcgcccgaaggcggcctttccggcacagccgacgggaggcggcgtgcccgcgcccctatggtcgccggcggcggccataggcacggcggagcggcggccgagagaggggaggggagggggaaacgaaatgggcggtccacggctcaccccgggtcgacggcgacgacgggaacggcgaccggagcggaagaaggcggcggcgcggcacgggtcgacggggacggcggcgttctggcggtcggcgggcgaaacggaagggtggacgaggtcggcgaggacgcggcggagccgaaggaggcgacgccgaggcgggaggaggtccgaggcgacgacggcggcggaccggagctcggcagtgacggcggagagagagagcgatggcgcgagctcgattccggcggagagagagagcggcgagtggcggaaacggtggagggaggcacggggagcgtttatatagtgttgggagggggagagaacggccggataagggggaatcggccgcggaagatccggccgccattgatgcgccggcgaagttaggggaggagtttccaaacgaatccgagggagagagagagagggaaaagtgggggaaaagagggagggaatcacggggaatatttcccccctcttgattgcacgcggggcggacgggagcggcgggattcgcggcggcggcggcgctagggcacgggcgaggcgacgggtgcggcgggagcggcggaaggtaggggatgacgggtgggccccacccgtcagcgagggtggcgggcgggcccgcccgtcagcggcacacgcgcggggaggaggccgattgggccgcgggggagaggagagagagggagggaagtgggccgagccggcccaagaggtagagggggagggaaagggaactttttagggtttttctttttataaaaccattttaactttgtttatttcttaataattattatttgtgctctgaaaattccactaaaatttatttacgcattttaggcttttaggaaatatacaaaaatcgtccaagccttatttgacttttaactttgcacattttaattgttggaggctttcacatggattttacttattctatgcataattttgaggatgtattttagagtcgttttaggacgcgacagtgagttgaccttcttcctcgggctacaagtgaagcaagcacaagagggcactttcatctctcaaaccaagtatgtaaaggacattctcaagaagtttgggatggaagatgccaaacccatcaagactcctatgcctactaatggccacctagacctcgatgataatggtaaatgtgtggaacaaaaggtatatcgctccatgataggatccttgctttacttatgtgcatctcgtcccgatatcatgcttagtgtatgcatgtgtgctcgctttcaagcggagcctaaagagtgccatttgattgccgtcaagagaattctaagatatttagttcttactcctaatcttggcttgtggtatcctaagggttgtgactttgagcttttgggctattccgattcggattacgccgggtgtaaggttgatagaaaaagcacaaccgggacttgccaatttcttgggcggtcccttgtttcttggtcctccaagaagcaaaattccattgcattatccaccgccgaagccgaatatgtcgccgccggttcttgttgtgcccaactcctttggatgaaacaaactctaaaagactttggctacaacttcaccaaaatcccactcctatgtgacaatgagagtgctatcaaaatagccaataatcccgttcaacactctcgaaccaaacacatagatattcgccaccactttttgagagatcataagaccaaaggaaacatatgccttacacatgtgagaccgagagccaattagccgacattttcaccaagcctttagatgagaaaagattttgcgagcttaggagtgagctcaatatcttaaattctcgcaacattaggtgatgggtggttggctaatttatagtcaaacatgtatcactaaaatgtaaattaaaaaaaaattgagcttttgtgtcttgagatcacttcttggtagaagatgatcttgataccaggaataaagctcaaacatttcccctttatccaaaaaccccttttgtgataagttttgcaaaatcctttgtgtgccttttattgcgaaaatttggtttttattttcttcttgtgatgtatattgaccatggttatgtaatgttgactgttgactggtcatatgcatcataagtctctgcatgtccttagttctctatttcccttcgttgaattctcatctcctccttgtttttgggcctgactgccctttttctgtcaggccggaagttccgggcctccctgtccggaacctccgggtatcggggagtatatatactcagggggagttagaaaccctagtctctctcctcatttcttctctctccccgacgccagccctagccgccgctacagtgcccctagtggcgatttcctcttccaaccgtgaaaatttgattcttctccgtggaatcaaccacattggtggtaggaggatcttcctgcgatcattctacgatttcctctctcaaggtagcactttttgattccctctctcggttcattgtgttttttatcccgatctcttaatctgtgaacctagggagaaaaccacttggatagtcttgttcctgctaccttgtagatcagcgatctataggatttgttcacatgcactggctatttttgagacccctgttcttcatttttgccggccggaagttccggtgctcttgcacccagaacctccgggcgctgtccagccagcctgcaattcttgattctctcaaattttgcctaactactgcactccaatttgttgattcctgttgcagtaagcactatgcctcgtgagaaaagacagaaagcctctcaggatgtgtctggtgatgagagtcctcctattcggtttcctcgtggtcgtttgggtaaagagaaagtggttgaaggtggcagtggcagcggcactcgtacttctcctaggtttaccaggcaatccagcaaccgtccagttcagattcgagatgttgacagtggtcaaggaagtgatgctccttcttcaagaggtcgtgggagaggtggtggtcgcacttctagggctggaagggcgtctcatgatttccctgttggatctcgtgagaatcccgttcagctctacaagactcttggatttgacaccactcctatgcaccacattggaagacccaagtccaactaccttcatcagcttgccaagtgcagaagggaccgtttgcttgatccagagacacagcctgaggagtcacaggatcctcgttttaggacgttcacccaattggattggtataactcagtgattatagctagagacaatccaatggttgagatgaagtggattgattggacttacataaggaagaagaacaatgaagtgttcaaccaagcaatgcaagtttgtcacaacaagaatcttggagatattcttgccttggagtatgattggaatgaggaggtcattgcacaattctatgcgacagcattgtttggtactactaggaagggaactccttatgtaaagtggatgactgagggtgttaggcacaaaatttccatagcacagtttgctaagatattgggcttagaggatgaggatctcaatagccctaatattcatagtgaagcacccctccccatgatcaagactaagttcatgtatactaaggatgctcctcggacttgtatgggaactactcatggtt

SEQ ID NO: 9089 - DNA, 27187 bp, Oryza sativa
tacagctccgttgtttattgcatccaaaaaagactgtgttacaccagcaagtacaggtccagtcatgactgtaccagcaacttgctttggccttgtcctctctaaaatgaacctagttaattcatcgagtcctgcttgaaattcaggccgcaatttctctatctgcgaacaagacaatggtccaatttaagtggtgcccacagttctttcagatatgttgtgcacacttatttcagcatgcatcccacgggaagggcgcatctggactttgggatagaaaggtgggatagagattggaatatggggtgcattatgactcgctccatttccttgttcctatctccactcttttccctaaatccatatgcgccctagtgataacagaagggaaagtgacttacaggaatttgatcaaggcgttgaagttcattctcactgttcaatgggcgcactagtgtgaaacattctctatcaggaaagagggcacggatggactcacggatctaagacaattcaaataaacaattaataaaattgtaaatcacaatgaaaactacaaaaagaaaattacaggtgttagtactctagagtacctcattctttgaagatatatcttttcctctgccttcaagaggcctcagagcgatttcaagataatctcgtggagttatcttcctgtcgttctcaactaaatctaggtaaaaatcctaaaaaaaggtatcttagactagagaaatccttcaatagtttacaaaaaataaatggaaaaggaagatcaaaatcacaaatcaattaccctcagtagccagatgaagataggtgagaattgcccgagctctgatgcagtagacttcccaccatttgcccgcacacggatatgcttggtcatttcagtaacaagtgaaaggcgatcaagagctgcctcatcgataccacccatctgcaaatggaaagaacaaagaacagtaaggtatatttattgtgcatttcaacatgtttagtgccaaaagataaaacacattgcaattatgttatttctcatgccttcgggggtcacatcatcatagcatcaataatagagaaaattgtgatctaacttgacactcaagagtaggatattaacattcctaacagaccatacctctagtttcctaacaaaactgacacattaccaaataactaatacattatacatatgcttggaacataattaattatttggacaataaatattcttattaatactttgtaatctttgtttgtaaaggattgcattgtcttcacacatgtatatatgcatggctagttgatgcaatgcacgcatgcagtttgttgcattcaaggctaattatttttcatttttaagttgaacttatgatatatttaattatttatttaaaacgcactttgggcactacactggtaagagaaaaataaatatggccaaaaaagatactaccaaaaacctcagtacataaatggaccattttgttatcgtctgtccacaagaacagacagcctattgaagccattctagttgcagacagatagtgccaagtcaatcaggtacctttaatccttaaaaagaggagctggcgatcgtgttctctacaccctcaatccagatcttctgttgatatatttatgtatatgcatgtgtgttatattttgttttgccaaagtatttcattatttgcaaatgcatatatgagattgctggttgataatatgatgtatggatttttttttaataacaactgacttttaaaattgaatgtgaaatatttattcaagatcagtcacaacacatgggcacaatgctggttttctatacagcaaggcagcatcaagtcatcaataaaatttttatgtctcgaaacaaccctttcaggtgtttaacagtttagtcattgccaaatggtgaggggagtgcatacaaattgtttgactgtttctttcattcaagtatctacccaacattcttttccaacttaaaaaaaattctgcttctgctttctttctctactctaaaatcaacccctaatgcagcagcagcatcgctatgttgcactaccttaagattccgtcatcaactcaaactcaattaaaatatgaattctcaaaccataaagatacttagacaacctttagccaaagtataaattatctgtgaaccttttcataaattttggcatttgaagtaaatttccttcaataactcacagtaaagcatgcatgatataccagataatactataaggtgtacatagataaggcaagaatgaaaaatcccataatttattaagtgaaattcggtcatatgccagaacggaaggatcaagacaaaagacataattgcaccacacctgattatatataaacatacttgaaagtaggactgccagtgagaatatctgaatgctgtaagtgccctgccaaagaggaaacaagtcagtaatgtatagactacagattaaaagttttctttttcattactacttttcttgcatcatcacaaaaacaaaatcttggacaatgctgaactgttttcagaaaatgcacaagaaaataagggaaatgcatttgcataagccatcaagcaattgttagatcaaaacctcttccattcaataagcaaaacacatgaattgagtgatgatgttaaacaaaaattggggatataaaccagatagatcatctcatcagtgcactaccttgaattcattgagaacaaattgctgccttgttttgaacctctagtcgaccagaaaaacaaaaatgtgaaaatgaacaggaaagcagacagatggatattcagacttcccaagtttccatacttatcaaacgatgatgtatacatgaagcacagcaggtttctatgatctgaaattccgggttttcagtttttacttgtatgcatcatgaaatttcataatttggctcaccacaataaaaaaattattcaaaaaaatatctgttgagatttcatggaaaattgggactagggtacaagaatgaggtcgatgaggtctggtagctaccataccactagggctagtccataaatttaggggaaagtaatcctaaaatatatggaaaggacttcaaagcttgaacatattcctctacttgagcttctatacaagtacacataaactcataccctaagcactaggaaacctagcattttaagcatgaatatgtttgacaacacaccagggcaatatattacattggtaacatcacatgataaaggtaaatttaattactgacctacacatcatacaagcaaaagtcaagcagataaaggtaacagtatcagtatgccataggtaggccagaattgtaagcatgaatatgtttgataacacaccaggagaacactcaattacatcaataactccagatgggtgcagtctgctaaatcatgcatacataaaaagggctgttgcataaacgtcaatgcgtgcatgagacagcataaacatttgggaaatagcaaaggaacaggtgtttgttgaagaatggacaacacatagagaacacatgggatcaatatttgaagaagctgaggcttagcaacaaagtgggatcatcgaggtattactcaatactcaccgtctgatcgtatgcatcaatgccctcagtatcaagaagcaaaagactatattcagttccatcaagtgcagttctttttattggggcactccacatccaaaggcccttggtgcagggccgatgggtgcttgctacttgaaatccgctgcttcttcctagaagctgtcaaaaacacagaaatagagcagattactccttgacaagataattagctggtatataaagtactccgtaatcaaaatcttgatatatatgaatttgctaacgaggcttcaaatgcaagaaattgagatgtcaaaaacagactcttctccaaactacaaagtctaatagaaatacttttacaggtcatgctctgataggagtaaaaggacatctgcagtcatttcacacccaaaaaaaatgaaacttatggtaaaccttgttagcatacatcaattccacaaaatagaaaatataccacacttagtccatcttcctttccgattttattttcaagacatcataatccttaataagtcattatataaataccaaaggatgtttcatggtccactagaccagaatcaatgttaaggtctaacaaatataaaatatcctcaggagaatcttgtaagtgtcatcagtcatccataaattcatcgaatcaatgaccaaagtaaccgggcagcaatacgccaatatggtagtacacacaatgcataagaaaagttggccctctttgattatttaggaaagttgcatgccttaatacacccaacctttatcacggttctgaaagaatgtatagcggaaagaagaaaaaacagggaccaaaactgattcccgcaggtggaaagtttattgagaagaaaaaacacggtaagcaaaagttttacttttgcaatgcaatttctgcacgagacatacaacccacgaaatgttgtcttttcttcctatttctaaatgaaatgtttacgccgccaaccaagaccccaaccttccctaccagtgtcccctacagtgcctcgaactgatatttatttcttccagattcttatcaggatcctactagtgttccagtgccgatccacaggacagatttgttcaaccattggtaaaaagaagaggggggcgagagcgaacctggttaaggatgaagctcttgccctgcctggcgcggccgcagacggagacgaccccgacggggcccttgacgagctgcagcgcggccaccgcctccgggtccatccggaacctcccccgctcgtcgcagtacaccagccgcagcggccgcccacccccaccccccgcgaacggcgaccgcggggaggacgccgacgacgacggggtccacggcgagccgtggcccggcgacgcctcgtccccgccgcggcggccccggtcccggtccttggacgcggagccgcgtagccccagcatctgcatcatcgcggccggccgcggggagagagagagagaggggaatggaatggatcctagggtttggggctcgcgagggtttgggggtgttgggggattcaggggatggtcgcgcttccccaggaagggaggaggagacgagagcttcggtggccggtggaggttgtgggctgcgcctttccttttcgtgaggacggttgccttttttttcgctgtctttggttggaggtggggcccacttgacgcgtgtgaggagaaagttttggatatctttcatttggtatcaatgctctgtgatctgctcaactgttcccagcatcaatcggctgagcgttaatgggagctaaaatttgccaggattggattaaggtccacacctctctcataaaagcacagtcccataaaaggtgatttgtgtcctcgaaagcacatgtgtagaggcaacaaatccagttgcaaggccaatgccttcgcagcagattttgagctgtcaacgttttttatggagaatgagccagccaaaagacctcaattttggttcagctggggccgaccagagggaattaaaatcgacacgtgtgtaggatctttcgaattaataagagtaagcactcttacttgtgtagcaacccacagtagtccaattctaggaaatattatcagaaccttgtggtagttgaacttcttgccgtaaacctcccagctgcactaggtcattgatttcttcaattgatgtaagatatctaaaagaggtaatccagttgttggaagagagttccatcaacacacctttgttttcttttagccagacgaaagcaaagaggtgctatgtctttcggacatttaccttggagccaatgatcgtgccagaaattcatttttttaccatctcccaatacgtttgtggttgctgcttggaacaaccgtctatcagtatcatcacaaggcactttcatgccaacccaaggtttatcctcatctttccactggaaccacaaccagcgtagacgaagaatcctggaaaatctttcaagatcagggaccccaagtcctcctattcttttcggtctgcaaactgttttccaattgaccaagcagctgccaggattagtgtgatctgggtcttcacctttccaaagaaaggaccttcgaaagcggtcgatcctcttgaaaacccatttgggcatgtgcagagatgaaaggtggtgaattggcatggagctaaggaccgtttttaccaacgtctcgcgccccgaagaagtgaagaatcgacctttccaagtgggaagcctttcccctattttttcaatgagggggagaaaatcaattttccttaattttcgataatgaagtggaaggccaagatatttgcaggggaaagatttaacgatgccggggaaagcttgcagcaaagaagcaaggtctacctcttcacacctaatagggaaaatctctgtcttggcaccgtttgtatgcagaccggacactggcgaaaacaattaacagctaggtaaaaatgttaagctcagaaatgttcggctttgcaaacactgcaacgtcatcggcatataacgagcatcgaaatctgacccgatttctatcaatcggggaaagtatggaggtattttcggctgcttatagaatccgatgaaaaggttccattgcaaggataaaaagcattggcgataacgggtcaccttggcgcaggcctcttgcatggaagatctgttgtcccggcgcgccattgacaagaatttgggaagacgtcgcaacaagattcgagatccagttgagccattgagtgcagaaaccaaattgttgaaggacatcaaggaggtaaggccaacataccgtgtcgaacgccttcgcaatatccactttgatgaacaggctttgctttttagtcctatgaaggagctgaaccatattttggacaaaaagaaaattgtcatggatggcccttttacgaacaaacgcactttgattttgcgagactaactcattgagtctcggtgccagccgattggccataactttggtaatgatttttttgaagctgtgaacaaactgctagcatcatcttttttttgggaggagacataaaagccgaattcaaatctgcaaggtgtgaggtattaaggttcatgaaagaagagatggctgccagcaaatcccctttgattatctcccaagctgacttatagaaggcttcgataaaaccatccggtccaggtgctttttctgatggcatctcgaaaattgtgttcctgagttcttcagaaatgtctccttcaagatcagccaagtcccgaaggtatttgtagtgagttccagttcaaccgcacacttctttggaaattggtacccaatctttctttgtagaaacggtaaagttcctcttctttatcttggtttgtgacagcaattccggttggggtctgtaaagactgaatgaaattctttcttctccttgagttggcttttaggtagaaaaattttgaattaacatcaccctccttgatccaggtgagtcgagaccgctgtctgatcttaattttgttaagcactgcaagccctagcactcgagatttcaggttagagattaacagacgttccttgtcagatagacttcttgattcttgtgctacgtcaagctgaaaaatgactacagtcgccaccgcaaattgcagcgcaatgtcccccacctgacttttgttccacctcttaagatcacaagctagtcgacaaagcttgatcctgaaaactgcaagagggttggtggcaaagattgatctgtgccaggattcttgaactacttccaaaaaacctggaattttcaaccaaaaggcttcaaaacggaattgaggtggtttgcttcttttctcttttccaacaaggaaaagaggtgcgtggtctgaacatgtagaggagagggggaaaaggtgtgcttctccaaacatgaaatcccaatcagttgtgataaacgctcggtcgatttttgtttgtgttggatttgtcccatctcccgcccacgtgaagcgacgaccaggaaggtgcagctctttcacttggattttatccaggagaccactaaaacgttgtatcatccttctattgagacgatcattatttttgtcagaaattttgtagataaaattgaaatctccgatcaccatccaagctggtttcatggtgggttgaagtgtctctagttcagccaggaattcaattttttcagcttcgagttgagggccatatacaactgtgatcgaccattgaagcccttcttcgcgcatggttatagtagcagatacagagtattgactgagaaagacatcagagagatagaaataattttcatcacaggcaagcagtattccacctctttgccatcagccggcagtgcagcatattgctatgcaaatctctgtccaagagagttgaggaggatttgggaagagatagctgaaagttttgtctcttgcagacagacaatcgacgcgccgtattgttgaatgagaagttttatagcatcttgtttggctctggcatttagacctctaacattccaattaaagtggaaaacattttcttgagacatggaaacacagatcgactaagatacaaactagcaatccccagttatagccgttcttgccgaaacacaacccagatagacagggagaaacacaacaagaaggggtggagagctgcatacagaggtgatgctgagttgcagacacagtttctaccaacagacacaagacactcatactgaagcaagtccgggacagctgattgcgaagtgagctcgggaaagacttcattaaattgcttggcgaccttgcagcacagctccggtcatgcttataccggcgccaccgcagacttcttggttgtggccttcaggcgaatgctcttgcagccacccttctcgaccaaatgcgcgattatctgcagagacaccagagagagtggtttcttgtacaactgcaagtaaattttcttgatgttatcatcaaaggcagatttatcatcaaacaacccaaaattttttgacaggatttcctgggcaaatgtttcaagttttgcacccgtgcgccgtttacaaagcaaatgctcacttgctacgctcacatgctttgccttctccgaggtctccgatccgagaccacgccttccttcaagctgacacttgcttctcctcgcaggatgatgatgtgctcagcttgctagagcggcaccttgatcccttgattcatgaggcttctgtgcagcactccatctactcgcctgactttgactcccagcgtatttcctcccctgttttcactacttcctttgcagctcagggaggctctgatgctgatcagggggcgaagtaagttgaggcttttgtcaacaacataacaactacaatccagccgccgctccttcccaccccagcaaccaagttcgtcgccctgcccgtaataaggtggtaatcccgattctttctccggtacagcttatcaatttatcatcctggttttttggctcctctattcctgtcatttgacaatgatggaaaaggtgacaagagtgagataatggaagagcaaagcgtacgcacctcattcgagagtcaagaaagaggggaggagcctctttacaagctgcttgttcttgttacatcttgattcggtctgttctgtttctgattcgggccattcggccagttctgtttctggttttgaaatgtctatgtgttggacggacgagaccagatcaaaatactcactgccttctctgcacagtctttgcaagctagggcatccccatagaagtagctctttgagtgtggggagctgctgtaggagaccctacagaaatttctctatctctgggcagttccaaatcttcaattcttcaagtgaaatgaggccatccatcccatcaggcaactctttcaggtcataacagtgctgcaaactcataatctttagcctggccaaatttccaagcttcgaaggaagcgccaccaatcttgggcaatatactagacatagcttttcgagggatgcaggcagcatcgggatatgtaattgaccatcctccgatgatgaaccctttccctcaaggttacgacaagtttcaatagacagggatcgaaggtgaatcaagctcatgagctcctctattggccagcgcacaaggccgtcgcatccactaatagacaagtcctccacaaaggcaaagcatttacatagcccaagatgtatttttgagaaaccagatacatctgtgaagcagttgaggcgatatagcgttaaactccgaaggttttctagtgggccttggtttgtaccgacctccagagtggacattttgttatatgacgaactaacatctagtttcgtgagagatggccatgagcccaacgacattctcacacgctcattgtcctcataaatgagttcagacaaagttgttagatgtgcaagtgagctcattgcaagactgcaacatctagctgagttcaattcttttagaactgggcaatctggaacacttgcaagttttggacaatcgaagatatatagctttgcgagctccggaaacgtaaccaaaatagtatcggcctcgccaacagtattttctgtctatttctccaagtttgataactggcatagagtcatatcctttaaccttgggaaaatttgcagagggatgtagtatcattcggctttcacaccagcgacattcataaacaatgtggttaggtttttcattttagataagaacagaccctcaagcgagaccaaaaaccacacagtcgatagatccttacatcctggacagttgaaaatgtggagatttgttaggcactgcaacaactgtgggtctttcatccattgtgggatctttaggccactatatccgtgtagttccaaaattttgagcttagcgtgaggtttaagagactccaacacttcttcctcgttgcatcccttgttttcaggcatgcaaaatatactaccaccctaagaaagtactagttcacttagattttgcttcagatggagattggcatcttttccattttccctgctatttattttactcaaattgtacagttccaacctgtttttgctgggtcggcggaaggaagtcgaccaaatttcattaagataaaagagggtaatacaatatacacaacattatactgtcgagtcgagggaaacctcgaaaaagaacaggaaaactatttacagggggccaaaaaacatgctgctactccccgcaagaaaaaattccggccgctctccagatcaggacctcctctttgatgtctgccaccaagtgttctaccacccttgatctgtcataaaaaatccttgcgtttctttctttccaaagcttccagcagaccaacatgaacagagaatcggaggcggccctgtaccttgaccgaaaacagagacgcacctgcagccaccattctgcaagctgtagaccgagctgatcaggaaggggaaacgccacattcagctaagttctcaactgatgccacactctgttagtgaaagagcattttgtaaacagatggatgcagtcttccggcgcagctcgacacagtgtacatgtcgtatcatgtggccagcctcgtttgctgaggttgacagccgtaagacaccggcccttcgcagctaaccaaaggaagaacctcactctcgccggcgctttggtcttccaaatcagctcaccgtgggggcacttcaccgaagggtagaagaagaactcatatgcagaggaaaccgagaaggcgccgcttgctgtaaacctccataaaaccgaatctgactgcccgtcttgaagagacacttgttgcagctcatcctataaattcagatagtcagcaagggccctattggaaatggacccctgcaagtctctaacccacctgttgttcgtcagtccttgagccactgtgatcttcgttcgaccgacaaagcagaaaatgataggccaattatttacaatactttccccacgaggcagccagttacctctccaaaaattgatgcgacggccatctcctaccatgtgctgtgcaatcgagctgaaaatgtcgcggacatccttatcagattcccaattagccattgtccatggcctatcttcatgttcaagcctgttaaactcccatttcagtcgtaaaaccttcccgaaaagctcaatatccctgattcccaaaccaccaaattcaactggcatactgacggctctccaagcaactaggcaatgaccccattaacttcttcttgacctttccacaagaaacccctgcagcggcgttcgatgtccttgatggcccattttggcagctgcatcacagagagaaagtgaaccggaatggccatcaaaattgatttgatcagacagagccgcccgtcaggtgaaaggaactttgatttccagcctgccacctttttagccaagcgatcaaaaagaggttgtaactctgcttttgttggtttcctcacggagagcggaagacccaaatagaggattggaaggttctgaagtttgcaatgtaaaatatcctgaaccaaggagctttgttcctctgtgtagcgaattggtgaaactgcactcttggagaagttgggaagaagatcagtggcttcactaaagagatcaagcacggctttgactagcatggcctcatgacgaaccggtttaaagaagatgactgcgtcatcggcatagagcgaattatttggtgctctgctccggtggttaactttatcaagcaacccggctgacattgctttctacaacatagcatgaagagtatccatcaccaggacaaaaggaagaggagataacggatccccttgtcttagccccctcataggcttgaaggggtcacttaaagtgccattgatgtcaatctgaagttgtaatctgaacgagctgattttccgctgtccccatttaccaagtgccttgcttaatcttgccatcttcacatacaaaatacagaaaggatcagagctatcgacctcactcccccaagactcctgcactacgtcattgaaatcatcaagctttgtccaaaaggtttcaaatttgaaccttttttttgcttagggactcggttaccccaggttaaaagaagaggacagtggtctgaacctgaagaacttagagcctgcagatgagcttcagggaagagatcctcccactgagtggaaatgaacaatttgtcgagtttcaccaaagttgggattgcctgctcactgctccaagtatatcttctaccaaaaagatacatctcctttaattctagatcgttcaccttactgcgaaaagcattcatcaagcgccgattgatccttgtgttattcttgtcttcggctgctgtaatgaggttgaaatcaccggctatcatccattcccccaaacaacaattcttgatgacagacaattcctccgaaaacaacagcttctcatcatccctttgagggccatacaccgaggtcacagcccaggatctccctccctggcgccaatccagattaactgtcaccgaccattgtccaacatggacaagagtgccctggaatagatcccccttccacgccacaatgattccacctctagtttgaagagcaggaagaaattcaaaacgatcaaaatcagggccgcaaagttcaaagacagtgacacgatcaacaacttctaacttagattcttggaaacacacaaccaacgcattggaggaaacaacagactccttcaccagggagcacttcacagcgttgtttagccctcttacattccatactagaagattgaaactcactcctgacattacaacaaccagacacccccagcccccggctaacacagcatacaaaatcaagcaggagaagcaactgccaaaggtgccacatccgctagcgcctggaactccggctccgccagttcaagatgaagcagctccgccaaggcctcaaaatggtgaggcggcagcggttcgtcgaagagttgaacatattcctccatcgcctcatcgtttgcttcctcttcttcttcaatgattcccagattcttcatagtcacccgctgtgccttggagatggagtggtgtcgggcgcctgagccttgcagagccagccgtgggcttctccaaggcttgaaatcaactgggatcaccgggcggcatctgctcttggtgattgggacggaggcaggcggcttgctgaggacggacgatgaggacggcgtggagatagcgtcgacgaagatgttgacttgtacgcacatgttctcatcggccgcaacgaggattgcttcctgggccgctgcggctgcgctctgcacttcctgggttgccgacacagcgatctgagttggcaacatgcccaatttagagccggcctcctttcgtcgagagtagacacggtcaaaaggcaccacctgttcctgggctacttgaggaattgccaaatacaacccacggacgacttcagtaggagccggacctccagctcgaaaatgttcccccgctgagttcccaccttgggggctgctgccttcaaccgcccctattaatggaggatccaaacagaggtcgtcgaagcaaaggcgtctagcagggagcggtgtggtctgcagcgaccagcaggaagcaggcgccgaggctggccttggactgctctcttcgtcttgggagttgcgaccgtgaaccttgtccacagtgcaatggtgtgccacaggagaggttgacctcgtgacctctctgtaccgtgggccaccgtcatgtttctcgtccgccagcatcggcgaactgcaccgtgaacctccgccttgctcctcgaccgccaacacgaacgagactgtcggggcgtgtacctcgaccccgccgcaccatcctccgccgccttgctcttggtccgtcagacgcagcgaatcggagacaacaggcgagcacctcgttggcaacatgagctcagcaacaggggatcatatcgcccctgcacccggtacagcaagctcgaacacacgaggtagggacggcgagatcacctcgacagtgtcgaccaccacttcgggcgagaccagcaccatcacctgagtcaacggcgagaattgttaaacgtcgttgacttgcgccacctgaagcgacgcgttgatcgtctcagctgaggagagaaccagaccccataggacgacggcaagcagcgccaacctcaggggtaaccgaagcagccacaccaacagccgtcgccgctacctcgaaaccctgcgttaccggcacttgtgtgcccagctccctcgtcccgacgacagcagcagcgtctggagaagacgggagcagatcctcccccgtagccgacgaaccgaaacgaacgatggccgacacagcttcctccgtgttgaaaagacggactggttgctgtatcaccgacggcaggagatcgaacgcttggcattccaaacccccggctgaacctgatgctcctccatagcgagtgctgcctccccggtccgatggccacagacctgcgctgttgaaccacttagcccagcagtcgaaggtgttgcgccttgtcacatcatcgtcaccatcatcgttgtagaatttatcaggggcatgcagcagcatgggatcgttcacctcttcaacgtggaggaagacgccatacagtaaaagagggccgtgctctaggcgctcgaggaggagcagagctcgaagacgacttcctccaggagccgcccgcccctatcttcttaggcacctccacctgaagccgttgaggaagcttgttaggattcttgaaccaggcgaagaggcccagacatctggtgtcgttggcagggatgctctcgatgagctccccctcgagctcgttgacaaggttgcgcaccacttcgcgctcccacaggtgagcagggagcccatcgagcgaaatcttggtgaagaacttcaagtccgagctgtctgcccaactccggcggctccacagcttgaaggacgtgggaacccccttcacgaaaatctcatgagagcaatggagaacaaggttccgatcttgcagcatgcggaacaacaccagaaaatcctccgtatgtgtcacgtcgacacggacgttgctctcgttgatgccggtgtgctggacgatggcttctaacatctcccccggtgagaccgatggtcttgtcttcagaaccatggccaacagcgagtgctggttgagccaagcttcattgtgctccatgcccaccgtccaggacagcacgcaacggccagtccccagccgcagctccggctcgccgactcgaaaaccctccatgtaggcgtgctccctagccgcgcagatttgaaaacctgccatctccttggaagacttgacgacgtcccgcggatgagcttcttcctcagctcgcccaaccactctgtagtcggcaggcggagcaggccgggacgcgtgcgacccgaagcagcggacggggatggcggacgctggcgagaagtaggagcagctgtatgcggtgctggacgagcagcaggacatggcgtcggctgaacggggcgagcagcagggtgcacgcgagctagagaagcgagggaagcaggctgagcaactgagcacgggcgagttgaagagacttcgtcatgctcggtgcaaaaactcgcaagatggcccgaaaaccaacaacggaagcaacgaatctggccggtacactgcgccttctgatgccctaggccaaggcatttgaaacacctccctgcaaccactaggggatatccctcaccgccttgaatgctgatggacgagtggttgggcgccggtaggtcgccattgaatgaactcctttcctccttctcacctctatccaagccgcctccttctcagccttacctaacgtgtggtccccaatccccaccacgatgtcgcgccaggaaccaaactggggtttggaatgtggccgtcggacaccggagtggccgtccaccgggcggtgagggcgctccctcacgcgctcgctccccagccattttccccctctcccctatcagagaactctctgagtagcccaaccgaccggttccagcttggccgtagctctccagttccaatctgttggcaaggtgattcaagtccttgagctcctcgattccacggccaggttcagtgtccaaaacaaatgttgttagagtgcgaagatttttcagtaggctaatatttggtggcatcctcttcaatggacatctaagaagataaagatggatgagcttgctcattgttctcataccttccggtaaatatgtcagaagtaggcaatcgttgagccttagtgtttgtaagttatacatcgtgcatattgaacttggcagcacatccatctaagacctagaaaggtcaagatatcgtagatgctttggattgatcacctggctatgagaagggcaagcccgaatacagacaatacccaaagcacttaatgacataagtctcaagtcagtaccaaaatctcttaatgacatctgtcttaagtcattaatatgtactagtaaccatgcagttatcaaagtgtggatagaagatgatattttgagcaatcccactgttagactcatttcattatcataggaaaattcggtatatcatcttttgctaagtcatgcatcaaatcatgagttttgcaacaaattatagactcatcagcagtgaaagaaaatgtcttgatcggtttcacgtcttggaggaaggatctccaaaccaaattacagaaaacatattcccccttttgttccaaacccattgtttcatcttcctgaatgaaaccatttgccatccacagttggatcaacacttctttgtccatctcatggtcctttgggaaaactgaacaaaaggcaaagcattcttcattttaggtaataagtgtctgtagctcaattttagtataggtatatcatcttcgcccctgtcattgtcccctaattgcttcttgcaattgtttctcattccttgacttgttgctttgaactcatcataccacccattgtcttcaaagcaagaggaagccccttacatttcttgacaataagtttgccagcggttaccaattcagcttgctgttgtacctctttactgaatgctttctttgagaataattcccatgaatcatcatcactcagacatgctgggttatggtattctagggtgcccattatagatgctactcgctggctctgagttgtcactagtataacacttccatcaccaccaccaacagaagacaggagtggcttcaggtcttcctcccacttcttcttttcttcattccatacatcgtccagcacgagcagaaaccttctccggccaacggccttctgtagttccttttgcaacaactggacggtttcaggcagttagcatgctttgtttgtagccaattcaatgatggatttcagaagggaaacaacttcaaagttgtctgacgcacagtgccacatctttagctcgaagtgattctaaaccctgtagtcattgtagaccatcttggcaagcgatgtcttgcctaaaccccccatccccacaattgggcccacttgtgctgatctcgctgattgagcaacagtttgatcaccactacctccttgtcgtcgtctctgccaaagatatcatctaattcatttgatggcagcactgagtacgtctgccggtaagaaagttgttgtggctcatctcgcagcaacaggccaaacgtgttcatctcttcaaccagctcgttgatcttcttgagcactttggcaagcttccttctcatggtaaaatggaactctaggggggtcatgtagctccgtaccttgtgccctagcgacttgaggctcatggcctcgcggtgcagcacctcgtactggaactcatcgaggacgtcatcggcctcgtcatcggcggtgttgaggtccttcatccagcgcttgatggcggggttggtctcgctcttcgactcagcgtcggccaacaggcgctcgacggccagcagctgccgctccagcttgcggcggtcgccgtcgacgccatacatgcgggtgactttctggacaagcgcgtcggtcgccttgccgatcaccccgtgcactacggggagaagcagcgattctgccatacaattgctctctttcacaggctgtctgctactctctctgctacctattgatgatacacccaagaagcaaagcaaggaggctatgagtcctctgctctggcctcatccaatctaaatcgtagcacaagtcaagatgatatttttggctgtcaccgccttcaatgattcatatgattctcaagttgactgacttttgtgatgttgtcccttcaggccttcacggtgcaggaacgtggcatctcgccacgaaggacagctgctaacgtggcagtgggggaccatttctttgtgaggaacacgggactaaggccttgtttagatcccaaaaatttttagctaaaaacgtcacatcggatgttatgacacatgcatagagcattaaatatgaaaaaaaaaccaattatacagtttgcatgtaaattacgagacgaatttttttagcctaattgcgacatgatttgacaatgtgatactaagtaaacatttgctaacgatggattacttaggcttaataaattcgtctcgcagtttacaggcggaatctgtaatttgttttgttattagtctacgtttaatacttcaaatgtgtttccttatacttcaaaaactttacatccctagaactaaacacaccctaacttaagacatgagaagctcaacggaaaaagcagataaaagcatggaatccaggctgtagaccatcacccccacctccccaccatcgaaacaaacctctctctccaccgtcggggtcaccgtcgctctggatccgtgccgccaccgtcgccctcggcgctccgtctccttgtcgccggccggaagtggagggcgccgacgagctctcacgccggatcctcgctgccaccgtcgtcctccgagccctcgttgctggctgggagtggagggccccagaagctctcgcgctgctgccgtcgccctccgagccctcgttgcctcccgggagaggaggggccccgatgagctcccgcgccgccgccgtcgcccgtcgagcgctcgtcgccggcaaggagaggaggggtctcggcgagttcttgcgcctccgccgtcgccctccgagccgctgtttgggaggaggttggggagccgccgtcctttgttggagctcgctgtgctgccagccgtcatcgagttgtggtggttggggaatagagagaatgatggaaggggagaaattgtatccttgtttctgaaattgagggtgtttagtgctaaattttatacgttatgtagtttaaaaacatgtgaggactaaaatagaagatggcaaaagctgacatgaaaagctaagaacacccttagggcgttcacaatgcgccgatgtggcgttcagcctccctccccaaaaccaaatatttgttgccacatcgtccatccgcgtggcctcctcaagaacgcggagtaagttttggctacgagttcctcatctcaggcggcgggacccacacgtaccagaggagagaggggagaggagcgatgatgagggaagatgcagtggccagagtgaggaggggagatgcagcggcgtgaagccatccccaaccatgccactgtcgtcgcacgcgtgcagtactcgaactcggccactgccatcatcactcggtggtatgctcacccgagcgcaatggcatggagtgcagctccggcctccgggcacgatggcggggatgacaaacaaaggcgaaagacgtgcgccatggcggcaagggagggcctggagatggagacggcggcgccctgcattggtgtaaacggaaggagacgaatgagctgtaaatttgacgggagtaggggtgaaaacggtacggaatatttccggattccgggtaggttttcgaaaacggaatcggccgatcggaatttttcagaaacggaaacgaatacgaaaatattttctcggaaacggaatcgaaaatgataagagcagtttccgtcggaactcggaatcggccagaaactttccgaaaattctctcggaatttcgaagttacaaagtccataatacctcccgcttgcctagcccaacccactacagctaaccctagttgaggagagtgagagtcagaggcagaggctagggattttggagcaatggtagtgcattgtgtgcaccacgcaggcacgccacacgcagccagatctggcgctgtcggccgccgtccccctacgccgccgccgtctcgcgccaccgccgtctcgcgtcgtcctccccccgccgtcactcgccgtccctgcccccggcgtctcgcccctctctgtgcttcaccgtcgccgtccacgccgctgacaccaatgcctcaacgccgatgcccactggcgactcttcctcaccaccaccaacaccgatgacgcctcgccgcctgacctcgccgcccgacgcccgggcgtcgtccccctgcctcgccgccgcccccctctctgcctggtcgagaagcacaaagaagcagagaaagaaaagagatagggagagagagaaaagagacaaggaggaaagagagaaataaaagaaaagaagataaaataaaaagagagtgggacccacgcctctccctcagcgcttgactcatcttggaccagcttatagtcgggccccattaaaatatttcatttgatataattgtattttacgatgaattgttgaccgttgagacttgagaattggacttgataaaagtttgaagctcagtttaaaaggttttttattccgataaattttcattaccgtatccgcgcctgttcgtttttgttcggtatcgataatatttgtttccggggtttcctttttcgattccgattctaaaaataatatgaaaacgaaaataataaagatggttttcgttccgttttcacctctagactggattagtatgaaatgaagaaattcgctatcctagtggtaaaatcttttaaagtcttacgaattgagtgctagactcttaggctgtgttcggacgtccattgtcccaacctatctccctcgttttccgcgcgcacgcttttcaaactgctaaacggtgtgttttttgcaaaaagtttctatacaaaagttgcttaaaaaaatcaaattaatccatttttgaaaaaaaaatagctaatacttaattaatcacgcgctaatggatcgctccgttttccgtgctactgttccaagttgggaacaacccatagcgaacacagccttaaagttcagcgtattagattgtacataatgaaatttctcccacacctcccaacccaaatccgtcacccgccgccgccgacaaaaccctagacccgccccgccgccccccgccccccgcccccggccgtcgtcccatcccgccgctcccccaccgtcgtcgcatctcgccgcccccccaatccatcctccggactccccacatcgccgcgccggcgcccacatcgtcaccgtcgaccgttcgacaccgccgccctcctctctctcgcactcatcccgtcaccccgacgccgccgactcctccctcctccctcatcgcgccttcctctactcgtaccaccgccgaaaccctagacccgcaccgccctcgaccgccgcccgtcgcatcccgcctcctccccgagtccgcgacaactattcccaaggttggtgtactccccgtcctctttctcctaggtctctaaatctgcatattcacatgttagtctcatccgtatggtagttttttttctttggtttcattgccgtcatccgtaagttgacatttatcgtcaatctttcactgtaaaattgtggctaggaaatggtgtgcctctgatagtatgtgagacaaacctataaattaatagccgcacaaatagaaaaaaaagcagttgtcacaggaatgctttggtgccgtttcattattcctgttctggctattagaattcatttggcttttgccactgcaattggccatattcttacttccagtgtcctttggtaacaatattagctcaatgcacaattctgtttttctattgattagaatgatacaaggtttttttttcaggtcatgaacaaaatgcagttgcacttttacttgttttattactaattcactaagtttaagtcacttttgttctggtagatatatttccttaatctgtactcatttgttgtttgatgactctaatcgatgatcatttatgcacattgtgactttctagcttaccatttgatgttatggtttaaggcacagaggagtagcgaaacatgatcccctttatctagaagtcactaagtcagtgagccccacctttatttgtgaagactacttgttagctgttactttgtattcaggattggcagtttcagtaacagctttaggcttagttcgtttcccctcgttcccaactgcccactctcgtttttcgtgcgcatgcttttcaaactgctaaacggtgcgttttttacaaaaagtttctatacaaaagttgcttaaaaaaatcatatagatccagcgtcatatatacaaagatggtggtagtataaatttagttagttttatttcgataataaaacgaacgagcgatatcgtagcgaacactcttcgtttaacttatgatattctatcaagcccatttaaacaatgatattataacgaaacacttctctatctctgctattataaaaattgaagatgtttttatcggtattttggtacgtcatccgtgtttgagttgttttttaagttcgtacgcttttagaaatacagatatgtgtttgagttagattttaagctcgttttcttttgaaaatacaaaaggagtcgtataagaaatcttttttttaaagaacactcacatgctaacttgagataaaagttggacttgtaattgtagcttgtgattttcttaaaaaaaaaatccaagcgaattcctatagtgaattttatcctatctaaaccgtataacaataataatgttaaaatagtattcacccattgcaatgcacgagtatttttatagtatatgtaaatttatcaatgttcacaccacaactcatcattcatgattagccagagacaaacatccatcaggtgccccatgaggccatatgtgagtcgaacacgggacacgggaagatccgagcagtcataaatcaacacggattgaaactgcctaattcaatggaagctttccaagcgcagccgccgaatcctccatctccggtcagcatagctcccgctcggccgcgccgctcatccctcaccggcacaccgcaccgtcctccaccgctcgccgtcgccgccgagaagagggacacagctgccgtgcgcgtccgagtggatgtggtgtgaggcggccgggtttgaactagccaacgtcatatatacgaagatggtggtagtataaatttagttagttttatttcgataataaaacgaacgagcgatatcgtagtgaacactctttatttaacttatgatattctatcaagcccatttaaataatgatgatataatgaaacacttctctatctctgctattataaaagttgaagatgtttttgtcggtattttggtacatcatccgtgtttgagtcattttttaagttcgttcgcttttagaaatacagatatgtgtttgagttagattttaagctcgtttgcttttgaaaatacgaaaggagtcgtataagaaatctttttttaaaaatcactcacatgctaacttgagataaaagtcggacttgtaattgtagctcgtgattttcttaaaaaaaagtccaagcgaattcgtatataacaataataatgttaaaatagtattcactcattgcaacacgtgtatttttatagtatatgtaaatttatcaatgttcacaccacaactcatcattcatgattagccagagacaaacatccatcaggtgccccatgaggccatatgtgagtcgaacacgggacacgggaggatccgagccatcataaatcaacacggattgaaactgcctaatttaatagaagcttcccagtgcagccgccgaatccttctccatctccggtcagcatagctcccgctcggccgcgccgctcatccctcactggcacaccgcaccgtttctatcgcccgctgtcaccgctgagaagagggacacaactgtcgtgcgcggccgagtggatgtggtgtgaggcggtgaggcggagggaacgcggggagcttggggcacggcgcttcgagacccgcggccgggcgcgccgcaccgcctcactcgcactctccaaccgcaaggagttcaccaccccgcacaacggcgccgtcaactctctccaggtacacccccttctcactccctcactccccttctccttctctcaccttagtggtttagatcaatttgatttgtacaccctgtagatggaatcttgcgtatttggtgtgcaattcctgagtcgctcccgctggtgttttgtaatttgacaatatggtcaggttgatttgatagagcggcggtacctgctctcgggcgcatcggatggatcagccgctatatttgatgtgcagaatgcgatcgaatacgaagctgggttcattgccaagcataggagcattctccttgtggacaagcagcatgaaaatggccacaagttcgcggtatctatggccgtatggtatcctgtggacactgggctgtttgtgacagcttcttttgatcagtatgtcaaagtgtgggatactaattcgactcaagtatgctttcatctgctttgtcgattgctaatttttcttttgtcttgcctcctttgtggtggcaatggtgtgatcctgatgttctgattttttgcctggttttcttttctaggtcgtaatggattttaagatgcctggaaaagtgtacagtgcagcaatgtccccaattgcaacaacacatatgctgatcgctactggaagtgcagatgttcaggtccgtttatgtgatattgcttctggagcctttacccacacgttgtctggtcatcgtggttagttgcttacttctagtgtagtgatgaaaatatgcttgctttgtttgtatggttaccaccttatccttggtatctgacatgtcagatggtatcatgtctttgaagtggtctacttcaagtgagtggattttgatgagcggtggttgtgatggagcaatacgattttgggacataagacgagctggatgctttcttgttcttgatcaatcacggtctcaactaggaaggcggcctccttttcttgagggcacctcagataaggtatggtcaccattatccatcacttacatttgttttcaaaatatttggttgcaacgctaaagctggacttccacttttattttctgcaaaagcttcaaaaatgttgcagctttaagtaaaacattatggttgtaatgctacagatcaatactgtcagccttcaagtaaaagctgatttctgcggctattaatttataggtttgtctcacatattagtgtcagtatataggtgctatggatcagtttagtgctccaattcttacaatataaggtctgcatacattgtttcttgttgattgttgtgccctagaaatgacgcgcaaactcattgatctagttgtgcaaatgatcaatgtattcatttttaattttgactaggatcctttgaactctttacaaccttcatcttcttcaaagatttactctgcacagcagaggacaggcaagagtaagaaacagtcacacaaattgcacaaaagtcaaatccctggacatggacatatccaacagagattgcaccctggtttgtcttctagtcaaaatcgtgcaacggcgcattatggtgctgttacgggattaagaacaactacagatgggatgtaccttcttagctcaggttgattgaatttaattgctatttctatgagcattcgattgctattgcttgaaaggaattattgcctatggctatcttcttgttatgcctgtatgcagtatgcattaatgat

SEQ ID NO: 9090 - DNA, 26928 bp, Oryza sativa
ctcgtcggagccctcctattcgcagcaaattagacaagcagatgttcatctaaagcgttgggggttagaaatttcggaaactgattggtctcgtaaagcgtctccctccccagactccagagagtgatgggatttgggggggggggatgattatgctgtacaagagtagtttgatagcaatgttagtggtagaagtgaataatcttgtatggtctgatgttgtgtttgctgggatgttgcataatggtgtgtctctttttttttactgcttgtgtaggtttttgtcatattaatcatggtgcttagcaaggttgaagtgaacttgataaggctgcttgaggcagctcctcgacagcagaaccagactaagcttgtccatgtaagtgtacctcgtacggttttttcttagatacgaatttttccatcatactttgtttatgttaataggctaattatatacctttagttaggagaacaaagaatccctcaagtgagtatttttgtgtgtgtgttgaaagtaagaagggaatatttctggattacctcatgtgtttcaattttagcacttactagtagctaatgcatgttctttttaatcttcttctctatcattttgaatggaatctgtggttgcactgagattctccaatcaactgcagtatgtaaccacagccagggaactgttggagcagctaggatcagaaactactccagaagggatatcaaggtattcattcatgttttatttgttctctatagcactacacatatctttgggaatatcgacatgttggctgtagtataatcttcagtctgtgacccagctataatctgttgagcatccatacttaaaaagcactccagttagtatatgacaaggcaaaaaccaccaaatctctgatccaatataaaactgttataggtgaatctgatctctagatcctacactgtatttcatgacactaatatgaccaattcagtgaattgttttttttgttaaaagactactggatgctaattttgtttacatgatgctgctagtttgctttggtggatggtgtgttcatactttcaacctctgtacatgaatgaatcaggcataatctactgtaatactattcaatgagcgcaaaaatttgatgcactaactacttagctacacgtatcttaagttagttcctagtcaataattgatcttcttctactagtataattctttagtatgcaccatgctttcccacatgataaatactctgtgggagagcattgcatattttgtagctctgttttcatttggtagcagttgttcttgaaaatctcaatactcctttaaagatatgcttttctgtgcgtgagaaaagaacagttatatgaatgtttacaacgtaaattttagtcaccttccttcattttgatgaacctcagtttattatgtagattcctggatttttgctaccttttccattagcaatcttataccttgtttaattgtcctgttacccagtggagcagagcaagcatttacctacattgagttttctttttttttttgtgttacttgtgtaatataatatttttccccatgatcaaacgatgttcattcatgaatttcttctttgtccagtgtatcaaaagctaagacaagtgagtattcagaaaagattgaagcattggctgcccggcttgctgctccagaggtatgctgttgtcgtgctaatatcttaaattcctcaattgatacttcagttctttttttgggtgtggggaatagttcaattgaatgcaaaaccaccaactgcagcatatggtttacttagttttttcttcaaacaaaatcaacttacttttcagaacatatgcagccacaataactcagatggattatacttttgtttgatttttcttttgttcagccagaaaatgaaatgccagttgatgagaatagagaggtagaaagctcttatgaaggagataagccaggaagtccaatatcattatcatcaggattacgtaggagaccaatgtaagttttaaaatttgtatgtttctttttcataattattacaattagcgagctaataatggatgtaaattgaatagagctcacaacgttgttggacctagcagtcatgagagaaaagacagagacattggagcacctattaaattggatgaagaagcacaggctcatattgagaagcataggtacattaaactcttctgtatcggcaaagttcttttctttcctggtctctggtttagcttctgcgttattcttagcggcaaattcccttgttattttctaaactcatcttctaatcgcgcaggaagctgcaagaagatctgactgacgaaatggttgagttagcgcgccaactgaaagagagcagtctcaccatgcaccaatctgttcaagaaacagagaaggtagtatgcttctttccttcacctctttttcctgcagctatggtatgttgacattggcaactgtttgggtagatccttgattccaccgagagagctgtcgagcatagcttggcgagcactgggcgtgcaaccacgcgagcggcagaggtatactcgctggcttccaagacgacatgcttccagtggctgctcatcttcatgatgacctgcatgttcattatggtggttctgctcatccgggtcacctaaaatattgtaattggtgttgtttgagactgactgattgagttttgtattcagttgtgacaatgagcatgaacggaaacgaagtaaaaaaaaagtttggagaacctctgccccttggttgtcaccgcaattccttatccagttttcacataaatatacttgcattttggatatttatatgcagtatattttcggtgcaaattagattatggagctgcttattttggctctgacgactctgtgttgccgaagcacatgcatatattacaaactgcatatgaaatgcatatagtactatagtagcactttctcagttttatgttataagactttcattggtttcatattataagacttttattgaccacattcatatatatatatacgttaatgaatctagacacacgtatatagagtcattaacatttatataaatgtggacaatgctagaaagtcttatactccctccgtattttaatgtatgacgtcgttgactttttgataaacgttgaactttcatcttaatcaaaaaatttatgtaattataatttattttattgtgatttgatttatcatcaaatgttctttaagcatgacataagtatttttatatttgtataaaaattttgaataagacgagtggtcaaacattgattaaaaagtcaacggtgtcatacattaaaatacggagggagtagtagtgtagtgccctttttaacgtggatgggctgaaaagcccataaaattcacgtggcccatcaagtcaccatcaatccatctccaattctccatctctcgtgcggctgtggcgttgagctgagaagctgagcacccaaaaagcagcgcgcgcgcgccggccctagccacgacgcaccacgcgcgccggccgccggcgaggcccacgaccgccgccgcacgcctttggccagatcgcgcaggcgagatcctcctatggccgcctccgtagcgccagcgtcgtcgtccggctgggacttcacctggtgactctccctctccctctccctctccctctccctctccttccgaatggtgacgatttgcgcggtcatatttttttttcaacgattcgtgccttctcgatgagcaatttcggatgatatttctcctaccggagtgcatatgctgctgtggtgctgtgctatccccgtgttgctttcacctgcgctcgtggtgttcgacgaattgcctaaaagaagcatttgctactgtttatgctttctttggctaggcggcggtttcatttcagtttccctgcctatcaatgtgttgcgcatacttccttatacctttttttttacccccaaattcatgcaaatttgagacctattgatactatgatacatagtatagggcaatgactgctattttcgaagcattttgaactgaatcggtgggaatacctgattattttcatggagtaaatatcctgtcgtaattggtaaagctattattttgcgagggtacgcaaagctttgttctcaatgtaaagccacgaactgatggatcattaaataaaccacttccattggcgacatttagtttcttaagagttaagactggaagccagaaattctgtaataatttatcgtagtgttcagagttcagacaacacagaagaaatgaaagtgtgcagcatctgttaggaagttacaatgatgtcccactgacgcacaagcaaatttgctgggttatggaaattagagcagaatagtgattttatcgtttgaccatatagtgttattaaatgatgtattttcatgagcgaatgatcaatgccaaaaaaaaaatagcttaaaaacttgtggcgaatggctgtttcatggctatagtctcacaaacccagccttgcagaaaactcttggagctagtagtaatcaacttgatatatgttgcttttatgcatactgaatcatctgctacctttaatcatcctgttcctcagacattgctacttacgcatagtattgcatcaactatgtagctcatatgtagagaaaatttatcttgcactaacaacctttttgtatggcagtgactttgaaattgattatggatccgaggaacgcgcatccatagtttacaaaacgctagctgttgataaggaggtaagaagttatagtacactttaacatggttcttgttttcataaggagtcccaatgtttcctcttttcttcatgctagcttgttgagaaaagaactcgaatcctgtggtatttatcttgcagttgcaacctgacaaggtaaagagggagatgtctgtttctggtggcaagctcgtcgtgtcagtaaatccattcttaacaattgctatcgattgtgtttactttgattcacgatgtgtactgatacaaaattttctgaatctaattcaggcactttgaagctgtagaggctcggttcctgcgagcatcgttcagcgcgttcgtcgatcttacagtactggttaccaagcttgttgaagaatatggcatcagcaaggaaggagaaggcagtatctagctagttttactcccctgtatcttagaaaaatgttttacaacacctttgagcattcataccttcttttatatcatattatgtgtgttcttcgtttcttaggccagaaatctacaagatagaagcagctgttgtaattccagatttcttgaatcttggtatgggatttgcctctcaagagtaactctgaacatacttggttgggatagtagtcagttcttgtcgccttaaatgaaaaatcatgcatgtatagctcactgtattatataacctgataatgatgatgatgaatcgtaaaaaatggacggaaatccaagaatgcttcgtaaatatatgtagctgaaaataaattgactcggataaagctaggaaaaaacagaaacaaagtctcccctcattaattaatttagtaggaagagaagatgacaagagtgctatctcattgatagaaaaatagaattggcggaatattactccctccttccctaaatatttttgatgccgttgatttttttaaacatgtttgataattcgtcctattaaaaaatttaagtaattattaattctttttctatcatttgattcattattaaatatactactactatagtttttaataagacgaacggtcaaacatatttaaaaaaaaatcaacggcgttaaatatttagggacggagagagtattacccaacaatacaattaaacacgacgtacgcacgatcattagactcaatttaaattacgacaatacaattagccagtctctcatagccgaccgatcagctaagcgacatacacgcgtacatgcaactaaatttaaattacgacacacacaaaacctagacacacagcaaactaaatttaaattgcgacacacacacagaaacgaaccttagctagctctctccaacctcactaaattgaacatgacacgaacacacacaattagtacagctacatagtactacgctactactcctatatgggacacaggtgcatgcgtggcacggatcgatcacactagaaaatgatcgaactacgaacgtcggcctgcaggaggtatcttcctgggcggcgtagcgtccctggggctgtccgacttgatggagcacagctcgtccgaatcctcgccatctgaagtccgagttatgatcaagtcgtctatgtccagatacatcggtggcagatctgcaaagtttattaattttacagcaattaatgcatgcaataatcaagtaagcaattgaagctatggcaataatgcaagaaatcaagaatcaagaagaagaagaagaagaagaaagctagaagttatataccgtgtttctccctctctcgttgtgtttcactcacgctctgctgcttctgggatgatgaggatccctgactttgctcaccttcacctccatgctgctccccggtgcccttctttctaccagacttgagagctaccctgtgggccgctagatttcctgtaggttccacagccaactcacaggaatattaattttcttgacggggttacttatacccacagaaaaattgtgttatttttgtaggttttcacacagacccacagaaaaatagcgctgacaagtaggcctcaagaaccatcaaataaaactcaggcagccaagtcccaaaacctaattccccacccctcttcccaaaccctcgagccgtcgccgcccctctattctctccagatccgcatggcgagcgcctgtgcgataccttcgacgaacggcgggtcggctaccgagcctccgcccagcgccatcggcaagatgcagccgaccatcaccaccatctcctgccggcgacgagcttccaccatcccctccactgccggtgctagccaccccaaggcccaagctcagaacctctagatctggatgccccaaccctgggaaccacggatccagccgtatcgagtgtgggtgctccagatctcgcggttctcggctccggcagcgccggcaggagaatgggcgctgcccctccttcccctcctcttcagtaagtaaaagcatccaaaaatatgtgtttcaatggtgaggaaacggtttggagcacctctgtccatgctagcatgtgtttccgctgctaatcccaaacaccgatttgttcagatagccgccggcggagatttctaggagttcaatttaatctgctccaaagttgcagccaaccattctccttcaggatgaaaaagtgtaagtcatactagtttacacttgtggattattttggctttgatccgtattacgtgactgcccagtagtagatctagattgggttattggcccttgaccacaagtttaatgattgtcagtggaatgtcagtagatctagattgggttcttgtgtcaaaacctgcgttgctgcattcatcaactaatctagattggattagttgatccattactgttgttgccaattattattttttctcagagctctgattcccagatattaagcaagacaagttggttcccatattgtctacattatgtgatttagtttctataatagaaatttaattttcttggattacttactcctagagtataatatttattttacatctaaatgatttgtttcttgtttcagccttgtaagacaattatgtctggaccaactaattttcctctagccattttgtgaagacctaatgttgtggcatgacagattgacaggtactcccacactagagtccctgctattcataaaactttgtttgtgtctggtactgagttgtttgacatggaattaatctatcagtggattatcatgcactatgctttcttggtcacatttagttagaatgcagatgcttttcttatgctatttttaccttgcaattcatggtaaggattgtgtgaataatgagtattatagtgttttattttctctgttttagtagctaagaaaacatatttttagctcaggttgtatgcatgaaatcattagtgctttctagtctctactagtgcatatacatacttcacaagtccaagtccatgtatatcttttggcaagtcacatactgctacatgtgttggatagatacatgccatcagaacaataaattagtttcagtctcttgtttttaaaattttcttatgtacaaaccctttataatttaccttgttcatggcactttgtatttttcttaacaggccatagcttgaatctttaagtgctgcagttaaatatctacagaacgttgcacatgatgaaaatcaaggtatgcttctcattcagtggatgaaatctttcttagtctaagatgtcctagcatttgcaccatgaaacttgtcatttaagcatccatagaaaatgagtttgatcctattatcctagcatttatgtcttatctgaattggcagagtactacaggaagtattttcatggtcacttttcatttcagttgccatatttcattttcatgctttgtagttgacaaatttatgttgctcacttcagtttttcctgtactaatctatttgtttctctataactggggtattcagaatcattgttatttattttgtaatgaagaaaattatgaaattgaacctcttttttaaaaccttttagcttcctttgcccaaggttgaagcaccacggaacacggactgctgctggaagacaatgttcttttacatatgtttgatgaattgtaactgaacacatttatcttttctatggaccctttgtatattactaaatccggtttgaatgaatttgtatgtactgaacttagatggactatttatgtaagctttgcagacttgaattttgatgtatggattgtgattgatgttcatatatttatccaaatcaccatgtgtttttttttgggcgtggaactcattttttctgacggtggatgatggtttttcctgatgggtccacgtcaaaaataagctttcacaaacctgacgccagttgattttttttgtgagccaaccgacaggaattcccgacagaaatgatatttctgtcaggaaaacgacagaaaaatttattttctccgtggtcttttttctgtcggcaaactctgacggtgcacccacagaaaagtattttctgacggtaattcatattattctgacggttttcggcctacagggtagacctcttgatcttctttttcttctcatcatcctccttcttgtcttccgacgactgtggccgctcagcacggttcttctgcctgtccattggagcttaatttgctagctaactaataactatagctaatagctaggcgctggctaactcgatcgaaaagagctgcttatcccacagcttgtctgcaggttgcgatgacctatatttatagtcagtgtacatcgatcattgaattgatctttgttcatgcttacctttaatttgcttctgacttgctgcattatatataatccaggtcttgagatgaccagatcagtgcggcgcatggatgtgtcaaaagagatcactgaacaagtatagtacatgcacgtgaactagctagctactgtaaaatggatcggagtacattgcgacagagagcacatacgtactgtgaaacaaattaaacatcataatctaattcttgcacttaaatgtccaaatgctagtttctcgcaatctctggttgtagcagaaagagccttaattttggatcttaagagctgctattattacttgatgacgagaagtctctgtactttaattagccgtgcatccaaccaaagagtgcctccatgctggttctcatttcggtttagaagaaaacggagacggcccagcaaaccaaaacgacccatctgtgagcatttaatttgcatgtgtacgccttacgcatttcttcgctaaaaaaatagttaaaatttttcgggcttggttttgtatatatatctctctccctgcccaagctcgtccaataactatcgtgggccttttttttttttggccagacttcttcggccccggggaggcaagcctagggacaatgcatatttataaatgaacaataatccaaatgatttaagttatttatatatattattatacggttggtcagtgttggagaaatttattacttctttccaaaacaaattaaccaaatataaaatgtttaaattcataatattatgatgtatcgcatctcatatttaattggtttattgtaagatagagggaatactattaggtacgcttgatcatgtggtgtgtgccttgcattcatatgaatactactctcttcgtcccttaatataagagattttgacattttagttacactgtttgactacgtcttatttaaaaaatttgtgcaaatataaaaagcgaaaagttgtgcttaaagtactttggataataaaataagtcacaaataaattaaataataattccaaaatttttttgaataggacaaatggtcaaacagtgtaagcaaaatatcaaaatcccttatattaagggacggagagaatagtattcatatcaaatggaccaaatacaggcagctgatagatatagggatatgctacacaaagacaagctcaatgtttgtgtggtgtgatgtaatcttaggagtgagcccataaatagtgggataatgttaaagcaattcgcacaatgctattgctatggctaggatttaagtaaccataagatagggccacatgagatagaaaaaaaaatacttcagctcttgtttatgaggtgaatgagagagataaaaatattttaattttgtttgtgatagaccttaagtataatgtgcaccataaactaatgctacttaccacaatatatgtgacttattttataagtgtaattattattttaagattatatttttcataaattattattgttgcgctaacgccatatcgatcaaaaaaagtgagcagaggggaatatgcatgatatatagcatatcacgggtatgattttgactgctagctgctgctgtatgtatgataggcacaaagctggttggccatgcatgtactgcgtttgcgtggtccatttgaccagatcgacgtgagccaaagcttaagtgcggtatctccaatagggaagttttttttgctagtatcataacacttatcgttttgctaaaactgaaatcaaactttgtacagctttaactatgaacaaaatttaaaatatttattttagaagcatggaaactatatgtatatattaatattgaaatatactttaataaaatcatacattcatgatatttatttaaatattgtaatagaaaatagtgataaagttgcttcttaagattgtgtcccttgttcaaaacaacaagcatatttttaaatggtactacctccgtcccatataaattataattctagatggttgcatatattaaggattgagaaaaaaaactataatcgatgctccttattaaatgttctatatatagataaaagtggaggggtagttgagggtaaaatagagataaatttgaatgagaagtgattaatgagaccattaatactatattgtgataattattttgggacaaatttaaatcctagaaatataactattataggacagatagtaactagcactctttttaaaactaattaatatgggtgttaaatgctgcgtgcatcttggaatgcgttatatataggagtatactactagtagcttgtgtgcctataaatataatcgtatgtcatatttaaccatattaattgtgatatatattatcacgattgcatgcatggtcaatataattcttttatttattaattaatgtaagagtttctggcatttagagtaaacgcgatgttacctttattttactatgtttataatatatatagtccagtatatatatctgatacattggttgacaaacttagtattacttaaaaaaagatgacatcaatagcagtttatttcacgtacggtagatcaatgcggcgtacgttgctagacaaaactagtgcgtaaaaagtttcgagcacacgcagtcataataatgcagtaatgcagatgaccaaggtgaatggggtagtgcatgcatatatacacttggtcaactctgtcgtatacagtagtagacatgtaaagtactaaactttattcggtctcgtcatcgatatatcgtcatactactttactgtagttcatcagctctgcatttgcatatgcatgcagatatgattcgacgaccaaaattaattaaggctgtgtttaatccaaagtttgatccaaacttcagttattttttatcacatcaacctgctataaacacaacttttcagtcatatcatctccaattttaaccaaaattcaaactttgcgctgaactaaacacagcctaaggtgatgtcaaccacacgacgaagacgcgcgatatgaagcggtccttgttgggataagacgtactacgagcgatccttttggacctcatggtcagtactccgcatatccgtactgacgattatattgctggatggagcggcttgttgcatttcatttccagtagatatagattaattgtttatttctttatttttttcttaaaaatccagttaattagattgcacagatggttttatatatgatcttcattttggacgtcaacgaaattacaggagagtgaatcgtgttagcctagataaagtatggttgggctagtttgcccatataaatatagtttccgtttggtccactatgaactctgcttgtctacctaccccaccaccaccacccttttctctcccttggtgaataatccaacattttttttcgcgaaatacattacagacggagacactcatatatacaaacgtgcgcatgtaccctatatatctctatgaaatatacaaaaatgccaataaggagtacatgacataaaaattgcaaattagctccatcagcatagactacgaccttcttttttgaaagtcatggggatacgcaaatgcaaagcattcgagtggctagttatctactccctccttccctaaatgtttgacgccgttgacttttttaaacatgcttgaccgttcgtcttattcaaaaacttttatgaaatatgtaaaactatatgtatacataaagtatatttaacagtgaatcaaatgatagaaaaagaattaataattacttaaattttttgaataagacgaacggtcaaatatgtttaaaaaagtcaacggcgttaaacatttagggatggagggagtaatatagaatttggacggaggacacataaactactattgccctctctgcaaatataccttcgaaacttacttccatctccacacgaaaggcagatacacaagtatctggaacatattagcaacttggatcggctgcgaggagggacttctgaaaggttacaaatacggtgcacaagtacgtggagtgcccacctaaaggtcctgtctagacctatgatggtgaggcgaagactgaggcacagttacacgctgttctattgtgagcatgaatgggatgatgttgcgtgccgggcggctggcttgggtcgctgtgtgtcaacctcgaacgacccaataaatagtggaacccgattagagcaaggataatagtgagatatgcttatgtggaggagagagaaaaaaaggtgttggctctcatgcaagagctagctttgcacgtgctccaagacaaatacattaaatgtataaatgagagaaaaagataggagaagaaaaatcaaagataatcttagagctagctctgcacgtgctgtttttcggaaaaacccctttattttttatctttatagcgctacctctagaagcggaattttcttttcttcgcattgtatttctgtgaaataggagggctttttcagaacaaacacaacagggtgttgtccagtttgaggacatatgcgatattttgtgcaaatacgaggagtttttttttttttgcaaaatagccttttaatgaaaccggctccaacccacggtgcagacccatagcgcctaaaattgcgtttggccggttaccgcctacaagcggtcactcgtgcgcgcgcgaggagccaactacagcaaatgggcgacgtgtaaatttacgggatagctaaaaaataaaaaacatgagaaaaagggtacggttaggctggttattgattgatgataccccatctaccatggggcatagagagaaacaaccaagcaagtggttgtgccggctcaggtacgcacggagcccagcattgagacctcatacatctacaacagttggtatatataagcagtagatggaaatacattgaaatccctaagttaaggagctgcaaagacagatgaagtagcactgcaaaacaaatgtccctcttaggaggatgaaatggactacataaacacgagtttcttagtgcccaaatatatcaaccacaaagttctgtaattgagcatagctgcccctgattttagatatgcagaccacagtgaatgattttcttacaagttccaagctaagatcattctacagttaaactcatgatctcaccataatacgctgggttttctctgggttgacaaatacactgattatattcatgaaaatcattaagcagtgcaatactacctacatgactcagcgacacacagaaggcaacgacggacgaagttatggcagaaacactcttaattttgtaagtgtttttgtatttggaagatcaacaaatcttcttttggatagggaaggtcaacaaatcatttgctcaagcttaatgttctcgcaatatcttctcattgtaagtgataaaacgaaacctgttagaaacttccgtttgaaagaacatgttattgaccctaaggaaagaatgtggtattgaagcattccaatcaacacaataagttattaaacagttgctatgatcacaaaaatgttcgttcttttagaaatcaaggtacaaaggaaaatatctggtttcatgttggagacatggcagcatctgattcatattcatgcggataaatcagttatcacatcttctgattatgtagagcttgtttttatacactcaacaagctgcaaccaaatgtcagttcgaccaaagtgttctgctcacatttcctaattaagtatgtccctgtttcagctaatatataaaagagcactctataaagcaaccaacctcatcctcagtttttgtgattctgaaatttgcttctttcctctaagaagcggctaagttcaatccctaagattgaaccagattatcaaatgagagacacgccaagatgtgttagctgctcgatttacacggtttctctagaatttatgttagccgtacaaaagaaaattaaccagttgtattagcactatcagttgtattatcactgtgtaattaagtacacctctgaaaacctggcgaattttgtttcacatttacctgcccctgcagagaattgtggtgttgagattgcttgaagtaggtcgaggtaagtaattatctgaaacatgaataatagcacgtacagttttgcatcaatttagggttgaattaacattacgatcaagagctggtggcggaagtagggccaccaggggcgtaaccgccactctgtgctgcaaggacggagcgacgtacgcatggcgagatgaggcgaggtggttggcaaagaagacgcggcgttgattgaaccgctccttgccggccgtccaagtggtgaaaggcggacggcggaggtcggcgcgaggaccagcagattcaagtgcaggtttagcatcgacggcagatcaaccggtggccggcaattgagcggggtgcgggagtggaggcaatccagccgggttcactcgacgataatgacttgaagccggcgacggcgcggtggaagagccgttagcgagggaagagaggatgtggcgctgcgggtggggggcgcggtggcacgatggtcggcgaatcgcgggcatgggcgggttggagattggtggcggcgattatggagtcggactcgggaggggaaggggaacctgcggggtaggaagaggttggaggtgggatgaatctcaagcattggatttaatatggacaatttgaaccattgcattgagtgatgaatgaaagatagataaatagatagataggcatagagaaaattcctatatacccttaaaaatttactcaatccctttaatacccctgaatttgacctcatcccttatatacccctgagttttcattttgatcttctctatacccatctccgttagttaaccattagttgaccgttaaatattttaaaatgactatattacccatcctatacatatgtggtacctacccaataaattttcatatgaaaaaattaacttatacaaaatacaagcaatataatcatttgatgcccaacttaaaaaataaaacttattattttttattattttttaaaaaatgattaaatccatacattagtttcaccagaaaattaagagcaaaaactaaatgttatttaggtttaaatttttgggaagatatacgaaattcatcaaatttgatctgaaatttatttaaaaattttaaatttgttttctaatttgtgataaactaattacatcccctttgtttttttacaacgaatctttttttactaaatatttgttgaaaagtaattttcaaattttatgcagaactttttttacaataaatcttttttattttcatgaaataatgttttgtttttaaaaattcataacaaatatttagtaacttattccttattggttttcacaactcaaataatttacacataaaacatttctagcttttaacaatataccaaggacaataaagtaatttcttcaataactaacggtcaaactaatggtcaactaacggaatgggtatttaagggatgcaaataaaaacttaggggtatataagagattaaacaaatttatggggcgtagaagggattgggtgaaattacaggggcatgtaggtaattggcccataggcatatgcttgtggttatagggcttgtttggttctttaccctaccaattcattggtagtgccaaagtctagaaaaattttggcactaccaaaatattggtagggtaaaattatttagctaacatttggattgctaccaatttaaagccaaatttttatagcatagtgaagaaacttctagaatatgaccaaatattttaggggcactaccaaatatttagtctcaatccaaactaacacacaaactattcaatttgccaataaattggtagggtatgtttttggcatcaaaccaaaacggcccatagttttgtcaaggtctaagatatagaataagtttagtaaaaggggtaaagtgtaaaaattcctgccaccccaatccttctcccggccgtacaccatttcgttccgacgcgagtaattcctccccacgggcggcgactagggcggctagggttcgtcgggcgccgccgtgccggagatcgcctctcgccgccgacacccggatctccgccgccgccggtcgccccaggttatcccgctcccgcagtcaccatcccgtcttctccgccagtcgcctcacgcccggcctggacgccccggaatccattgtcggtctcgccccgccgactgccgttgacgccactggctgaaggtaataagccgctcacctctccctctccccctccccctgcgagctcatggatttaatccattcgctcgtgcgtgttctccgtacttgggtgaactaaacctagttcgtgttctccctacttaggtggagtaaaatagttgaacgtttgttctctgtacaacaactgtcacctatcttctcatttaggagcttcgatttatcctagaatgaacggaaccagcggttttggatgagttcagtactgtggtactcttgttctcgtggacgatttagaggagccactcctgttgagaagaattatatttcatagttccccgatggtaatgaatcactagagcccgtattttgctagtatatattgattaacttccacaaatgtgaaggataatcatggtgcatagtttttgtatgtcaagttttctcaatcaggtggcagctgtattgcttgctagtaaaaatgttgtgctgattggttgtttttaaaggcgatacgcagattggttgcttttcttagatgaaattctgattggttgctagacaagcagtttgcccttcaaatgctatggcccacctgcaaacgccctagagtgctttggtgctctaatctaaatgacctaggaaaggattaggatgctgttgcttaagttgtttgggctgcaatggatacaagttagttagggctggaaatgatgatctccattttcagaacatataaggctgggaatgggccttggcctgtcaccaggccttcaaatggagaatagacaaactatgtcgacttattagttgtgttttctcttgctcttcttttgtctgtaagtgttgggtgttctatttgtttttatacggaattaattgcacgcaaaaaaccgagtgctcacttctgcaacgttctaatggttgcgaccttgggtcgttctcccggtggactcgtaccacaaaatccgcaactgccgctgcacattaatcacttcctccttgatttttcaattttaaaattgaggcccccccacccccgcaaacgccaatcagatggatcggaattccttaattattgccgaattattatggaatcctatgggttgtttgtcgtacaaagccctttggaaacttcattttgctcagcggaggacatgtgctggttagttacatatggaattataagcaggaaatcagctgcattttgcattctcgttagtaagattttctttttatataaaaaagaacccatattaggaccgttatctcgttctcaccccacagattgcgtatcttctgcttcttcttcttcttttttttgctaaactgtgaaatcatcgagaaaatcccaaatttttaatatcatttttacagtttaagcttcaaaacctccaataacatgaatataaatgtttatccataagatttttttgttagttcatttgtttttttgtcgccttatcaatgatagttcaaatgattagagcttagcaatccttttttcaatttatactctcattttccacgtgtttcccgaattgctaaacggtgtaattttcttttaaaaatgttccacaggaatgctactttaaaattatattattttttattttagttaataattacttaatcatgcgcaaataagatacatcgttttttttcgggagaaatgggctagcagcaatgttgcaagctactacatccgttttagattataagctattttgactttgatcaaaattaatctactctaagtttaatcaagtttatacataaatatactaatatctacaacactaaattagtttcattaagcttataattgaatatattattatagtatatttgtattgcgttgaatatgtgactacttttctaaatttaatcaaatttgaaacaattttactttaatcaaagtcaaaatgacatataatctaaaatagagtgagtatctctgtagggtgtgtttggataataggaaatagggagtgagattgggattgaaaattgaatgaagagttaggattaaatgaaagagagagaataaatggttaggatttaaatatgtttttagtaggtgggaaatcatttccatatcctattagccaaacactggcctaagctaataccaacattcttcaggagctggatgcaaatttggcagaccaagtccaaaacacgacagccagcagcagcagcaggacaccaacgcgacgccaccacagtataactcgacgcccccactcgctctctcccccaacccaatgacagcatcagtattccagtagcagcggagagagagagggagcggccaaccaaaagcccaagccaagccaacgccgcgtcgcgtctcagccagccagcgaactgcctccccgcccccgcgcttgccggcgaactccccccacctccggcggcccggccccgcctcgctccccggcatcaggcgatcccccccatccccttccccgccccctcccctccccgcgcgcagcattcgcagatcgcatctggctcgctggccgcccgggccctgctctcgcttcgcgtgtgatgtgatgtgatgtgatgtgatctcttccccccatctctcgcggcgggattttctgggggattttgttttttttttttttttgttttttcttctcgggatttatgggggttggatgggatgagatctcgctgccggacttagggatggagtacagctgaaatggcgccgtcggtgtagtgtgtgtgtgtgtgtggacagcgtgcggcggtgtgggggtagttgtgaattagcggtggtcgtggcggcggatttggaggggagatctagcccccgctcggtgcttcctaggtttgttttcctaggtcgtggacggaattgaggaggtactgattcggatgagggtgtcggtagaatacggcgttccggacgacttgctggttgctgcttgttgtttcgggttgttgagttgactgtagctgagttgctgatccagttcgttgtgaattatgcgctaatgcagtggtacttctccatgatgatgattttgcctttttgtttccccttactattacatgattcctcagtacaaatgagcaatcattcgctttgtttgctttggagtatggatattagtggcggtttaattattgtggtacacagtggtggaaggattgcagagttatatatatacctggtggaatttggattaacgagagctcaataacaaccacattgtggttgatttggtcacctatagtttcctatgagcatctgagggctgactaattgctggactttagaaattagaatagctgttgttgcttattgtatttacattgctgttgttatattgttcctatatggatttgtaggctacagctgtaccatattttaattgaaaatgctccaattacttgtcagatatgattcactagctgcatatgaaactttaggagaggtctgagttgtacatggccttatttttctacaatttctctgcacaggtgtgaatatgtcggacagtgcgttgaaagatctgaatctagctcagtcagcagagctggagaaaaccaaggacagttctgccaagtcttgcatcaccaagcctgtcttgaatggcaacaaatgcaacaatacggaagaaaatgctccacctgtactccctgatgctgtgactaatgggtgtgaagctggaaatgcagatgttgagtatattgattctgagagtctgacagatcttgaagatgctggtgcaacccttagtgtatgccaccagatgtttatattcatgatcttttttgtgcttggcatttttctgattggaccagccctaacatttgatcatttcttactgcttgatagactttagttgcaaggttggattcaaaagactgggttatgacatgtgaagctctaaataatgttcgtcagttggcaatatttcacaaggatagattgcaggaacttctgtaagttgcttaccttgttattcaatcaaaaggatctttgtttttgggcaaatgttacttatccatgcctgaagctatagaattacatcattctctgtatcttaatttttggatttgaattatagggaacctctagttcctcttatcatgaaatctgtctgaagaaattcattctgttttttttattggacccagttttattctcttcgattgcttgtatctcaaaacactcaagaatccaaggagcgctgcctgtaaagctgcactcatgacctgttctaatcttaatttttggatttgaattacagagagcctctagttcctcttattgtgaaatctgtcaagaatccaaggagtgctgtctgtaaaaccgcactcatgacctgcgctgatattttcaaggcatacggtgacctaatggttgactcaattgatccactggtgtgtgtttctcagttctcaaacttccattcacaattacactagttctttttcctgtactaactacgctatttctcaaaacatcttttctgccaaatttgttctcagttagtgcagctatttctgaaatcttcacaagataagcgttttgtctgtgaagctgctgaggcagccctcatatcgatgacaagctggatcgccccttctgctctgttaccaaaaatgcaaccttaccttaagaacaggaatccacgaattcgagcaaaagcatcaatgtgcttcagcaagagcgtcccacgcttggtaagtgaaaatctcacctgaaatttattttaagctaaccgcttttgttttgcctcaactgttatctgattatctcctaattaacctaggagaggccaaagacaaactcaacataggatttagctctcttttctcacattacaagtactcaatgaatatcttaattcgtggtcttgttggttggcttagagttaacacgcagttttctcgaccttttttagtctatttagatatgcagatgcgggatgaggtttctgtattataagacagacctgtagcttttccaaaactatgggctagtgtgtttggtagagattctatatgccgagaataattagctgacaaatgatttttacctgtggccttttacttcgaggaacttcatctaccctaaattgcctggccattattagtagtgtgacggtatctggaatttttttttcttaattggcttttatgtagtttgtatatcaatggttccatgctctaaccaatgctgataacatcagttttagatgttttacttaaattgacctattttgtttccagggtgtggagggaattaaagaatatggaatggataagcttgttcagatcgcagcaactcagcttagtgaccagcttcctgaatccagggaggctgctcgcaagctggctttggagctacaagcattctatgagaaatcccaagcttcgagttctggtgaagttgacgacgcacctgctacctcacctgatgctgatgctgatgctggtgctgaatcatgggaagctttctgccaatcaaagctttccccattaagtgcacaggcaatccttcgtgtcacctctacgacgaaagagggtgtggctgtgggtgtcacctctacccctccgaaagaaggcgtcactgttggttgctagcatcaggaggtagtagatgcaatgaggttgtggtttttccatccgattcaccttttgctgtacatggttatggttgttctttctctacatccaatctgggattcgttcgttaagcatcggttcgagagttgaggtgtgacctgtgggtgttaatattggtgcgagatatacctgttatagttgactgtatgatcttccttttctcccactgcttggtattgattggtcaggcgaattgtagaatttcttccactattcaatattactacacagtaatttttccatctcgtggccttgtgtttatttgctggtgttcactatttcgtgtttttgaattctaacttcttccattattcaatattatcgaatcaattctcatcagtgctttcttccactggtttctattttactgaaatttttatgctgttctatgagcaagaaataactaactgggctcaaccaactggtactccaaagaactgtgacttgtgaagtttgatcactgtacagttgtacatatgtcacagactcatagtacacgttaaacatcagagaaccccagattatcacagctgcacgaagattaagatgatcatgtatgcatgcgtcgccggcaacacattctgtgcacagagaaaaacttggacaagaacatgccaacagctagcccatcagccggcgatcaccgccggcgaccggccttgccgcaccggacgctcagccaacgatcatcggcggcggcgtcgccggagcaaccagcatgaggtgcgccgccgggtgcagcctgaacaccaggccgccggcgcacccgaccgtcctctcctcggccatctcacgctcgatcctcgccaggacggcgacgaactcgccggcgtcgcaggggagctcgagcgggccgtccgccacgtacccgtactcctcctcggcctcctccagcagcgccctgaacagcgggtggttcacgcactccgtcctcaccacgaacctctccctcgccgcccctccgccgccgccgccgccgccgacgtacaccgcgaagctcccctccggcggctccggccggccaccattcctgtgcttggacaaacacctgtccagcagggccttcatgatcactccctgcttgttcctcacacctctctccttcatcaacacaacagcaaattaaccaaagcttatctgaacacaactatcctatctaatttacaacttagtgaaggttgggttgtattaattagctgatcaagtgttgctaattgctatggccttgtccttaagtgacatcagatcaaactgagataagatggttagtgatcaaagttttgggagggggtcagctaagacctggcctgaagaaagagtgttgcacttgcacccctgcaccatatatagactgtactgtgtggggccttcattttattttaattatttggtgtgtgtgacaattaggagtaagattgtatatttggtgtagatgatgagatcctgtgggtctttcctaatcctacccatcattagatatttaatccatggttaggttaatttttaccatcttgtcctcatattgcacaagggacctgttcttgacaagggttgtgttggcaagatggcaccatgttttgtgaaaaccagattatattgcaagggtaagttagtaatttcacatcacgttgaagacctttgtgtacttgaccgtggtaccggttcaaagtttaggatggaattgacaaaactgaaaatttgtttagtgtgaagctaaaatggctaatgcgaaaccagaggttggacaggattccaccatctcattgtcaacccacttaatatccaatgtcatcagggcaataatacacatgttagtataagatcataagaaaaatgtcactttattggttgcaagttgacttggagctttgcatcggtcagcaagtttaagtgaaactctccaaccatgactagtttactctaatgaatttccttcttcagaatctgccttttcatttctgtcagcttgcatcgagatctgtctgaaggattcagagaacggcacatcgacatcctaaatctgcccaagggtttaacacctggatcaatgcatgtcttaatcctatgagattagtttagaattcttgtcttgattaatggtgctctaatgacaccttgaccgacaatgagcaccacttgtcttgatttttgtggtgcaaaatgatactaacaaacaatagtaaagtaagggttaatttgggaggtagagtaaaagattgttcgaacaagacattgtttagattagataaaatcataaaatacaattcatttcgtcgtttagcgtgctagtctacttcaccttccatcatccgctcaacggtgaaattttttttatcgcccaaaccagctattattaccgcggaattgcgtattctactctatctttgtcaaatcactccacgataatctgcttgttaattcacctggtaatgctgtcttttattaatttggaaggttggaccccctactgcaaatctgcaatgatgcagatttttcatgcgtgctgaattttgtgctctaatggtggattgtgatagcgatttgcaccattttgtgcgaagaacttacatgaatcagatagatgaaaaacctcgagctgtcagatgatgctggagaggcatatgctattctcctgaaagctcaactgcctgaagtctgaactctgaacatgttgttcagttggcctcgttttctcacctttgctggaacaggggtaaataaatggtgacgaattgataccagaagaaagtgtggtaattaattaattaaaaagcataattaacaagctcaaatcacgatgctcaatataataattactctttttttttgttcttcctcgaactcgaagaacgcacaccgtctccctctcgactgtgactctccccgtgtttgggccacacgaaatcgagatcagaatccgttccggcccaatgagtagcatgggccgcacataagtctaatcctactcctttgcagaagagcgttccaccaccgcgtccgaccgccgacgcgaccggcggcgaccctccctcttcagccgttcgccggacttgcggccagactgatccccttcgccgccgggagcaagatcaggcggtgtccgcggcggggctcgtcgggatctgcccccatccatggtcgcacggcgccgcttctgactgctccgcccccgcgttgatgcgctgcccgcggcatcgagccgcaaggtaattcctcgtcggagccctcctattcgcagcaaattagacaagcagatgttcatctaaagcgttgggggttagaaatttcggaaactgattggtctcgtaaagcgtctccctccccagactccagagagtgatgggatttgggggggggggatgattatgctgtacaagagtagtttgatagcaatgttagtggtagaagtgaataatcttgtatggtctgatgttgtgtttgctgggatgttgcataatggtg

SEQ ID NO: 9091 - DNA, 16190 bp, Oryza sativa
gcctagccgcgtcgtgcgcgttccgtctccttttcctcagcgcgcgctcgccagcgcccaaccagcccgaagccgccacgcgtcccgctgagccgctcccgcgcgcgcttgcaaaatcgcgtgtgggtcccgcgctcctgcacccgcctccgatcgagtcacgcgaaacggaggttgccgcgtacggttttcccgcgcgcgtccttgcgcatgcaagctgcctgcacctcctgagcccatgcgccatgggccgccgtcttgggccattgctgcttggacgatgcaggcctgccgagccgagccattcaccatcttgggccacgtggaacggctggattggcttggcctccctgccaaccaatcacagcgcacatgcacagctagctagcttgacttttccaccgagccatgctagtagcaaccagtacaatgcaagctcctccttgcacaagtacagtacgtgtacatgcatgtatgctacctacagcaagtactgtagcagcaatgcacttgcacagtcccttctgatttcttcgcgaatccgatgcttgcacacttgaccttgtgaagcctgttgcaaagacctcctcacacggtgttcgtccaccgtgtgcaaccttgtgtccaatcttgtcacccggcatccttgatcgctttggacctcaactcctccctgagtctagtcccgatccgccgttgaccaagatcgaccccgatcacctgcacacacatgaaccaaacaaccgttgtcttggcacagatgtcgcaacctgaccaacgttagtccacacacacacttcttgcacatccggtacttgtcaatttcccatcacaaaagaactataaccacacatggtttcacatccggtacttgtcaatttcccatcacaaaagaactataaccacacatggtttcacatgttgcaaaaggaactacataaggtcgttggccggagaaggtttctgctcatgctcgacgatgtatggaatgaagaaaagaagaagtgagaggaagacctaaagccactcctgtcttctgttggtggtggtgatggaagtgctatactagtgacagctcggagccaacaagtagcatctataatgggcaccctagaatcccataacctagcttgtctgagtgacgatgattcatgggaactattctcaaagaaagcattcaataaaggcgtacaacagcaagttgaattggtcaccgctggcaaacttattgtcaagaaatgtaaggggcttcctcttgctttgaagacaatgggtgatatgatgagttcaaagcaacaagtcaaggaatgggaaacaattgcaagaagcaatactggggacaatgacaggggtgaagatgatatactacctgtactaaaattgagctacagacacctaccacctgaaatgaagcaatgctttgccttttgttcagttttcccaaaggaccatgagatggacaaagaagtgttgatccaattgtggatggcaaatggtttcattcaggaagacgaaacaatgggtttggaacaaaagggggaatatgttttccgtaatttggtttggagatccttcctccaagacgtgaaacaggaaaggtttttttttccgtttgcaaaatgcatgatttgatgcatgatttagtaaaagatgtggcagatgatagtgtaatttcagaacagttaatcccacaggaagcatataccggacgttgcatatcagcaatgagtcaaacagtgggattgctcaaaacatcatcttgtctccgcactttgataactctgtggttaccagtacatattaataacttaagacagatgtcattaagagatattggtactgacttaagactgatgtcattaagagctttgggtactgtccgtatgcatgattgctcttttcatagccaggtcatcaatccaaagcatctacgatatcttgacctttctgggtctgacatggatgtgctgccaagttcaatatgcacgatgtataacttacaaacactaaggctgaaccgttgcaaaaaactgagatatttactggaaggtatgagaacaatgagcaagctcatccatctttatctttttagctgtccattgaagcggatgccaccaaatattagcctactgaaaaatcttcgcactctaacaacatttattttggacactgaaaaatcttcgcactctaacaacatttattttggacactgaacctggccatggaattgaggagctcaaagacttgaatcaccttgccaataggttggaattgtacaatttgagaaaaataaatagcaggaaaaatggaaaagatgccaatctccatctgaagcaagatctaagtgaactagtactttcttggggtagtagtaaattttgcatgcctttatgctaaacataaagggaaatgctgaacatagccatcattaaatcggacgtgatggctgcgttgctgaaattttgctcagccaactctcagaatttggaaatgctgaacatagcgattattacgttgctgccaaagaaggaggcctctacccttttgaaggattatagacctattagcctcattcacggctttgccaaattggcaacgaaggtcatcgctctgaggctcactccgagaatgggtgagctggtctctcgcactcagacatcgttcatcaaaggccaatctatccatgagaacttcattttcgttcaagggctgacaagataatttcatcgacagaggaaagcaatggttctccttaaacttgacatctcgaaggcctttgattcagtttcatggagcttccttttggatatgttaaaacacagaggttttgggaggagatggagaggttgggtgtcggctcttctcctaactgcagaaacaaggattgacatcaatggcactttaagtgaccccttcaagcctatgagggggctaagacaaggggatccgttatctcctcttctttttgtcctggtgatggatactcttcatgctatgttgcagaaagcaatgtcagccgggttgcttgacaaagttaaccagtggagcagagcaccaaataattctctctatgccgacgacgccgtcatcttctttaaaccggttcgtcatcttctttaaaccaaattttgcatgcctgaaaacaagggatgcaacgaggaagaagtgttggagtcgcttaaacctcatgctaagctcaaaattttggaactacacggatatagtggcctaaagatcccacaatggatggaagacccacaaatgttgcagtgcctaacaactctccacttttccaactgttcaggatgtaaggatctatcgactgtgtggtttttggtctcgattgagtgtatgtctttatctaaaatggagaatctaaccacattgtttatgaatgtcgttggtgtgaaagccgaaggatactacatccctctacaaattttcccaaggttaaaggatatgacactaagccagttatcgaacttggagaaatggacagaaagtactgctggagaggccaatactagcttagttacgtttccgaagctcgcaacgctatgtatctctgattgtccaaaacttgcaagtgttccagattgctcagttctaaaagaattgaaaacatatggatattgcagtcttgcaatgagcttacttgcacatctaaccactttgtctgaactcatttaccgggaaaatgagtctatgagaatgtcgttgggctcatggccatctctcacgaaactacatattagttcgtcatataaccaaatggccactctggaggtcgacacaaaccaaggcccactagaaaaccttaggattttgaggctatatggcctcaacttcttcacagctgcatccggtttatccaaaatgcatcttgggctatggaaatgctttgcctttgtggaggatttgtgtattggtgcatgcaacgaccttgtgcattggccaatggaggagctcatgagcttgattcaccttcgatccctgtctattgaacactgtgataaccttgaaggaaagggttcatcatcggaggaaatcatgccactctactatctagagaagtttcacatcaaagactgcaaaagtctattggatattccgacgatgcctgcatcccttgaggagctgtgtctgctactttgccccagattagtggcactgccttcgaaccttggaaatttggccaggctaaagactatgagttttgagcactgtcatgacctgaaagagttgcctgatgggatggatggccttatttcccttgaagaattgaagattatgggggtgcccagagatagagagatttccacagggtctcctccatcagattccgacccttcgatacctaatggtagcaggctgccctagcttggaaagacggtgcagagaaggtggcgagtattttgatctgatctcctccattccacgtatagttgttccagtagcaaaacagaagtgacggaatcaacatcaagcctgaagaagcttgtaaaggggctcctcccctcctgctcactctcaaagtgaggtgtgtatgctttgctcttccattatttcactctgccattattcacaagctaattaattaattacataagctaagcgccgggagtttgctttggaattgccggaaaaattggatcctttagagtagtaatattttttcaggaatacgcaaggagcgcatcttttccattaagagaaataaaagttatttacatttgaaagaaaaaacagcatgggactgatacaggacattgacagttaatcctaggtctatctatcgcactgagtttggcaaccaaactccagccgagtttagttccaaaatttttcttcaaacttccaatttttctattacatcaaaactttcttacacacacaaactttcaacttttctgtcacatcgttccaatttcaatcaaactttcaattttagcgtgaactaaacacaccctccctcctgaattgcagcgcaggaatcgctgggtttgctttatgccaaagagaagcctcgtcagccatccctttggccacatctacccaagatctgcactgctgattgagagtagtagtattctttagagtagtagtattcacgtaaactttgtgacttaggcgcagtctccatgcctctggtgatctttgtattctttttctgcagcgaacatatagcttgttcttgaagatgaacagcatcaggaggatttctgggatgagcaaaagtctaaggtcccctctgcaatttataaagagaaatatgagagcatagttttcttcagggagctgtaaaagcgtgacaaagataatatcgattaacctcctggaacacaagtactctgttgagtttgatgctatccaaggtgagatctttgcctcttgcatttctatttttcctacacatgttgtcagaaatgttatggacatattcacaatctcttaatatgtctaggcgtgattcaaagatggataaactcactgcagtttttgtattcctctcaatctgaatctgtgatgggtggccacaccagcaaagccccatcagggaaggaggatttcctcataacagtggatgagaagcatgattatgacaggtaggttataattcacttgttctagatcatatacctgtgttgttggaactatttttgagaagcacagctcgtttcaggctgaagacgcctccagttacaccactgtttctttccatagagacggaaaccaaccaactcctctcaaatgattttccagaagaagcaacctatccctcaaccagttaaaccttcagcttccagggtatactatctgctctgtattatcctacatctaaaaaaaaaatcccagatgcagcttttctcctcaactgaaaaccacatttctagaacctgtttctttttttttttttttttgccgggtcggcgaaggagccgaccaaatttcattaagattgaaaggggaaagttatagattttacacaacattaaactgtcgagccggggactaacacccctggagagcagaaaccgggggggaggggggggtgggtggcgcgggctactcctcacaacactgaaaaacacccgcagctctccaaactgcaacttcctctttaatatctgccacaaggtgcttagccgtcttgcttctttggtcgaaaactctgatattgcgttccttccaaattagccagctcaccaacatgaaaaaggtgtcaaaagcagtcatgtagcgcgtctgaaatagaacttgtttcttcatcgaagagcttatcttgatcttgactttatccatgagagctttctgggaggacaaaggcaacaaaaaaaaatcggttacccacacctgactcatcatcaaagaacttgttcagacgggctgcaccatccatctccactgagaataaccaaccttgcacaattgaaaagagatcaacttacgcaggcataatgagcaggcaaacctgttgctgcaactgcacctacagtttctacagcaagtaggaatgcaaacaagaaacactctgacagatgctacgtacgcaagccaaggcagtaccacaagtggactcaagaatgtgacgaaacctgaactcccttacaatgcaccgaagaatctgaccacaacaagatctatatttacatgccgtgcgccagcattggatgtaggtgagaaaatagaaaatggcaggataagaagaaaatcatgcccacctgttgcaacaatagggaccaaggagcagagattagatggcaagaagaaaggcctaccagctaaagtgaaggctgtgagcagtagcaatgagtctacttctaataatggtggccgttctggtgaggccacaacaatgaacggaacgagaaaaacagatgggaagaaagagcacatgtcaaagcatggaaaatcggctgaagaagtgaacatgtcattttatacaagtttgtttttacagtttctagtgttctctgcttcgtactcttctttttctaatgattcaaaggacgaaactgttttgcatgatccgaaaaacatacatgttgtaaccaattaactatccggtgcagatgtgacttcaaatgaggaacttatgtgttttatgggttcgaagtagaaggcttttacctgtgctattaggtatctaggcaaaatgaacagacctctttttcatctacatattctagtaggtaagatttgttcacattgctagcaccattgctgtatcagtatacatgcatgtaccagtaatacttctatttgaagaatcttgccacaaaacgaaccaacacatggagtatctagctgtaatatgaatggtaatcggtttggagcctgatgcaaggatcagatttgcaagagaaaacagcacagcaggctatcaccagcatggccaccaccagggttcacaattccgataccaccttccatgccaaacgctggcagcacgttggttttcacgaaatccgattgaaaaccaacaaattcatatcggtcggtctttgtgtcaaaaatcgattggctttaccaaaatttcgaatggaaacgttgaaattcttatcgacagttggaagtgaaaacatcaatctgtttgtatcgaaaaccgattgattttgtcaagaaaccaatgtgaaatttcaaaaaaaaattgtttactaaaaatgtggaaaatagtgaaaaaaaaaagctagaaaattgggaaaatttctaaaagttttggcatgccatttctataaatttgacccattgcttgtttctgatcacaaataatgaaaacaaatgtttaatcttctatgtaaagataaataaatatatgcataggattgtaggaatgctaaccttactaagctagtctaacaagttttttttctggagtattctgttattaaatgaaatgacaacaaaacaagctaacatgtatttccaaacgaaaatgttataaagggaaatgcatgcacctagatataacatagcaaaggacgatggcaccgaaaacctagaatgaactaagtaaagtgcgggaacagacaaaggtattggacctgtagacttttttttttttttttgctagtagtagctcaaactaggtggaaggtttggatatatttctaaattcctcagcatgaactttaattttgaagccattgcctctttataatggtaaacagcattcccttgacagttgattggtcaccctctcatgatatgttattagcgggatgtcacgatggaacggtaccttttccttacccaacaaaattattttcttatcttaaatcatgtgacctttgagtctttcaagttgctgttctgaaagttctgtgattgacttttttatattccaggttgctttagggtgtgtttagttcacgttaaaattgaaagtttgattgaaattgaaacgatgtgacgtaaaagttgaaagtttgtgtgtgtatgaaagttttgatgtgatggaaaagttggaagtttgaagaactgctttaccgacaacatgtctgactgtagaactgctttactggtttaaaagcagccagttactggagttcccaaatcttcgcttttcttattctgttctgttttcaaacaaaactaaatcatgtgttctgttgataaacaggttcaaaaccttttatgtgtgtaactgctgaatctgctcccatcagaaccgtgtcgtgggcaccatctgtgaggtagccagttgtactgttactctggtctattccaaaagataatttttgagttttgactcttgtcattctatcagtaaggaaaacgtgaatacctttgtcactggtggagaggatggtctgaaattcggggatttaaggtaggtgttggccttgttgtgaactgaagcaatgtttaaaacatctttcgaactactctcttatcctgcatgaatttctaatattatgtatgggtcctcagaggtctgaacattgagggtagtctctcccccttcctctctgaattcgtggcacctcccaatttctgaaccattcatatttgtttctgtttgtttcctaatggtaaaaattccgagttaacaaacaaaagataggcacgatatgcagaatatgttattatcacatggaccaatgatgtcagtaggagtttctttatgaatccagtgcgatatacggtttttttctttagcttttcaatgggcactaagaaacttgttctagaagctgcagtatgtttggctatgaatatactgattgttatggttaaatcactacctgtcacagcccccttggatttgctattgttttctaccgtttttgttttgtaatatttgggaattttagtgcatctcataagatatctttgctgcagagatccatatcgtcatctttgggagttaactactgctcgaagggccgtaataagtcttcaatggttgaaggatgcaaggtaatatttgttaagcactaaatgtacttgtttttcttcactaacacggtgtttacgttgttttccttgtctttgaaacactgcactaattttaaatggagatgtatgttttcattaatgttggaacacatactagaaaccatatttgctagaatgttgacaattattttagtcatgtaatttatgttcatagggcctgtacttctccgttagtgtgtgctaaggtggatattgtctttgtttatataattagttccattaaagcatcagcgtatttttttaagtaattctatttgcactttttttttgcaaacgctctatttgcacttgtttacataattattaatataaatgtttgtatttgcccacgtaccttctaaatgagatgcaagcttccttcactggacatggtcttgatgtattactggatcaaagtagacgtgattaaatagaccacattgtttcattcatggtgatattgtgtgtatatatgccagacataccctttttactagaatggtaatgttaactgttatattttttatctttgtgttcagaggtattgtcatatcattggaagatggcgcattaaagttcgttagcttgttaagaatcgcaaatgatgttcctgttactggaaggccatttgttggaacgaaaactcagggtgtttctacctatcaattgcctgaatatttgatctggagtgtccatgcctcagaaattacaggtgcatttcacctcatgtccaaccatagtagatgtcaagtatcggaatattggttatagccttatatcaatatttagttccacacatttgagcagagtaaaaatgtcaaatatatattcatgatagttcatgaatttgtaattttgttttgctgatatccaggctatgcggcttattgtgtggctgatggaactgctgtttgctttgaggtaaactaaacagcacataaactattgatttatgcatgctattgtgattctctataacattgctaaataaatattcaacttactgtagcttactccgagattctaggaaaaggaacctgggagaaaccgtgtaccatattttctttgtggttcattatcagagggaacaaccattaaaattggtatcgcattaccaaactctcctttgtcaaatgttcctctggagaccaaacgggctactaaaacttgcaaagatgtagctcaattgcatgttatagaagaagggaaacttcttaccaactcaggtaatcgctgtcacctgcaacttgtatcattttgcttgtacctgacatgcctgcttaaccaccatacagaatgcaattgtgctataaatccgagcatcagagatggtcaacaagatgaacctgatgaaggacaagaaactggtgccatagttttagctgctccttcaatgcaagagaactttggcacaagcaccagcaggggtagcgaatcccctgaaaattttgaggtatttcctcctaaagctgtagcaatgcatcggttgagatggaccatgaataaaggtagcgagaaatggttgtgctatggaggtgctgcaggcattatccggtgtcagaggatctaaggaacaagagcacacttgaggaatctccttgtatatcaggaaaatctgcatgtgtccatctacacaataaactgttgcatgctgtggtatgtttcatccgtttctttcctctactgttattttgatcaccatgtccattttgggttatatgtattaacttcttgcactgtgcttgcaatataacagattatggccctgtttggttcatgggctaatatttagccctcaccttttagcctcaaattagccctcagagatccaaacaggtgagctaattttgagctaatatgaattagcccccctcaaaacattagcccctctaaggggtactaatggggctaatttcgtgtggggaccatcaaaaagcagctctctctctctctccttctctctctcctctctttctactctctctccaccttttagccttgaattagcccatggatctaaacataccaccctaggctaatgtttagcctaccaattcatgactaaacattagctctcaaaattagccctgggctaatctttcaaagagggcctatctttggaactcccgacggagctgtatagccttatggactgaagctttacctgagctgcgaggttctctgtgttttgggaccagcaattcattgcatgttggttcgaaaatagaaaatattgtcactccatgcgattcttcctccacattactctgaaataagtgcaatatgtgcctttggcgatccagattcgcaaaatctgttgtaattgtaattgtaattgatagctattcttattcatttcctgtaacatatgtaagatcgcacagattattgatgcagctaaaaaactgcacgatattaggtgggatttcatgcatcgctgtttaagttttggaagtcatacagccttgttgcttcataatatgtactactctttttaaggattgttgagttgttaggctgtcgaagcttttttaaacaaatcaacagcaatgtgttgaggcatttcttcgctgctgtgctcaagttctcgtagggagcacgaccctacgacataggagcatttctgtccttgctccttaccagataaagagaagatctgatgtatctttgttaacacgatatcataacagttgggtaaacacgatataggagcattttcattattggagagagaatttggcatatttacatttcacttagctgtctttatcaaagtgatatttcgggtgaaactgcaggatgaagtactgtacaatagtaataaacgtggcttcccttaaaaaaagaaaaaaaaacatggcctgttaacatccctaatgtcaatgttcttagtgtacaatacaactatacatgcataattctcagtcgctccagttatcctcatcgactacaaaatccatttgcctcttgccatcatcttcctgcagaggtttagcagtgctaacaatcaaatgcctaaaaaagcttatgcaataatatcccaatatgcccgactactcctgagaaatttgaatttgataggatgtaggaaaattctacagaaagatatatgataacaagaaatagaaaatataccatttcagtaaatgctggagttgatggagaccacacaagaatttgcctgtcattgctgccagtataaagctcctgaattccaaaagactcagcaatggtattgatgcgggaacattcagggttaacagaggataggagtagagggaagacttacttgttcttgtgcactatagtagcagcaattaacaggttcatagtgcccacggaatgtttgaaatgtcataccagaccataaattgtacgcctacatgaatttggcaacacaaggtgaagtataaaattcagcgtccaaactgagaagctaaaaaatgaccacaccttaatgcttgccatgcatgggatgaatacaagtgatggatcctcagtgacagctaattgtagtggtttgctagtctgtaatcgcatagcttcaaaattgaccaaagtattacagcctgaatcaatatcccaaagtcttaagcgagaatcagaacctgaagagagaggataacaatcattaatgcatactgcatacaggcataacaagaagatagccataggcaataattcctttcaagcaatagcaatcgaatgctcatagaaatagcaattaaattcaatcaacctgagctaagaaggtacatcccatctgtagttgttcttaatcccgtaacagcaccataatgcgccgttgcacgattttgactagaagacaaaccagggtgcaatctctgttggatatgtccatgtccagggatttgacttttgtgcaatttgtgtgactgtttcttactcttgcctgtcctctgctgtgcagagtaaatctttgaagaagatgaaggttgtaaagagttcaaaggatcctagtcaaaattaaaaatgaatacattgatcatttgcacaactagatcaatgagtttgcgcgtcatttctagggcacaacaatcaacaagaaacaatgtatgcagaccttatattgtaagaattggagcactaaactgatccatagcacctatatactgacactaatatgtgagacaaacctataaattaatagccgcagaaatcagcttttacttgaaggctgacagtattgatctgtagcattacaaccataatgttttacttaaagctgcaacatttttgaagcttttgcagaaaataaaagtggaagtccagctttagcgttgcaaccaaatattttgaaaacaaatgtaagtgatggataatggtgaccataccttatctgaggtgccctcaagaaaaggaggccgccttcctagttgagaccgtgattgatcaagaacaagaaagcatccagctcgtcttatgtcccaaaatcgtattgctccatcacaaccaccgctcatcaaaatccactcacttgaagtagaccactccaaagacatgataccatctgacatgtcagataccaaggataaggtggtaaccatacaaacaaagcaagcatattttcatcactacactagaagtaagcaactaaccacgatgaccagacaacgtgtgggtaaaggctccagaagcaatatcacataaacggacctgaacatctgcacttccagtagcgatcagcatatgtgttgttgcaattggggacattgctgcactgtacacttttccaggcatcttaaaatccattacgacctagaaaagaaaaccaggcaaaaaatcagaacatcaggatcacaccattgccaccacaaaggaggcaagacaaaagaaaaattagcaatcgacaaagcagatgaaagcatacttgagtcgaattagtatcccacactttgacatactgatcaaaagaagctgtcacaaacagcccagtgtccacaggataccatacggccatagataccgcgaacttgtggccattttcatgctgcttgtccacaaggagaatgctcctatgcttggcaatgaacccagcttcgtattcgatcgcattctgcacatcaaatatagcggctgatccatccgatgcgcccgagagcaggtaccgccgctctatcaaatcaacctgaccatattgtcaaattacaaaacaccagcgggagcgactcaggaattgcacaccaaatacgcaagattccatctacagggtgtacaaatcaaattgatctaaaccactaaggtgagagaaggagaaggggagtgagggagtgagaagggggtgtacctggagagagttgacggcgccgttgtgcggggtggtgaactccttgcggttggagagtgcgagtgaggcggtgcggcgcgcccgggcggcggtctcgaagcgccgtgccccaagctccccgcgttccctccgcctcaccgcctcacaccacatccactcggccgcgcacgacagttgtgtccctcttctcagcggtgacagcgggcgatagaaacggtgcggtgtgccagtgagggatgagcggcgcggccgagcgggagctatgctgaccggagatggagaaggattcggcggctgcactgggaagcttctattaaattaggcagtttcaatccgtgttgatttatgatggctcggatcctcccgtgtcccgtgttcgactcacatatggcctcatggggcacctgatggatgtttgtctctggctaatcatgaatgatgagttgtggtgtgaacattgataaatttacatatactataaaaatactcgtgttgcaatgggtgaatactattttaacattattattgttatacggtttagataggataaaattcactataggaattcgcttggattttttttttaagaaaatcacaagctacaattacaagtccaacttttatctcaagttagcatgtgagtgttctttaaaaaaaagatttcttatacgactccttttgtattttcaaaagaaaacgagcttaaaatctaactcaaacacatatctgtatttctaaaagcgtacgaacttaaaaaacaactcaaacacggatgacgtaccaaaataccgataaaaacatcttcaatttttataatagcagagatagagaagtgtttcgttataatatcattgtttaaatgggcttgatagaatatcataagttaaacgaagagtgttcgctacgatatcgctcgttcgttttattatcgaaataaaactaactaaatttatactaccaccatctttgtatatatgacgctggatctatatgatttttttaagcaacttttgtatagaaactttttgtaaaaaacgcaccgtttagcagtttgaaaagcatgcgcacgaaaaacgagagtgggcagttgggaacgaggggaaacgaactaagcctaaagctgttactgaaactgccaatcctgaatacaaagtaacagctaacaagtagtcttcacaaataaaggtggggctcactgacttagtgacttctagataaaggggatcatgtttcgctactcctctgtgccttaaaccataacatcaaatggtaagctagaaagtcacaatgtgcataaatgatcatcgattagagtcatcaaacaacaaatgagtacagattaaggaaatatatctaccagaacaaaagtgacttaaacttagtgaattagtaataaaacaagtaaaagtgcaactgcattttgttcatgacctgaaaaaaa

SEQ ID NO: 9092 - DNA, 18118 bp, Oryza sativa
aatataaaaagagtaaggtgtggtttgtaatgcgtacttaaaattatatgaatatagatctgcgttgcctacttgtatcatcttgagtttagatgcctttgatatttgactgcagagtgttgaagaagcagaatgccgtagagcatacgattctgctgcagaggtctatctttcagcttttgatcgcactaaacaagctgaagaagtaagttaaaaggtttattcagtatatagcacatgctacaaattccattatgccttaactctgcatttaggatgctttaagggatgcacatgaagctgctttaaggaaggcacttgaagcatatggtaccgttgctgttggaactggcacttcccgtatgcattatgagaaagttcttagcaacttctgcagaaaaacatttcaggtatctgcagttttactctaattattacatcgaatctggtattgccgttaaacataatctgatgttgtggaatcatacatatcgaacaagaagttaatgacacccttagtcattcacataaataacaagagcaccgttaggtgtaaataaaaacatttcttaacaatatccgctggtttatttgatcatggactatgatgttgagaaagtaagtttttttgtcttttatatgtttgtttgccttaaatgttaatattaacatagttaatagtaatcaagtggtaaaccttgttaagaaagcttcaacttgttttcattttgttaagctcaatcaactattcatcctattcctatctaatgcttaattcctctaattgatatcatgtactagcctttgatttatatgctggtatattcaacttttcgtacccaagaagtgagttgagaacattcctttagcgtgacagaatttcaattgagttagtgcacaatttgatattgattattttttaggcaatgtgcataagacttgtgcatcattgttttaagattgaacggagcaaagttgtcacacaaccattcacccaaggcaaacagaacgacccaaaatagaaaagaattagcagctactccctccatccacaaaagttacacctattacttttgtcaccaagaccaaggaaaaattaaatcatcttggatgctacaaaatggaggagtgaatgcaagcatgcaaccaatgagtatttagatgactccttggattctaatcaaacatttaatttatctcttcatttaaatcttgaatgcataaagactacaaataggaacaacttatttggaaaaacccaaatgtgaaataggtgtaacttttgtggatggagggagtatcttgcaagagctttctgcgatccactacatgattgttacatttgttattgatataagatccaacatgtagaagtctcaagccctctaaagattattttgtatagtgtatatatctctatcttgaattcttgattaaacattgtgttgttgataaaatatcaaataatagggtatgttataatggatgcatcatgctgcccccacccccaccccccaccccccaaaaaaaaaggaaagattaccttcattttataccaaatagctaaggatatgatatatgcctgtaaaattaattgagattcttctgtgtgtcattcttcgtatgttcccaaatattgcattgtggcttactgatgcctttggttcttattcctgtggctcatttggtttcatggacttacatttgtttaggaatacaaaaggaatgcctttttagaagccgataagcagtgctcaaacatgatacaaattatggagaggaaactccgagcagcgtgttctgctcctggagtcaaagtttctaatgtgattcaggtatgtaccgacatctatgctcctttaaaagactccaatggtgatggtgaatgacatctgccatcacccagcacaactgccatgtgatacccctaaatagtgagtaggtggactcctctatagacagatgtacaaacacatttaaaagcagctatgtagattgacatgcatgtaaaaattatgtgaaataattagtattgagtacaatgggaatatttttattatgacttttggggctttagagcatacagtgggggttctcttgtttaaattccaatgcaaaagcacaggcatttagctaatgacatggatgtttgcttgtggccatacttacttttaagtatgactgtcaatgatccaattaagctaatttgctactattattttattctcgatactccttatgttatttttcacctggtgtttttatggcattaacagtgtccaatacacaccgttgaccattgctttaataattttatgttcataaaaaacagtaaatacactgatgtcagtaaaaacagtagctttgatggaagcttttgtttcctaccgtgacattctttcatggaagctgctctggtgttatttcactctgtatatgcactcaagcagagaccacgttacattttgcaggtcctggaaagtttgctcactgaatatgaaacttcttgttctggcccaagcaaatggagaatgcttgcagcctttttaagacagtggtttgttcctgcccctacctaattgttttaatgcttgcacttacagatattttgaatttgcttttgtctggagatgaactggatgagaatctacaatacgccacctatcttttggtcaagtgagactatacaaaatattatttttctatatttagccaccttagtttctgctgacttgatcaagttgtttgtagaaatttgcctgctgtctcaactgtcccaacaactgataactttcatggtagttatgttatgttgttgaatttgaaatctcgaatggcaattgcatgttagatcatgtgttgagtggtgcaatattagatgctccatacccaaactgtagaatataattgtgttccagtcaattaattgtggtaatactaccgtccatctagtgcaatacagctgtagtaatttgttcaggaatccatgacatcaattattttcattccttctctttttgtaaatctattgtcaagttaaagttaaatgggtaattctggattttcattgtgtgttatcaagcctgttaattaaccatcatttgaatatggatcctttggtcaactggtcaactagttgcttagcaagcatatctaaaagttactacatctttttcttgcagtttggaaggacccatattggatctctgccttaagttagtaaatgaagctgaatcagagaggacttccttcgcattgaaatatcgttcaaatgaagatcagcttgagcttctaaaaaggcaacttgaagcaaatgaggcccataaatcggaatatctaaaacgatatgaagctgctataagtgaaaaacaacgagtttctgaagatcacagtgctcatcttgcaaacctgaggaccaagtgtagcacactagatgagcgctgcttgagcttgtctaaagaacttgatcttgtacgccatgaatgcactgattggagagtgaagtatgagcaatatgttactcagcaaaaggctgagcaagatggattcatttctcaactagcaactcttgagtccagatatagctctgcagagggaaagttgggagcagcccgtgaacaggcagcggctgctcaggatgaggccacagagtggagggataaatatgaaacagctgctgcacaagctaaagctgcattggagagattagcatctgtgcaagagcaaattaacaaaattgcccatgaaagagagagtggtataagggctgagtttgcttcacatctggaggaaaaggtaggccgtacccacaacatgtttcatatgcttgagtaagacggtatatatgctgatagcatcttaatattgacaggaagaagaaatgaagagattagttgcaaagatcagacatgcagagagtgaagaaagtgtgttggctgagcgcttgcaggtcacttaaccttcatcactacctttcaaccacttcatttagttgatgcatttattgtatgagtgctagttttctaatgctgacatgttttttcaggtagcggaatcaaaggcacaaagccataacaaggaaactgcagccttgaaggatgaaataagagaactaacaggaaaattagaatttctaagagacagggcggtatcatttgaaaagcaagcaagaatgcttgaacaggaaaagaaccatcttcaagagaagttcttatctgaatgcaagaaatatgatgaagcagaagaaagatacaaagctgcagaaagggaagcaaaaagagctaccgagttgtctgatgtagctcgaaccgaggccgttacagcccaaaaagagaaggacgaggcacagcgcttgtcaatggaaaaattagcagtgattgaaagaatccaaagacaagttgacagactggagcaggagaaagtaaatctactggatgaagtgcagaagatgcataaatcggaaacagatgccttgtccaaggttgccttgcttgagagtagggttgccgagagggagaaagaaatcgaggaattaatgatacagagcaatgaacagaggtccagtaccgtgcacgtccttgagtctcttttgtcaacagagcgtgcagctagagctgaagcgaacaagcgtgcagaagccttgtctttacagctacagtctacccaaagcaaacttgatgtactccaccaggagctgacatcagttcgccttgttgagactgcactggacagcaagctccgtaccaccactcatggcaagaggttgagagaaaatgaagtaggcatggagtcggtccaagatatggatattgatcgtccggagaggagcagaaagagatctaaaagcaatactagccctctaaagcatttccaatctgaagatggcggttctgttcatatgggtgaagacagtgtcacagtcagcacagacactaaagatggcaatccagatgggtataaaaagctcacgattgcaaagctgaaagaggagcttaccaagcatggatttggagcgcagttgctagagttaaagaatcctaacaagaaggatatacttgcgctctataagaagcttgtgttgggcaagtaaattacccccggtatctgcagaaatgcttgaccttatgcttgctgagctgtgtgaagtatgtggtggaagcgtttcagtttgcaatgtgcatttactgtttattagtacatagagtagcatgctaccaagtaggttatatttaacaagagagatgcctgattgtttagggcatttggtggtcctgctgattcgattgtatcttggtgtaaattgatcgatggttggtttgcgattaggattgcgtttgctagtttgtaattgtgtgaagattgctaggcttgtacatctgtgctaatttgacaaatgtagtgtttggctggctatcaactatcgcctgatcactgcccgatttgccgtatgtgttattaccactgctgtttagtgccggcgtaaatgttggccccgtatgcagggtaaatatatctagtgcatacagatgtgataagatgccaggcgcaaactgtggactggtatttgcggtaaccgggtaagcagggcgcggtgaaaatgacaggctcttcgtgcagacgttcaggcagcaacaccgcaacaaccgaaaatgtgcatgtacagccgtacaggtgtagactgatgacagaaagcctttggtttcatataataggggaaatacatacatatcgtatgtatttcaaacaatattctagctcctccaccaactgttccgtcgtcaacatgccttgagattagcccattgtcaacatggtttaagattggcccagctaggacgagaaatactcaaaatataaccaggggtaccctctgcagtccagtacaaaaaagaaaaaaaaacagagtttggaactgcggcttcattttgatagcctctgctcagtaggagatggcacacataagcacggcatgttgacacagaattatctattttgatgaattattctgccaaaattgacaattttaagttacaaaggtggaataaccagaacccacaaaaaatgagtctttggatggtattcacatttcccagcttaacatctgattggtctccccagtgcacccaaaaaaccagacaacctaacggtatattgtgttcctcaagaagctagtagcctcttaatttctgatttctgctcagacgtcagccttgaggggaatttgatgttgaacttgatcctaagatttcccttctttgatggatccttcggaattggcatgccctctcggagaacaacctcctcgtagccagggtagacgacattattgattggtactgttaggttccgaccatctagtgctgttacctgaactgtacatcctgtcaaggcctcagccaaggaaatcttctgtgtcatgacgagatcattcccctctcgtgtaaacagatcatgtggtttctcatcaatcacgaatacaatatccgcaggaatcacatgcggagactcgttacccttttcaggaaaagtaatttttgtccctttcttccatccaggttttatgtcgattgttaggatctcctcaacaaccatggttctcctgccaatgcagaaatacgctagtaaggcaccaaatggaagtctattgcaaagtatataaaaatggcatatcaaatattgaagacaacacaagataaacacagaatgaaacagactggataagagcatgtcccatatgacaaaaaaatggaaattagtggaaggcaacagtaacactcaaaataatccgaagcatagtactaaatagcggccactattgcagtagcaggctttcatagtaatttcaagcccagtcaatttcaataattacaggtcctagacaggttaaacatgcagaaatacaaagttgatggtgctagcttgcacatgcatgagttttctgctgttcctgtgcaactaagatataattgtttatcatgaatgtagctatgcatacataccagatcatcttccagttctacttatgattgatgtccttgtatgcagtgtacttctaatacatgtcttattatgataaatgccatcgtatgttcatggttaagttaaacttatgatttatgagtattttttatagtccgctttaggaatgtaacgccgacaatatcccccacaatccgctacaactctgctatctactttttgttatcttgatcctaacggaataatatgactcatactcaaccaagagaaacagaaccacaacacaaaattatgtttggccagtttgcgaaatattaattgagtagaaaccaaagcaaaatatatctttgatgtggtgacaataagaaactgctgatatttgtaaatctaataataagaatttctataaaagttgcagaaacaataacaagcctcgctaaattgataagccaacctcatgtcatgagtatccactgtattaaataaagtgttccacttgagtggtgaaacaattatatataaaaaccaagtgtttcctatgtacgaaaaaatcagaatgagtgaaatgggatgatgacatttgggccaattaggcaatgcctgaactttaaatggcttccaaaccagttgttgcgcttaaatgcaaccagaacaattacgcaacaaatctttgtccaataggtttttaacttccaaaaacaagtccatttggtcaaaatggaagacattaatgtgtcaagatgcatatccaaaatccaaaaaccaccttacggatatggccacatagtgctgtccataacagcgtaatcctaaacaatgagggcacggtttcacgttaatgcagtttttcttttatttgtagtatagctcatcaacaactgaaactgaaaacaacattttggtatattaacacaatgagtactcaaaagtgaaaaatctgtagcaatactgcattaatataatggtagatgaaaaatcaattgtgtccaataatatgggagattataaacatatcttatatttttgaaaatgatattggtttaacattgacatgtacacatttgactctgtttctcagcatatttttaatttacacaatattgaaagaaatataaaagatgatgttgtcaaaagtatgatataagaacacctatgcataaatgtgtccattcagcaacaatttcaacatcatagacaagatccatcaacatgctgatgaccaaatgtacatagaaggctagcggagcactaacatgggatgacttgttataggctatttcaaaaacaatagacgtgtgaaaccacccacctgaatgagcacaaaactactatttcaatatcaagactaaagcattgcgatatcaaaggaaatatgtcaagtttatagtcctagaaggaaatataacctgttgaacagaagtcctaacgaactctatactatcaccattagtcactacattctcattcatccctaggcaaccaatttgacaagggagtaaaaggatgttgatatctccttaatctgattcttaaaaaaaacagcgctttcaaggtaatgatgatatacattagacctagattgtgacatctattcaattgataacaggcaaccataatcatgtgcaatttgccatattatcaactagtgtgcagaactttacttttgtacacgccatggtaattcacataattcatagaccccacttgaaatgctaaaatgcttcgtacttttttatacatactaaacgtatgccacatacatattcagaaaccaatccagtactgaacaaggaataactttaaaatgacatgataatagagctaattacccgctagaatctaatatttcccgtgaaattttcatcttcttggtggtgcctttgtacaagtcagctagattgcaaggcagtcggttctcaattggtgcagccttctggggccgttggggagcatgcattgatgcctcaccagggaactgagagaaggacccaaatatatcattgtcatacatcccaaactttgatccccgcatgcccctgtcaacacctccacccataccacccatgccacccatgcttgagaatgggctggaaaatccgaagaactcagcaaatatatcatccgcgcttcgagggttgaaccggaacgtcgacccatcacccccatagtatgaagacccaccaggcccacctgctccaggaggtggcacctgccctttgagcccctcttctccgtactggtcatagactgctcgtttctgggaatcacttagcacctgaaatcatgcaaagaatatgaattataccataaccatccagtcaataataaagtgcataatagggttccaaatttccagtatgagctgcatcataattagctcattaatacctcctgcagcaatttttgttctaaaaattgaatataacatgccattccctgaagttacaaaacatacgtaaagatcaaaaagaacagtgggcaaattccaaaataacaaagaaggtggcacaataacatcagaatccagaaatacaaaaggccattgttcccaacctaaggtcaaatgttccatattgttgcatgaaatgaatcgtctcttgagtaacaaaggcactacattgctctgtttggatcccacaagcaccgggaaaaaatgcagcattttcagatcaaacagcattgctttgcagcacccagatcttcctaccaacaacatcgcatcgcaagaacaacctcgtttaggtaatggcgaacaaaaaaactacttcaatcggcgagcggagaggaaatgggggtaagattgatccctctcgtttaggtgcaccctctataccagcccccattcttggcggaccaacatcaactagggagcacaccgggcgcatatatacagatcagaggcgcaaattcgcgaacgatggggaatgcgcatatagatacagaagaaggtgttgtgacctcgtaggcctcggagatctgcttgaacttggcctcggcctccttcttgctgttggggttcttgtccgggtgccacttcatggccagcttccggtacgccttcttcagctcctcctcggtggcgccccgctccacctgcagcagcttgtagtagtccacccccataatgaatctcctctcctctcctctcctctcctgcgcctgcctgatgaatctcgcaacgcctctctctctctctctctctctctctctctctcctctcctctctcgcggtcgaggagcggagatgcggtgggtgatggaggattattttttcttttcttttccttttgcaatctcgacgggaggagaggaaagaggaggaaggacgcagcgggagggtgtccacgtcacgtcggttttgccgacgcgagggctcctctgggaaaatggattggcatgtgttgtataaaagtcattgctgtgttgggaactttggacataaccatttctttagattttgttaatatgtactagtgctatattttgggtgatacatgtcggtgagatttggcttattatcttttttaaaaaaaaagagtttggatgttgtgtcgataatgtttaattaagtcatattagtacaatactagcatgttacaatgggaaaaaacaaaattgtaattataacaaagtatgtagtataggagatatgtgataacatcatcatgatcatcttgagaaaaccatttgatatatccatgaatattctcgtgattttgcttgagatagctatttccccgcctattataaatcaaaatatttttccagttgaaaacttagttttatagtagctagtactatatgctctagaagtgtgtacttatcaatatataaatattaaatatgttcaaatgaagacatatataaacattgttttgttaacttcatcacaaatgatcattctcggatcgcataacaataaagtttcattacatatgttcctttttctactcttgaagggttttgtatttgttttcttacgatggcgtgctctaatcgtcaaacaacaaaccaagtgcattgcaacactcgcgttggataaagtggcacatatcggtgcagacattcataaagtagtgtttccttgtcgaattgttatgctacgggaggaatttcaagaatatataaaagaaatatgaaaataaaagttagaaattttgatgtccgcattaataaactgcattactatgggatagtatttttcaaagaacaaatctttgtatttatattgtccgggtttgttgtgtaactcccattaaccttaagcatctcacacatgtaatatccacacactacggtctctcggtggttgctcgtcctgtctttcaattattatatatgttattatagaactttgggcataaccatttcttgattttatggtattatgtagtactattatgttttggattatatatgttggtgagatttggcatgttatctttttgagtttggatgttgtgtcgatattattttatgtcatatgtgggcaagatttaacttgttattcttatagctcaagtaaaaaaaataagcatgagccaaagtctaggcttgatgacttttgatctcgatctaaggctcaccattagcctgagttttgaaggttgatagtcataaaagagggtatttggatttattagatgcttctgttgtctatagtaatggcatctgatagtaaactctaatcatttgagctgtggttgataagtcataggaaaatatacgatacaaaataatttattagtaagacttttgtacatatattatttgtggtttaaaattcattgttggcaatgaaaacaaatcaattctaaagttaagtttcacaatttaaattttggttacaactaataagctaacacatacacgataaaaagcccaaatatctataccaatcgtgggtccaatagaaaatgaagtaactctaaataaggaatcaatttattttattaaatccatgaaactacgtaaaggaaattcctaaaatttggaaagtaattatctcccaatataggtcaatggaataagccaccctttcaggaaatatgaaaactaaatccaagttcaaatcatccacacacaaactcaaataaaatggtaactctaaatatattcgctctttgggcccaatcctcattccccatcttttcttcccttttgtagtccaacccatctgagcatcatcccccctcccccctcccccaacctcctgttggaccggaccatcaaggcagcccggtccagctcgacacggaatggatcatcgggctaccaaatgtcaaaagacttggatccccttcaaggatgatataaaagcatgtacaatcttgcatttagagagggttctataaaagagagaagatgatagaaccgactctatacactataagattattttcagccactcctagcttagggccaaccaccggccattgtattcttgaactcacatgccatatgccattgctctctgaaatgaatatatcaataccacatcttccttgtgttaatcacagtgggtctcactctccatggcaccctgtggttatatacattacagaagttttcacaaagcatatatttttgttatgagatctacacatagtacgttgtctataaataaacactacatatgccctaaggtactcagggagggtattacttatcaccactcaacaccgtatttaccacctccacaccagccatctccactccactccacctttaaccatgtgtgggtagagcaatgtagtaacacccttgtcaacgaatacaactgatttaactattgtgtatatatcccgaaagagaaaaaaagtaaaacaagagcgaaaaatgttccgaaagaaaaatatcaaagaaaaaagagggcctcatcatttgccttataacttatagaccaatgccaaaaattaaaatattgaagttgattttaatatttattaacatagtttctttttcagttttatttttaagttgtcaaggacacatacatgaaagctttacttataaattattttttcactaataaactgatggagacttcgtgtaagggcattttgctagttaatattcctagttaccaatagaaccttgctatacgtacgacttctccatccgactggcgtacgaccaaaatcagtggcgatcctacgtgtagtttctcgggatcctcgaaccccgggtaaattatccaattcttactaagttatatcatgttaattagtatacaattaaaaaaatagataattagtacgtattgaacccccggtaatttctgttctgggttctccactgaccgaaacagcagagcagcacaatacatgacggcgtgaggcttcatgtgatgtatagcatgatgttgatgccgcgcggcactgtttgtttcagcttaagattattgaactagattactataagctgaattataaaagctaacatagaataatctgtgagttgtttgtttccctaaattataagctgtttgttagttgttagccacccaataatctaaaaaaacacctttagtggattgctaaattatatagtaatctggcttatagattataataatatatcataataagctatatgtttttttagcttatttctaataattcagattataataattctaagctgaatcaaacgggtcatccaaaaagtcagacgctccggtcgtttgtgtagcattttcgttactaatattagggcattttgctagttggtaccgatataaaattgggcctacactacaaaaccagtgtaattcagaattgagcccacggggcaaccattctgctccgcccgtacccgtcgcgtccacctctccagtccagtccgccaccgcgccaccatgaggatcgacgcggcgatcctcgccgccgtcgtcgccttcctcctccccctccgccttctctccctcctcgcccgcctcagcctcaccggcagcgccggcgacctccgccgtccctgcgcggccttcgcgctctccgccgcgctcctcgccgccatcttcgccctcccgcgcgaccacgccagggagtgcgccgcggcctccgtcgtcgtccccgatgacggagagggtgccttccgcggcgaggtgcggtcggatatcgagcagctgaagctccagctcgccaggctgggtacgtggggactggggaattagcggcgacccatacccctccatcgattcttttcgtggcctgagaaattaatgtatttttaatatcgcgtatgagttctctccaatttcttctattcgtggcctgatctgtgtggtcaattgctgaattatgccgcgcgcacagagtctatgtgggataacaattcaaaaccattggatgggaaaagtggtcctttggaggaggatggagaggttgtgagagcaatggggctggatattcagtccctgatcaatgagcatgagaatatcaaggtatgatgttcttttaggatttgtcatatcaatttccataatccatagttctgtaattggttgcttacagagttacggtgtcaaaaattacggtctacacatgcatgatgacggttcttgatcctcccattaagaccagtgattgttttttattagggacagttctgtaacaaggagcagggaaacactcatttctttgtctgattgtgtaggaaggaagaccaaaacaaatgactaaaaataggtcacttaattagtaataccatgcgcttcacttagcaacaaaacattacacatatatatatacaaagttacatttgtattttcgtacatctatggattcgtgcgcctaggaacaacctatacctggtaccttactgtcattctgataagttgcatttcctacttttggaattttggttaaataacagaatgcttacaaatcatgcattggtcttttgtgccttccaatcttgtaggaatcactttgtggctcatattctgataatactatcaaggcaatggaaaaggaggttctctctctctctctctatctatctacatgtgtggccccgtaaaattgtgcacctttttctttttcaactatgttatgtgtcaccaatcaccaatagaaacagttacattaataacatgtataaagtttctcaagctgtccatattcaatgtttcttcatacaaatgtatatgcttcattgagaggattatcatgtcttttttctgctagaacattgagtttgcagtatttgtgttacatacaaactagaggatactgtttctattcttggtctttattttcagccagagatcttatgtaagataaaaattcctatttgcattgctgaaggttgttcttgagcatcagcaacctcattccaatcgtgaatgaagctgttacactcaaacgccagtcccttgaactaaattaggttaactaatattgcaactggagtaactaaccgcattatttggaaacactttaagagtacatgagtatggaaaaatggattacaaagtaaatagtgacattttgtaagcatgaagcactgaaaaacatcaaatactagcattcatctaaactgaaatgccatatgatctggtgaaacaatttctgagtaagttaagaaacctacacataaaacgtactaccagtaatgcaacttgtagatttatgaaatattttcccttgcctatgattacactttataatggttttaatatctcccagtattttcaatcactaccggctgcaaaccaatcagaaaagtacgggtgatgtaaaatttccatgccttcccttgcaccaatgagcatatgctcatagcatgcttagctttgtttgtaccaatcttaggttatttatgttgcccttgcacaaaatgaattactttgagagcccttcattataattattatagtataatatattacgaaatctggttcaaggtgatcatctcatggatattatgattacagattcaaattctaatggatgaatcaagaaagatgaactccaatattcacaatatatggtcaatggcaaaggatacagataatagagtcagcgctctgcattcagatgttaatatggtaaggttatcatcagttttgattgccatgagtaactaccaattctataacattttattaatattagtttttgatcatgcatttgatttattgtgttttttcatctgagattagaaacctcacatttgaatacatttttttaaaaatgtctttcaagcctaaatacatatgaagactcagtattgtgctatcttatttggtaaataaatttgatgtgttgcaatattgtcattctgaatgttctagttcaatcttgatgtgttacttttctgagctattatgatttttttgggggtggaggtattttgattaattcatctcatcagcattgtgataaaaggttcaggttctaatggatgaatcaagacagatgaactctaatgttcgtgaattatggtcattggctaaggatacagagagaagagtagagggtctacattcagatatgagaaaggtatcactatctaggttattatttattttgattgtcttgactcttgaggttgttagaagctgcattgtactgttcctttgtgcatataatttatttgaatttgttatatgagagtagaattttaatttttcaaattcaagcacgtctaaatttatactcttgttttcacaatgtttgtctatttaattaggatatggcattttagagtgcttgtctatcgagaaaaccaagagtttagtcataattctactctctacccttaacctaatgcatgaaaggggttgagtcctaattgtatcatgccgtttaataagggcaatgtaaagccgttctgtagttaattcttttatgttaaatgccaccttggtctttgtgaatggtggcgtatgatgactacagtgtcttgcaattgcgctgacactcaaatattcaatggagggaagaggagaagagagatgagaacttgtgaattcagtgaccctagctgtaagcttgtacataaggtctcattgcatgaactggtagttgttgctctcgatattgttttctggccatgatgttaccgataggcaatagtgaggtgttctatgaccaattatccatcgacagcacgattgctcctccaagctatgtttcttttagatcaaaggcttttgcgcagctttttactaacaaagcataacgattgttctcctccaagctatgttggaattctattggccttttttgccattctatttgccttcaaatatcgtcatgatgttaacttatatcctacacatgaaattaaaatataagccgcttttgttgtttgtacttcctccgtttcatattataagactttctagcattgtccacattcatatatatgttaatgaatctagacatgtatgtgtgcctagattcattaacatctatatgaatgtgggcaatgctagaaagtcttataacttgaaacggaggtagtaatttatatctattctctccagtattggaagatttgatctgatttcctatttctttcttactatactactctaagtgatcatgatggtataatatgggtttctatgctttttaatttttgttatatactaaaaagtaaaaacattagaaaagtatagttaatagttaaatgtaaatgtgtacatttttatctacctgtgccatatagcttttttggcatttagatggtcatacatcacgcatttggtgttttgactttgacaactgggcaagaactggttcctattattggggctttttcatcattcaatctctttggattccgaaagttggtcaaatttttataataagggtcccatgattaccggtccaattctaattggtgaatcaagaaaaagggagttctgatttacaaaggtgggcatttgcaagcctaccgagaaagggtgtagaactatatttgagtgtaaaaagtaagaaatactttcctaaccaattgtaatcctaaccttttcacaaataaaataaaaacctggggcccctgcctatcttttgtttctttgcgcttccaaaacaaaaaataccctgaaacattttccacttgttaaaagagggccccaacaattgtacacatctttaagcttgggcaaattaaaaaattgtattct

SEQ ID NO: 9093 - DNA, 20640 bp, Oryza sativa
agatcttcttgcagcttcctgcgcgattagaagatgagtttagaaaataacaagggaatggggcgctaagaataacgcagaaatgttggaattctattggccttttttgccattctatttgccttcaaatatcggcatgatgttaacttatatcctacacatgaaattaaaatataagccgcttttgttgtttgtacttcctccgtttcatattataagactttctagcattgtccacattcatatatatgttaatgaatctagacatgtatgtgtgcctagattcattaacatctatatgaatgtgggcaatgctagaaagtcttataacttgaaacggaggtagtaatttatatctattctctccagtattggaagatttgatctgatttcctatttctttcttactatactactctaagtgatcatgatggtataatatgggtttctatgctttttaatttttgttatatactaaaaagtaaaaacattagaaaagtatagttaatagttaaatgtaaatgtgtacatttttatctacctgtgccatatagcttttttggcatttagatggtcatacatcacgcatttggtgttttgactttgacaactggacagtaactgttcctattattgtgcttttccatcattcattcttttgtattctgaatgttgttcagttgtttatatcatgggtacgatgattacaggttcaaattctaattgatgaatcaagaaagatggagtctagtatatacaaaatgtggtcatttgcaaagcagacagagaaaagggttgaagatctatattcagatgtgaaaaaggtaagattatacttcctcagtcatctttgaattcctaactctttttcaaatataagtcataataacttgaggcaccttttactatctcttttttcctttgtcctttttgaatacatattatcactcatgaacatgtatcccactatgtataaatgaagggcaacgaactcatttgatcactttcttaatccttgtgcacaagtataaaaacagtttgtatatggaatcagagtctcagagaaagtatatattatcatttgttttgacattcatctgaacatatatctaatgcagaaatgctgtatttttgtgggtacgactgctgcataatccgaactacttattagctttatagtgggtggttaaatacatgtgcctgacaggaggtttctgctggtggtcatccttacttttttttttaaaaaaaaatgttccagatgagatataatttttggagacaccagggtaaagagaactgtgtgggaaattctagaataatatacccaaaactaaaataccttatttttctcaaaaacacaggaggactgcgccttattttattaataagaagaagaagaagaagaagaagaagaagaaatatgtacaaacgagggatccaaaaggacccctcaagaccccaaaaagtcatcacaaaaagcgacgcgcaactaaaataccttatgagagggataataaatgcaatataaaataggccccgtttagattccaacttttttcttcaaacttccaacttttccgtcacatcgaactttcctacacacacaaacttccaacttttccgtcacatcgttccaatttcttcaaacttccaattttagtgtggaactaaacacaaccatagtattggccaaatggagtgctttcacgttggtcttctttcctatatccaattcagcactcactggaaattctgtgtgcccctacttcacttcagcttggtagtttcccccacctttccaggaagcctgggtatataactgcagacttgaatagccacctatgaatgctttatgcccaattattccaactaactatttcatcctatctttgcgtagcttttgccacagaattagctgatgattattcgccagataatattcctctgaaaacatgaaaacattccaactaaactatttcatggatggtcgcagtccttttgtatttctttggcaagccgttttgtactaaaatctgccctaatgggcttgtttgagtccttttggactcttttccttcttaatataacgatgctcagctctcctgtatgttcgagaaaaaaaatgaaaacattgttgggtttgaccaatgattaaggactgccatgatcttcaactgctgcagttaactagttaagaatttccaagatatgcaattgccaagtgctattgttctgttaagtgttctgaaatgttcaacaactcacattcaaagtctctacatatttctatatgtactggcatggtgtagtgtattcattcatactatggaagctaaatatagaactgtgtgactgaacaattacctgcagataacagtgtcctattgcttgcacatgagagtagtaaataatttgagtttgcttgcatatgtgtttgttaggttgatatcacccttatacaatgttccagataagataattgttcgatgcaccacagtagaaaattttcctggcagcttctttaattaatgatatggtaaaataaaaacattacaagtaaataaaatgctttattcattaaagaacatgaaatattaatatgggtttgagtagggaagttttatgatgattcctgcagatattaaaatttcaaaatttatattgtttatttttctgtgcaatttaccctgtttcagtaccgttgcactaataacatctacacagggcttcaagcagaagggaataaaagttccatcctggatggattggtgatgttgtcgactcggtgaactatcattaaccttggcggagtatagtgcaccccttgatattgtaagttgcaacactacttatttagcagctgatcatgcattatctatgtttttttgtgatatagatatatgtcacaataggttcttggcgtaagttcatcatgtagttatcagttatgtggtctgctctgaatgcgactgtttgatgtcactacgccgccatggtactgtacatatgtcgccattcggtaacacgtgacctcaaagacttgagtgcttgtaaataagtttgtgttaatcttgttttgaagagttcaaggataatgatcgctcataactttaagtgtggaatttcgctcttgctttggcgcaatcgaagtgtcttgtggagtagacacaagtgagagttcctgtctgtccgtgccaagttgtgctgtgaaaacctagttcttgtcagcaatgaattggctgtatgattctgacgtataagtgcttgcgtggtgcctgccagatgagcaaggtcaagtgcaacgatgagcacaccatgtctccacggagaaacgtgtagcagaggtacaaagacactgttgatagatactcatactacacaaatgatcctgagatgtttccagaaaatgcatcagcacatgatctctacatctcctgtttataccagtaattgcagtctataaacatgaattatactccctccgtattttgttaatgtatgacgccattgacattttgactaacgtttaaccattcgttttatttaaattttttttttgcaaatatgaaaatatttatgtcatgcttaaagaacatttgatgatgatcaagtcacaatgaaataaatgataattatataaatttttaaataaaacgaatggtcaaatgttagataaaaagtcaacggcgtcatatattaaaatatggagggagtacgatttatcatcatataaagagtttttcttcctttgtgtcttcaccgtcgatagttttttttttctaaaatatccaaagcacccgaatttatctctgtccattccactagagtagagttggataaaataacgccatagacacccttcgccaccatggtgcctgtcagggtgatggagaggaattaggggaaccatcacagtagataaatttatctaaatgtctctcttggtttccagcttacaattttccagcttacaattttgccactctaaagaggttttttgcctacgtggcacgtcagcgtggcttacaaatgggaaaaaaacagcgtgggactcagccgtgagcttctcccactctccccttccttttcttctttggcgtgtttgtacagtcacggcgagcttgagccacgacccccagcccatccctagtcgctacgacccccaataccactcccttcccgtgccacccctctctcatcttgctgttgccaccccaacaaccaccgttgtagtgagtagctttcgagcactagccccaccgattaggggtggacatttggtctaaccgaaaattttggtctcggttttcggtctttcggttatttcggtctttaaaaagtgaagaccaaatttcaacgtaaaaatgtcaggaccgacaaattcggtctcggtctataagcaaagactcttattaggttttattaggttgcatgcctagaagaagtagaaatgtaaaaaatagagtttaatcctattgaacttagtggattgtaggttgcatttagacatttttttgttaattcagtcttttcaatctattcggttaaccgatgagactaatcgaattgaccaaacaaaattctgtctttcactacttaggaacgaattgatgaccaaatttctcgatctcagtctttttctgctcacccctaccaccgacgatgaggggtaggccctccacgccgccgatgacgctcgccactctatccccaggagtctgtgtttccccttctctccatccccccctccgacacacaccgacgggatggacctactccaacgacgacggcgttgtcgtgacgctaggatagagcatcgtgctgcgcatgaggttctacggcttccaacgtgccttcctcctcctcgctgccatttgtcaacatgcatcgtggcgcacatgtagggcttccaccttggtggcgcggtcgccacctgctcatcattgagaggttcttcgttgttgtgtaagagtcttgggtgtgtgtccgcctcaagtacctcgcgtcaggttggccaagcacccggtcgcccatgatgtcatgcccgcgtgcatcggagagggagatggacacaaggaagaggctggcgggtgggtcccatgttgtttttcatgtttgtaaaccacgtagataaaggtgacaaatagttaagaagtcacctatgtagagtgataaatttgtaagctgaaaactaagagggtatttttataattgccaaatgcaatagtggcaaatagttaaattcacccgtgtaaatcaccattgctagatggaaatgtccctaaccagtaacagagcttgagagaaatttgaggggctaatatgtaaaatttattggccatgggggctagctactgatgtcataaaaaaaatgatttcattgattttcaggaaagttggggaccataggagcatggcccatgatggtgtctatgaagctccgcccttggcccagtggactggagccccttctacttgacgggtacacgatggtggtgaccttagcacggcttatcaatttttttttaccatcttcctattttagtccccttttgattataaggaaattcaaaattcacagaaattttagagagctttatttctacagtaatgaaccctgtgaaatcttataaaatttctatggaatgtctctttccatgtaaattttggaggaaatttaacatgaggtagaatctaatggaaaaaatcatttgagtgtttatctctcctcaaattcttgtatttttcctacggtccaattaaatggtcattcctatgtttattatgtgttttgcaaacctatgcatatttgtattcctgtcagaattctatatttttcttatttatctgtttttttatttatgtgattcaaaggatgccttagattattcctaatattttacaagtatgagcagatatcagcttatcaactccgttttagcattgactactccctccgtttcatattatagtcttttgaatttttttcctagtcaaatgtttaaccaaatttataaaaaaatttagtaacagctaaaatattaaattagttctattaaatctaacatttaatatattttgataatatgcttcttttgggttgaaaatatcactatatatttttataaatttggttaaacttaaagaagtttgattaggaaaaagataaacgacttgtaatatgaaacggagggagtagatgacatatatgcaccattcaaccacctagaatgatttgcaatgagtggcatatccattctggtctatatgctgttaattcctactccatcgttttggtcaaattctggccaatattaattgatcgaaattaacatgccacttgttataccgtttcaagcatgagttcttcttccatcgaatttggcttagttgataattaaattatgtataggtaaaaacttatttatctacgtcatactttctttcgttactactccctccttcctaaaatatttaacgccgttgatttttttaaacatgtttgaccgttcatcttattcaaaaactattgtgaaatgtgtaaaactatatgtatacataaaagtatatttaacaataaatcaaataattggaaaagaattaataattaaatttaaataagacgaacggtcaaacatttttaaaaaggtcaacgtcgtcaaacattttgggatggagggagtaccacttttaaatatagttacatgataatctctcaaaataagtaggtttttccctgtgcaccagtaataaagatggtgcctgcctctgtgccactaaaaacttatgagcctccctctatgccatcgtcgaactttatcgcgccctccacaacattccgtcgctattctgtttaggtttaaccgtttggtatctctggcatgtgggcccgggcaagaaaaatatcgttcttgccatttcaatcgctggcatcaacgtctgcctcgtcttcccttgtcgccatcgtctccgccgagccgagcggacagcgccgctggccacccctccaaccggcgcccgacctcctcctttgcccggcgccgctccggctcctccagcctgacggcctccatcaccgccgcgctggccttcccccatcctccttgccgccctgacctccttccccgatgccgcagggccaccttcaggccacggtgttcatcagtgtcagcgctactaccggagacggacgccggcgcgtcgttgtcttccgcggggaggcggtggaacatgggactggtgaacgcgatggccatgatgacgatggtggtggcggcaacgagcgggcccgccacggcgcctctgacgatctggccgtgtggcccccgcgagagatatcgagaggtcaccgccacgcagggccgaccggcgcctgggcgccgcgccgccgtcgccttggcccgatcgccggccttcccccatcctcctcattgtcccggccttcttccccgatgctgcagggccaccttcaggccgccgccgccgtgcagggctcgccgccgcccgccgtcacccagccgggacaccgcgccgccgtcgccacggctcacgccatcgttgccttggcccggtcgctggccgcgccgccgcacctagcctcgccgctgcaccggccgcgtagggctgactgccgcccagccgccgcccagccgggacaccgggccgcccgtcgcctcggcccgatcgccggccgcgccgttgcacctagcctcgccgcgccaagcaacgcaaggcgcgagggagagaaacgaagaaagcaaagagagaaagagagagcaggtttttccctgtgtgccgtctcaagtctaaggacaactaagtcatttggctgtgcagttacccaccgttacgaccaaaaacagacggaatggtgtgaagagcgcaataaagtttgacgatggcatagagggaggctcgaactttttagtggcacagaagcaggcaccatctttcttaatggcacagagggaaaaacctccaaaataagtgtacttaagtaaggatgtaacatatgaactacgaatctgaatagcctgtacagattcataggtctagtgtatcacatccttacctaggtgtaagggtgcaagcgggcaggcttgcaaacccgcttatataccttttacctaggtgcacttattttgaggtgaacgatccattttataataatataattattgtatttttttattataaacccaaaaggttacaattgtattggccgaaatgtcctaatacattataatttaatatgattatttaatagttgataaggatgagttaattccaaaaaggaatattccaaggtttggatgagcttcacacctcaaaatttggcagaccagtccaacataatttctctctcactgacaagtggactacatcctcccatctataagaaaagacgagaccagtctaaccctcatgccaaacagataatggaatcatccaattctaaataatacggatgggtctaacccatcctttcttatcctcaaactaaacacaccctacgaggcctcatattttagggtggctttgatggagattttcagacgcaaatgaaacaagaaaactcaataatacatgattagttaagtattagctattataaatttaaaatttagattcattttatttttctaaagaaaacttttttatattttttccacaaaaaattttgtttagtcgtttaaaagcgtgttaaccaaaaataagaaagttgttggttgaagttaccgcctaaaactcagtcttactcagaaactatcaagtagtttccaactttccatacttaccatatcatttagacagtatatatataaactatatatccaatggattgtgtctttaaattaaattttcatccaatcatcttcattctctctcattttatcaaccaatctctttatttttattcttggttcttgtgtagagatggtttcttgaatgagaaatagtttcttcatctttttatctctctacttattaactctcttgccacatcagatttttactcatgtgacaatatatttaatgttatggatactagatgatatgaaggattggggatagccttagtgcaatggtcacataattcttttccataaagaatagcagcaagcattcgtcactcagctcaggggagaaccaccgcatagcatgcatggatcatgctttgccgcatcctccgtgacgatatacggtccacaagagtccgaaacggtccccaaaaataagccaaaatgttgccggggcttgcgtctgaccaacattgatcgatcaggtcgcaatgggcctctatctttatctcacttcccattaacacgtttattaaatatatgtttcgtgcgaaaacctttttaaaaaatatataaaaatactaaataaatttatttattaaatttataaataaatttataataattatctcgtttggcgtgctccgaaaaatctcgcattcgtatctaattcgagtcgaacggggcttatatactcctcgtgcaccaccaccaagcaccaggcgcgcatgcatgcttcatgctgctgtgccccacccgagtccgtgtcccacacccgtagaatctcctacaaatatagcggcactagctatccgacgcgcaccaccaccacctcctcctttgcaccggaattcaccaacaaaaaacagagcacggccatggcaccgacgacggcggcggcggcggcgagcagcaacggcggcggcgagagcgacggcagcagcaaggagtggaggctgacggcgccgacgaggggcggcgcgatggcggcggcgggggacaagatgagcatccgggcggtgcggtacaagatcagcgccagcgtcgacgaccgcggcccgcgccccgtcctgccgctcgcccacggcgacccctccgtgttccccgagttccgcaccgccgccgaggccgaggacgccgtcgccgacgcgctccgctccggcgacttcaactgctaccccgccggcgtcggcctccccgccgcgcgacggtaccacccacgccatccacttccgttttttttttgttttcattattttccggcgagttcaaatattcggttttggttttatgttttttttccgcttccgtttctttgccgattaattgttcgctacgtgtgcatggttcatgtttgccttttatggcctttattaaaattagtttattaaattttctcaactatttgtttgttaacgagaactagcaagctgagccgaggcgagccatatatagtgaggccagttttcgttcaaaattgaatagtttagtttaaaaaatttatcaactagagtactttcgaatcgagccagtgataacacgtatttactaatagtgcttattttattcattaatgataattataatacgaattatacgaatagtgtttagggactggttggttcatttgcttattttgtgtgccaaacagcatatatcaccaatttagcaagctatagtttttcgacactcgacaaaaagctcgccacacttatggccaaaataaatcagcttgcaaattgagtctataagcaaatctaaaaacgctacaattgcagttataagccaaacgttttgccagaagaaccggagctgcctactttagacgtgataaagtttggcaataaactaaaacagtcccctagtctgcgtaccattctttgtttactaacaaaagcgtgctactttacccaccagttatataatttgttcactttgatccgattcctattttgcaacatgtacgggtgatatatatttcatatacacatcatcaggcacctataattaagctgcatgggtcttctctgttgtagtgagcacactttggtcataattttaaggactgtagcactgaaaaatagatttatttgaattttttaaacaacttgcacatataatttttttatgaaaatatataattttacagtttgaaaagtgtgctaatgaaaaatgagaaatttggagttcagagttgaaaaaaagaaccggcaaaacaacaaccccatatgcaacacgaggtcagtagggtcacaactcacaacctccctgtaatgtaatcccggggaagatttgtttcgattcaaacccatatagaaccatggatttaattgaatttaaactggatgaagaaaacaattattgaagtagtgttattacacatgtcacatgtgcgcgaatactgtattggcgtcgatctcgaggcgtactactcccgtggtcggcgagagctagtaggggaggagaactgaagtggaaccaacggctggcgatggacgggacgtacggcccgagcggcgcacgcgcccgcggcgggggagcacgagccccgcgtcgtccacgcccgcccccaccgcgtgctggcacgccccccggctgctgcggctcgtccgacgtggcgggcgcacagcctggatggagccttcattgtgcatctgtgctagctgtaggactgaaggctgtagctgctggatttctgggggaaaaaacaaaagaaagaggaggaaaagaaaggaaggaaaatgtgctctcttttgaattgagaacaatcgtgccttttgtggactagaagcaggggagaagaatatatagtccaataattcggtttttctgggttgatgatgcatttcttctttagaaaggattttacatgctgttttttttaataatggcatgttgttcattatgttttttttttcatgtatgattattaattaaatgttttatttgcgccgaggatgcagttcttcctgaaagaggcatttacgtgatgttggttcatgcttgcttatgtgattgttaattatatcataatatatcttgattaatcttgtgcctttcttttgaatatagtgctgtggcagatcatttgtcacgcgacctcccatacaagctatcttctgatgacatcttcctaaccgctggaggaactcaggccatcgaggtcgtaatctcaatccttgcccaacctggcacaaacatattgcttcctagaccaggctacccaaactatgaagctcgagccgcgttcaacaaccttgaagttcgtcactttgatcttattcctgagaagggctgggagattgaccttaactccctagaatctattgcggacaagaacactactgcgatagtcatcataaatcccaataatccatgcgggaatgtgtacacttacgagcatttatccaaggttcagctggtttatttaaatttgataaaagtttaaataatattatgggcaacttattaatgtgcatatgtattattgttatttaggtggcagaggtagcaaggaagcttgggatattggtaattactgatgaggtgtatggtaatttggtttttgggagttccccatttgtcccaatgggttgctttgggcacatcgtaccaatattaaccataggatcgctatcaaagaggtggatagtgccgggatggcgacttggttgggtagcaatatgtgaccccaagaagactctacaagaaaccaaggtaaaatatatatttaatactgttttgatactttttttgtgaattgatatttgaaatatatatttttctaagtgtatactactttctttgtagattgcaacattaattactaatttccttaatgtttcaactgatccagcaactttcattcaggttagtgtttttttccttaacaagccaatgtttgggttataattttggtcatttatctgctttatgtaatgtttggtggactatgtgttgtggtcgctcttcggaaattggatggctgttcaaaatgcacagtgtggtgtctagcattgtttgtagctgagaaaaactactggtttaaaatatactatcgaatacttaccaaataaatagtacttatgaatcagagttataatcaaacataagttcatcaaagtaacaaaaaaagtttaattcagttttttatgttcatttcatcctatttctgttaaaacataataatatgttttaaaaattaattgagaagatgaggtttgtattttgtgttcactctgaggtgcgtagttatttaagtgataatgtgaagttcaatgttacgttaaagtaagcatacaattcttatactgagattatttattggtatcttgctttaaaaatattatattggcctcgtgtattcattttatctcaaataattgaattgtgcatgttttgttgttgaatttcttagggagctctaccgaatattcttaagaataccaaggaagaattctttaagaggataattgatttgcttacggaaacatcagatatttgctatagaggaataaaggatattaaatgcatcacttgtcctcacaagcccgaaggatccatgtttgtgatggtaagatttcctcttaaatcattttatcattagagctgtactagcatcaatttatcacactcaaaaaataattatgctatatttaatttagttggcacctaaaacacttaattcagagtcatgagaaatttttggtgtattgtgttgaagaataatgctataattaggaagttgtagtttgccatgttaacatcaattttcttttgttgctacaacatacttgtcacttaagcttcacttccagtaatcttacattgaaatcctataaacaggtgaaattgaacctatatcttttggagggaatccatgatgatgttgatttttgttgccaacttgcgaaagaagagtcggtgattctttgcccaggtacatctaacatttttgttaataaatggatatgtatgtgcctatttaattaaagaaagttaaaaatttaatattatattattcaattcacttgttatgttcttgtaattctctaacgctataccatgacatataagtgatgctaccttatttagtttctcacaaatctaatgattactttttggctaaacatttatgcttattaattaattttgttatgaaactttgaaaattattctatgattttgttgcttaaaaaaagttaatagttaattacttttagttttgcatctctaatcactaatagataatagtttagttagaatatttaaatatatgtggttatgagttttttattgattgcatgtaaactttttatatgtgatatatgaatatgacgacattattttatttctatatatgaaagaaaatttagcaaagtgatgcaatgatattcagacaggcacattatatccctacctgttgtttttgtcttatggatgaacaaatgaaagatcatctgctttttttataatatttgagaatacaaacggatattgactatctaaaagataaaagttgttttaaaatacaagaaacttatatgtagaaaacattttgcaaaaaccgcaccatccatgagcttggaaagtgtgcttgtaagaatccataatctgtaagaggaaaagaacagggccaatcacatgtaaataaaaattgcgtatgccttaattatatgagaaaatataattcaatgtccaacaatatttgggtacacgtactttgtccttttagtttatggatgttgattactttaagtactgaaggaaaaactaacaaagagatctaatattatgctaccactttaaatattagttaactctgtagtagtaaattaagctagagatttaatataatatcttaaataaagtaaatgttatagccttgttaatgtttctattttacgaataatgtatttatacatatactttacgtatcctaatttaactatgttgcctaaatgcagggagtgtgctgggaatgaagaattgggttcgcattacttttgctattgattcatcttctctcctggatggtcttgagaggatcaaatccttctgccaaaggcacaagaagaaaaaccctttaaattatatctagattgtactaggattggaatgatcagtactaattgtgatgtttgtgctttatacctgttgtcaccaaaatggaactattaatttgctatgaataaagcttacaaattcatatgtgtcaatgaactcatctataaaagttgcacatgtagtttacatagacttgacggttacttctcatcaaggacttttatttacctttgttacattttgaaggcccattatatgttatgggacctctaattagtcttatgatttgccaatggtaacatacttttcttaaaactccaataaataaataaaatattggcatataccacatgaaccagagattaaaataacagcatattggtgaaatagtcccttatatttgccaaattatctcacaaccccacatgtatactctcacttaagccatttattgcaatgatttagtttgtgttgatggcacacaaattaggaatttcggtactttgccattccacaaaattagcatcaattatttgacatcttgggccacatgcttggtctcacatgtctacatttcccaagtagtaaaatgtgccttcgtatttgcaaaacaggaggcactcatagtgcacgcgtgggagctatagtacactggtggagaaactgaaagggtcaattaggcctagagggggggtgaataggctaatttaaaacttaagaaatacggaagcagtaatttttggagctaggctgggaattttcggaacttccgaaaatgcacagagcagcgcacacaaaatgaaaactctagatctataagactataacagggaatacaaggcacaatcagcaactagaccaatagcggcacaagcaagcaaagctagaggagagggatgaagaaatatcaccaagatgtagctcccaaagttgttccctggagttcaaatccttaaggggattctactctctgttgaggaactcactaagagccgggtcttagctaacccttttctcaagaggttgcactaagcactcctcctttcactaagaggtatctcttcccttgcggaggcgagatccggccttcacaaacttctcctggccaaccacaagtagatcggtggctcgggagtgacatctagccgtctaggagtcctcaacctccaagagtaaaagatgatgcaaagaactcccggagatgatgcaattgctcacaaatcttcacaaagaccacaagaagcacccacacaagctcgaatccacactctcacacacacaccaaatccaaatcaaacacgggtggagagatgaatcgaggaagcaaggctcaaatgaactagagagagagagagcaagccaagggcacaaataattggaatggaaccagcaaccctcacaagtgaggggaggtgggtatttatacccacagcacaaatctgcccgttagagtgcaataaaagggattttcggaacttccgaaacaattatcggaacttccgaaaattccagatctgagaaaaatcgaagtcaacgcaattttcggaacttccgaaaaaaattttcggaacttctgaaaatttccagaacgcttctgtgtattttcggaacttccgaaaatttccagagagctctcaaacggttctgtgtattttcggaacttctgaaaattattttcggaacttccgaaaatttccagaacgcccaaacgcggttctgtgtattttcggaacatccgaaaatttccagaacgctccaaaagagaaatgcttcgaagtaaaattgattttgagcacacgcatcactccttatatgtctatgcatcatccccttaatagtacggctttcctacgacacaatgcgaggaaaaagatacaatataccatttgatcattgccgcattgcatcgcgatgtcgcattcacgggatatgcattgtattacaacacgttgagaacttaacaaccttcacatttgcttgaataaaaatgttagtcctctctaatcgcatagtaatcaatcatcaaaatcattaggggcctagatgcattttcagaaaccatctttggtcggtcgaccagattttacaatagtccctgttatattaaaaatcgggactaaaaatatctttagtcccggtttaaaagctacatggtacttttcaatctttagtaccagttggtgttagcaaccgggactaaagatctatttgtagtcctggttgataacaccaaccgggaaaaaagatcgccatacgctttactcccggttggtgactaaagatctatttatagtcctggttggtaaaaccaaccgggagtaaagatcgacgctgagatcggagaggtgtgcacgatcggatcgaggtacctcctcctctcctctgaatgtgcagagatgtagcctagaggggggggggtgaataggctttcctgaaattttctcaacaatcgcagcggttaaattgacagggcccggaacctcctggtgatgaacaccggaacttccgggtaggatgagtagcccggaacttccgaagttcttgagccaggaacttccggacagcagagaaaaacgaaattaggggaagtataacaggtcctagctagagatgatcaggcacagagttgcacaagatgtaattctcaagataccagcagattcaaacacagatcatgcacaagggagacaaaggcgattttttcccgaagttcggatcacacagatcctactctccgttgaggtgctcaaagagccgggtctcgattaaccccttgcctcacttatgaaaagatctcagaagaagtccacagccttcaactcaacacttctaggtcgttttctagaattgagtgaccaccaagatccaactcacaattccttctagaaaagaccacaagtgcaagttgctctacctaggataacctctgaaaactcagcacaagaatctttactcacttacctcgtttccttgcggaggtgaggaaaatcttcacaaactttcccgggacatccacaagatctttggaagctcacgggcgacacctaaccgtctaggagaagatctccaagagtaataagcccaagtgacagcccacaaggtatccaaagtgctcaatcaaacctaatcttcaagccatctccaaaacactcctacactctaatctaatctctcaatctcacaagataggctctagattagagtggaggaagcaaaggaagcttgggagtggctagaaaaccctagaacatgaaagagctgaagtggaatggctaaagggtgacctggggacgaaatccatatatataacggctaggtgacgtcatctagccgttactcacaagattgaactagaaacctgccaggaggttccgggcaaaagtgcgaagaacttccgggtagcacttagaaaaaatctagctaaacttcggtgcctggaagttccggccagaacctccgggtagccctctctgtctcggggagaaaataaactttggtgtccggaggttccggccagaacctccgggtaggcctctctgtctcggggaaaatcatttccaaaaatgattccaaaaacctttagactcatggatatgactaagagcactttgtataccttggaaccacacttgaaacccctcttaatagtacggtttttcctaaactcaatttcgaaagtgaaaaacctagtctaatcaccttcgatgttttttgcacttaggaacattcaaattgggggggtctccttacattcttagccatcacaacttgctttgggactaaactcctgtgaataaacttgataaacacgttagtcccctttaaccaccttgtcattaatcaccaaaacccactagggggtttaagtgcatcttcaatctccccctttttggtgattgatgacaacatggttaaagcacacaaaaagataatagaatttaaatttggaatgatgagagaagtatgaagctccccctaaagatatgcatataatgaaatgagatgaatacaatatgcataagatgaaggaaacctcaaaagaaacttcacactaccctcatcaaataagatgcagatgtgagtgcttaaaagatgtgtgatacgcaagaagaaagactagatgacatggcaatcactcaaaaagatgaaaagaacactacatcacatcaaaatgcaacattcatatggactaacttactgacataaaggataataaagcatctaacagtcattacatccaatcataaaagaatatgattacatgtccatagagagagagataaaagggagggaatctgcctggtcggaacctccagatcataggacccggaacgcaaaatgatttaaataacccccttcaattcacaatttctccccctttggcatcaaggcaccaaaaagcaagaaaccatgaagagaagaagaggatcactcatctccatctccatcggagggaacaatctcggtatcaccggagagatgagactcatcggactgtgcagcggtgtcaacatcagtgggagcatcctcagcagctgcctcggcgtcatcctcctcctcatcatcatctgatcgggaagactcttcattgaaataggtggatggaccttcaccggcaacattgcgggctgcctcataagcctcaaaaggatccacatagacctcatctttacaatcatcttacacttctttcccagcctctcttctatcttccttctgacgcctttcgatcttcttcactttctttgcagtcttagcacacatacagaagatcgcctgaagtgccttcttgatgggagaagagctcgaggattgcggtggggcactagaagaaggaccagctgaggtagaagggatggatctaggtatcactggataagaggaaggtggaacacgaggatgaaaaggattgtggcgcccatctttgatgtagaacactccggtgactgtctcaatcatcttcataatgaaaggagcataaatgcaacctcgcttaggctcaagaatggtgttggcaatctcataccaaataaacttcatcacactgaaaggaggctgattgtagcgcatgcgactgagaagatgagcatgcttggatggcaaagcagtagcatctccaacctttggaagcagagaccaacgaaagatggagtacagcaccttgtagtttgaatgcaaaccatgagtagttcccatacaagtccgaggagcatccttagtatacatgaacttagtcttgatcatggggaggggtgcttcactatgaatattagggctattgagatcctcatcctctaagcccaatatcttagcaaactgtgctatggaaattttgtgcctaacaccctcagtcatccactttacataaggagttcccttcctagtagtaccaaacaatgctgtcgcatagaattgtgcaatgacctcctcattccaatcatactccaaggcaagaatatctccaagattcttgttgtgacaaacttgcattgcttggttgaacacttcattgttcttcttccttatgtaagtccaatcaatccacttcatctcaaccattggattgtctctagctataatcactgagttataccaatccaattgggtgaacgtcctaaaacgaggatcctgtgactcctcaggctgtgtctctggatcaagcaaacggtcccttctgcacttggcaagctgatgaaggtagttggaattgggtcttccaatgtggtgcataagaagggtgtcaaatccaagaatcttgtagagctgaacg

SEQ ID NO: 9094 - DNA, 25542 bp, Oryza sativa
  unsure (1)..(25542): unsure at all n locations
gcgttcatgataactatcactgctgcctgcaggtcgactctagaggatccccataataaagtaagtcaaaaaaaaataataatttcaaaaaattttgaataagacgagtggtcaaacgttacaaacaaaaactcaaaatcccttatattatgggacggagggagtacatggttaatctcatggttgaaaattagatgtaaacgaacaaatttatttttcacttgaatgtaacgtagatatataatttactaaccattatccaaaactttggttttgttcaccgaaatttctgtgcataggatttgttgagagatacgtatggtattgtgtggcacagtcttatcacaaacagtcagcttataaaaaaaaacaaccttgtactcatatcctagcaccacgaatctgaacatactctaatctgaacatactctatgttcagatttattgtactaggatgtatagtacgatgttagtttttttaatggtaggatgtatagtacgatgttggtttttttaatggagggagtacgctgagtacctacgtactgtcacttattgaaatatactctctctgtcccataaaaaaccaaactagtactggatgtgacacgtcctaatacaataaatctggacatagtccctccatctcaaaaaaatgaatctagaactagatatgatatattctagtacaatgaatatggatatagatatgtctagattcgtagtactaggatatgtcacatctagtactaggttggttttttatgggacggagggagtacatctgtctagattcgttgtactagaatatgtcacatccaatcatagattcactttttttgggacgaagggagtacatgtttttaaaggaaagagttgtatcctatcttactataaagttatccctcactaactccttaagcttaacatgcaaagatgccacatcatcatccactaacaagatgccacatcatcatccactaattaacaagatgccacatcatcatccactaacaatcatcatatttaaacaattaaacatcatgcaaacatactatatctttatagtttttataatttaagagcttttcaaatacaaacatgttaaattatcatccaacataattcacataatgtttcaatgtatatctttattaagttttatgatatcctatatacttatatagtttatcctcacttagtgcttaaatgattaatctatggtctaaattatctttctccttttttctctaattaagtcatatcacatctattgtttttagcctttagatgattaatctacggtccaaactatctccctacttttcttcttccataaagtcataccaccttactttttatgtttaaatcaccattctacatactatttaaatttaaattatcataaaccacattagtttacttaagctgatattatctagctatcttacacgttattttttttattgttatcatactaaattcccgcagcaatgcgtggggtttcacctagttgttttaaaattttaccccatgagctgctgtgcgtttaagcggactggggtcaattagctagcttggtggccgggtccctgcctacaaaatgttgaggatatgttgttatatggtcggatgactcgggtcatctgaccctggtggtagtaatgtggatcctccttgtccaaatatctttgtttcaaaatataaatattttaaaatcttttagcaatgatttagattattttaaaaaatgcacagtgcctttcactacataaaatgttatgcgtaagatgaagacaaatttaaattagtgagatgttactataggacacgtaagcttttatttttgaacttttcatattgtcggcttttgaaatcctttttttaaaaaaaaatggtcacctcttccatggagcatcctaaacattttttataagcaaaataaagtgtaatttcgccacagaaaacggtgcataaacctgatgaaataataataacctaagagaaaatataattaaacttatgtaagattggccggctgctcggtgtggggatgttatatttcacatgtagcaggggtacgttcatcacctgcacattgtctggacgccgccacgtacgtacgggccagctgccacaccagctagccggccggccgtgtatgaatgtgacgtcgaatccgacgatcgaggggaccgtctcgatcgacctgatgacaaaccggacgaacgatgcagcaatccgacccatcgaacaggggatcgatatcatgcatatcggagtatcttgcatgtcatgacggcgcgcgcgcacacacacatacatacatacatacatacatacatacatacatacatacatatatatatatatatatatatatatatatatatatatatatatatatatatatatatatatatatatatatatatatatatatatatatgtgtgtgtgtgtgtgtgtgtgtgtgtgtggttacgtggctacaatatgtaactccctccgtttcatatatatataccttttggactaacatagatttatctattgatcaatgtatatgtttttttatatatgtctagtttcattaacatctatatgaatttgagtaatgctaaaaagtcttacatcgtaaaacgaaggaagtatgtcttagtacgcagttagtacattcgttttttatatacactctccatttttatatatgacgtttgttgattttttacatcaccacaactccagaaaagcacatcggtaccagttgggaatccccttgggtgccggttttcccaaccggcaccatggaggcggcacggatgacttcggtcatcggtgccggtttcaaaaccctgtatctatatgtgtgtaatagatgccggtttgtaggttttaaaatcggcacctttgagacgtacgcgatccaaaaaaaggctcgatgcactggattgaatagagccgatacatcgagcgcatccaccccgcatcactgaactcccaaatcattgtaagcaaatcacctactgataaagtggacacagtgacttcaaaaccgctgatacaatgggtccccaccaaagaaggacaaccacaaggacccactggtgggacaaccacaaggacccactgtcataataggactctaatgatgatgactactacgagaacggtgacaaggaggagggcatggaggccaaggccgaggctgagaggaggcctcggtcaccatgatgtggtgatggcagtgtcttgcatggccgaggcgcaggaggagggcctagcacggttgtggcacaggtggcgggcgcctgcgatgtggaggtgttgctggatgaggcgaaggctagggtgccagccagatggtactgaaaacggtcacggaaactctcgatgcaaccgagcatcgtttctgtataaggggtaccatttcctaccgtactgtttatagctatttataaattttgtttttttaatttctttatgcgtcgtattaatgtcgacactgagtagcttaaatgataaatatggtcaattatcggccgatccatcgtcgtttttgaagagatcctgccgattccgactattttcacccctggtagaaagcactagcagaaggggagacggaggagaacgcgtggcaccagactcatctcctttcgattgaacaatttattcccatcgagaaataggcttatatatttcccaattttgcatagggtactctgctctaggtaggtagcctaggtgaggacacaggtgagggctgtctgaactaacggttggcaaatgagctaacagccaacaattgtgaagtactcctacctgtgctaattgcatgaattaagaattttgtatagaagtgcagaacagtagtgaaatacgaagtagtaacatagattgtacatgaaaaattaaggattttttattaactatagtggttggtccatgattatatataatgaaactgtgtgaaaaaccaaccaaaagttacaccccaccatcaccagcttagactcattcaagctctactatccaacatcactcgaggttcttttggagagattacgaaagaagaaaaagaccatgatgctctcattaaatagggtgtgagtagtggtagatgggtgatcgacggtaagatggtaaaaaatattaaatactaattaattaatggaataaatatactataggatttcttatattttgagataaagtttgaattttggatcatatattatatattataagacagaggactccatccgtccaaaaaaatatttgtcctcattgtcataagatatataggtcacatcctattttaaggctgtgtgttcatgttgctccttgttgggaactaatgccttgcgcacggaaaacggagcagtccattaatacgtgattaattaagaattagctaattgtttttttaaaaaaatagatcaatatgatttttttaattaactttcgtatagaaattttttataaaaaaacacactgtttagcaatttgaaaagtgtgcgtgttaaaaatgagggatatgcgttgggaacctaactaactaacgcagcctaagttggctctaagtaataagcttacagcttttttttaacctctctctgcccaacattaacccgcttcactccaaagcacccacacccatccaccagctcacaatgtcatgtcactatgcatctcacacttctctctccatccccaccttcacgttcctcgccacaacaacacgtacaaaacaaaaattcccactcacatgcaatatgtgcatatgcaaacctctcctacctcacactccaccctagctagcccactacacctcctacaccctcaccatccaatagcgcagtgacagtgccaatggcctctcacaccaccctcatcctcctcctccctctcctcgccgccgcggccgtcgccgccgcggacgtcgcccctgcgccggcgccacctgcggcgcagacgatcaacctcacgggcatcctcgagaagggcgggcagtacaacacgctgctccgcctcctcaacgccacccgcgtcggcgagcagctgggcagccagctgaagaccacctacgacggcctcaccttcttcgcgccgacggacgccgccttcgccgcgctgaggccgggcacgctcaacggcctgagcgaccaggagcaggtgcagctggtgctctaccacgtcctcccgcgctactacaccctcgccacgttccagacggccagcaacccgctgcgcacgcaggccacgggccccgccggcgtgtacaccgtcaacgtcaccaccaccacggggcagagcctcgtcaacgtgtccaccggcgtcgccgccgtccccctcggcaccacgctctccgccgacttcccgctcgccgtctactccgtcgacggcgtgctcctgccggagcagatgttcgggaaggccaaggctcccgcgccggccgccgcgcccgcgtccgccgccgggaagggcgccaataaggagcacaagaagggcggcgccatgcccaagaatgaggtcgcggccaccgcgccgacggccggagctggaggagaagattcagatgacagcgccaccaccaatgcggtggccgttgcaggcgcggccggtgtggtgtggactgctgctctcgtggggattgccaatcttgtcatcgcgtagaaagtgtgtgcttgtctttttctccttcgccgttttctttcgttttcgtcgttgcatatgtttcattgcacgtgtcctattttgtatgtatgcaagagtatttatatatgttgatgatgattcactcagtgaaatttactggcttcttttggtctttccattgcatgtgccctactttgtctgtatctgagaatagttatatagatgattcactcagtgaattaaattcactcttttatatttctttcctacggcatgtatgtataagagttcaaggtggcctttctgggaacacataacctatattaacaaggatgatagcccacgcagggcatgtatattatagtctgcatttgagaaacttctaacaattgaatatcaaccatatgggaccatatcctatatgaacaaaagcttcccgtgcacaatcagtgcacaccaactatagacatttactcctaatagtattacatgtatctataaagtctcatattcaaattcattatattttagcgataacaaaaaagtgaaaaaaattgacagatttaagggtaaaaatctgttagaattttgtctttttctttatgactaaaatataatgaatttaaagataagatttcacaggtaggtgtaatactattggaagtatgtgtccaatttttttaaaaaaaatttgtgacatttgctagttgatgtgtacggagtgtgcacaggaagcttgtgtacatagtatatattccccaaccatatagcacttgccaaactttagaagtatgttttcttcataaatttatttgtcatcttttcttaaataacttttcttacataggagtatttttcacccatatactatctaatatttaattcatctatataagctatttttttcttcatcatttaaaaaggaggtagaatagtttgtttaggaaacatgtctaacaaattaagtttaaattaaaactaaggtgttttttcttttttaattgaatgttttggggctcttttttgaacaaatcttggaaaactattattgctaataatgtaccatcaagctagccctctttttaattggttcacattgatgcaatttgttatatatatttacatatgaatcaataaagagagagtagatatacatatcctagatcttgcttccgagaaacgtacacatgtcatacgacaagagggggggggagttatgtttcctttgagatagatccaatggtttcaacagtttgatttataaatataataatgacccaaagtaatgtatttgttttatacttgttaaatatctattttctaatcaaattgtgtattatcataatattatttataaattttatgtgtatttataacattaattttatgtgttgcatattgttctattaaaagctttgtgtttttaaatagatcattaaaatatctatatgattttacctataaatgtgtttttatctcttttacttattaaatatatagttagtttggataatctaataatgtatgtggataaaatattagctatatgatttagagcatataattgttcggaatttattatcacaaaatatgttttctatctaatatagaatgagggaggaggtatggcgtacgtacgtgtgctggtgcacgtgcacgacacggacggcccgtgtggatcctttttttttaactctttttattaactagcaaaatacccgtgctttgttacgggtaaaagacaaataaattttttattatgctaagtattgatcacaaatttaaatgataattaggatggatgaaaaccagtattgcatattgatatactcatattctcatcataataaagatgggcatcggtgctcgggcaacgaagaaaaccagaacaacaggaacatggccggcaacgacgtggccctgatagagagagaaatggcattggcgagctctggtggtgaacacgagcagatgagtgtgttaaaacatgttcccagacgaggggttccattttccttgaatgcgtagaaagaacgaagatgaataaaaacaaccaacactattcatcatcttccctagccgaagcaagaaacaaaaaagagggaatatgggcgttggtgctctggtgatcatatggcggtgaggaaggtggtcggacatgtaccacgatgtgacttgtccatagatggtggcggttggttataaagaaaatcaaaacagcgggaacacaaccagcgacgatgtggtccccacagaaagagaaacggcaacaacgagctctagtggtgaacacggtcgagtgagcatgtcaaaacgtgttcctggacgagggggttccgttttacttgagcgcgcaagagggagggaacacagaggagaagaggggtgctgggaggagaggtgccagggaggagaggggctacggggagagggggatcacgaggcaaagatgggaggcgttgagagggagggagggagggaggcgaaagcggaggcacgtgggagggagagagggaggcggaagcaaagacatacgggatcgagacagggagagaggcggaaacggaggccatgcgtgatggggaggtggatggacaaaaatttgtccgaaggccttacatatttttttaattaggtatagaggtgcacccaacggtagaaaatagtgatttcaccgtatttaaagtaaaatcgatggttagatatttttatttctttagaattgtttggattttactctactttattagagcaccacgaggcagcttacgagagtttgtaggaagagcgttttaggaaatatataatagatagatagatttcatacaaaaataaatatacccttgtaagttgaaaaccataaatctgtgcgatggggctttaacacccatcagtaatgcatatatggtacgcacgtataagaattgaacatagttttacactaatattattaattacaacaaattgatactgcagtgtcaattttccaataactaagctatattcttatttacaagaaatgtaatatatattataaatatatatccaaaggaattaatcgtcaaagtatatatgtatttacatgtttattacatatatatctcacctctttgtgatgaaaatttggctcagtccgtggttacccactgatgttttctcgtgacttttatatctcacctctttaattaacacattctgtatcctttatagtcctgtttgaagagaccatgttttgatttaattgagtgtgtgttttaaatatttgttttcacttttatgcgtattcctgttattttaatgcagtttaatcgtaaaacaagtaattcctgttagtttaatacacagtttaatcgtaaaacaagtactacctatgtttagagtatatgaccggcttttgtacgtacgtctggccttacaacttattaaaagatagtgcaaatatcatttattttgttataacttatatgtgtactatattttgtaataagacaaataaaagatgaatgataagacaatgtgtccaaaagccaactgcttcttatatttaaaaatggtggaagtaccaaactatgggttaatttgtgcagtagtattttccagtgtgaaggtggtaaaatacacagggcaagtacagtagaattcatattgatttagagatgcaaactaatataaatcattccacactgaaggacaataaatttgctatatataaaaatgatatgtcatataagtactacatccagttcggattgaattacaaattgttacaacgcaataacaacatatgaagattcataatgacaacgctacattcagcagaaaatttcactccagataatcacgatgtccccaagaactatttttgagcttttttcgcagagggcctaccaacgtttttctttttgctgccagaagatccaccaacggttttctttttgccgccagaagatccaccaacgtttttcctattgctgccagaagatccatcattctctctcttcctcctaggatttttcaagatttttataatttcttcaaacactcttgccttctcttctttgatagtatcaatttcatcaataaatctcgccatccgcctacttgacattgcagtgaccggtttgttgatgatcctccctatcttcttctttatacttcttatctgtgacaggttaaagaaccaaattaatatcacataaaatgaaatcaacttcattttatatgcaatgaactatgtacaacatatattactactccctccgtcccaaaataagtgcaattttagcactgttcatgttcaacgtttgaccgttcgtcttattttgaaaaagattatgattagtatttttattattattagatgataaaacatgaatagtattttatgtgtgactaatttttttaatacttttcataaatttttcaaataagacggatggtcaaagcgctaagcacggatatctatagctgcacttattttgggacggaggtaatactcaacaactagaggcatgtagatgatcgttttccatgcacatgcatacctgctccaccgagaaggttattagagctttgtcttccccatcacaaaccttgaagaaattgttcagagtctccagttccttgtcagtttccaccgctgtggcgcgcagatactgtatcacctcgtgtggagccattcttgatggcgtcgcctgcgccctcttcctcttcctgtctaccatgctcgggtacatggtagcagtagcagcagagctacctccagcttgctgggtcacttgagatgattccagtatcttcacgtctgcccttttcgctgctggacgactgtttgcagcggcatagaattcttcaactttgaacagtaaggtagcaacaacagcattctgctcatgggctgctggcggcgccggcgccggcaccggcgctggaagctctgctgctggaggagctccgatgaactgtgccgccggcggggacgctgcatctgtagttactgcgcacataatatcaatttgtatgaattaatacacaatgtacaaattaaaatggttcaaatgaaaacatccatgccttatcactcgctccactgtttcagtatcgaaaatttgacgacggctcgatcatttaccgttctcaaatggggctgacacgatcgtatggagcatgttcatttccatcgccgtgtgactgttggccatgtcggtgcggaccgctccggagaagttgtagccagtgtccagaaaatgatgcccagtcgtatcatttttcagcttctcaacgttgcttgcgatgaagtcgctcgcggactcaatggtatgattggtaaggctgaaaacatttgaaaaagaaaattacgatatagaaactgttctgatcccttgagaggttgtctcctcgcttgtttaaatccatccaaaaagatatgagaaaaagtctcaaaaatttcgacaatattcatacaacatatatatatacaagtacacaacatcatgcaaactccactcacactaagatataaaaaaaaacaatgcaacaacgaatggaggtgaaggtgaaaaacaatcaaagtatttatatggtttcacaagaaggtaatcctaacaatataacatttttaaaaataattgggggaggggggataagcaatgttgtttttcatgcacaagagacaattcaacgtcttctttttgaaagtcacatagcacgatttgtttgacaaagtgttttctttgcatccaatattcccactcctcatagtgctcaaaatatatttgaaaattggcttgtcaagatacccaagtccaaaaaaaaaattatgatctgagccaatgcactatgttgttcaatttggcgttgcccaaatggtaaatctttttgtaataaaatttcgctaatcctatagagtaggttatctttatgtgaaccagctctacacttggtattagaagtaggaaactatgcgtagttatatatactgcagttggaattagtagccaaatggtattttgttctgttttatatgtctttgtacctatagaattacttactggaatttgtgtgatttgtcttagcttttaattcaaatggttatcgttttagaggagttggggacttgtcccatcactctatatttttttctttttctttctcaatactaaaatttatttgttgtatccgagttggtagagaccgggagatataaaccacttctattaactaaaaaatatataaaaaaagtactattcatatgatgaatttatcttttatttactgtgcaggacaaacatgaacgtgatttttggagtgatagacgtcattatactcactattgtcaattttttttacactatttgtattgaatttgaaaaaaaaaaggtacacgaggagagacgtacatctcctcaagggattataatctgttttctcggtaacagcgtgtgattgttgggaattttatgaacagccggtgttggggaaaaaacattggatacaacaaaacaaagttaatttaatttgagtcgatcccttactcgaagtatagcagttgtctcccggggaagtgtagtccttcagcaccagtagcagtgtatctgcgatccacaatcgcatgttgaaatgatccaaccccggttgcatgaaccaagaagtatattgtccggctagctgcgcggcacaaagggcaacaatttcacaaaatcacacgccggacatctattcataattcattatcaaagcaataatcacagtcgacattgccaagtaattctcattttgatgcgtattaatctgcacataattaaacacatgaaagcatatgaaatattgatagaacttatttaccgtttgcatgcatcatctccctgacaaggtggcagttggagcagtccagatctccggcctgaaatgggacgaagtcggcgtactcatcgacgacgacgggcggagcagtgtcgccgccggcggcggcgccgtgtgtgtcttggtcagcccacatcaggacatcatccatgtcgacgtcgcccatgtcgacgttgaagtccatgaaattgaacatcacgggggagcatggagcgtcccgtgatggggcggccaagaacaaaccgtcgtcaccgcctgagggcgccatcgtcgtcgccggcgccggctggccggcgaagccgtgcgccgccggcaacggagccagcggttgctgttgctgttgctggtgatgcatcaccggcggcgacgcctgaacctgatgagtgtatccaccggcattcatcgccggcggcggcggcggagactgaaaattcaactcgggaaagaagtcgagatcgacatcgaagccgagatctgcaagcaccgggttcccgagaccgaaatccgccgccggagcgggctcgacgtgagccgtcgccgccggcgccggcgccgtaggaagcggctcgacgtcggggaggacgggcaggggcaatgtggtagccgcttctgcctcaccgaacaagggaagaaactccatgtcgtcgagcatgtagcggctcacatctccattggagtcgtagaaacggtgctcgccggccatggagatggtgatggtgatggaaataaatcgcaaaggcggcgcggtggggagcaaggagagagatcgagtgagagagagatcgagagagtgtggtaagttagggaatgagttggggaatatatatatatatatatatctcgcgagcgggagggggtggtttcgaacggatcgaggcagcggttggcgatttcccctcgcgtgcgcgtttctttcttttttgaggtttcttttcggccgtcggatgcgtatcgggcggcgcttggcgatggctgcgggggcaagtggtgattagagcaaaggcggcgcaccttcttggattttcaatttagccattttgggcaagtttcgggatgtgaacatgtccttgtcataacgtgtggatggtagaagagtgagacttatataccagtgactgtcataacatgtggatgatagaagagtgagactcatatactagtgattgtcataacatgtggatgatagaagggtgagactcatataccagtgactgtaatgacagtaatattattgtcgaggattctcatccaactattatttgcctgatctgcgttagaataccaattatagatggagcaaatatatggattctcgttcacacatatataaggatgaccatccactccttaccagtataagctaatcaatacttcaacatataaatctgaaagagcataaagtcagaggttgtaagcctaaggccatgaggtaaccggtagtagttgcagaaaaaaagtccaaatctgaaataaaagtttgaaatgaaaatctttaattagataagaatgaaaaaagaagctgaaaatcagagaaaaaaactttaatattggaaaatagtgataaaattagggaaaatcagaaaagtaaacaaattgaaagtactacgaagaaataaaaattactgagcatacaaaaattatgagaacttatcaaaacgatccaaaacctaagtaattgttttactagtttgaaaataaaaacatctcaaaaaaaaccaccacgttcattataaagtctagtaattcctacattaatcaaagggaaaagtatgcttttagctagaaatataatttagaaataacttaaatttggaataacgaaaactgaaagaagtgtctaccaagaagacaacacgatattaattaaaatttaaaataaaaataattgcaaaattatattttaatgtgaatttaagtaggaatatataatatagaaataactgaaattacaattaaaaataaataatattgaaatataagtccatctggaacacaatacatgattagttaaatatctgaaaaatataaaataaattacaaaattggattttactaatttcaaataaacttaaaaatcacaggttcacctctgacagggtgtttcagtgcccattatgcatgatcatcggtgacggggtggagtttagaaccgacaaagatgtatgtcatcagttacaggtgtttgttgcgacccgacaccgatgaggcttttcattaaaaaaacaaatcggttttattggctagcctcaaatgctagccacgcccgctataaaattcgcagtattcctgcaacacataacttcccccatagtcccatatatttgacattcacatacaaaaataagattcagaaacgaccacaacacataaattcaaaacctcagatgcatgcaagtctcaatagttggattacctcaattttttcaattctctcaacgaccaatacctttgatttcttaccttacaaaatcaccgaagcatcttcaaatgagaaccatcaatcacaacatgtgaatgcagttataatttaaattaaccaagtgatgaatatattagttaatatgaatattaccaatgtacatacatataaacagaagccaagaaaaatcgttttccaatagagaatgtcacttaatcatccatttaacacatatacgtgtagctatcctatgataattcagctactactttgcacaaaaactgccctttggagagacaatttttgctaggatgaaggcagccaattcatttctaatatcctcgaaattatgctctagaatgtttgtaacaactgttggtatttaatacggtcacagataaaatccgcaagcgtacggatataccgatgtagcacttcccctacggagtatttcaagggtatcgaatccaagaacgtgtgtggtcaaatcttcctccggttcatccaaggacaccaaccaaatgataggccaggatagagaggatttactagtgagaaacagtgtctagggaaagcttaactttaatcctaacgcaatacttcaggcacaggcaacccgctgttcccagatgtcgctctactacgtacccggacagggaggacttaactaatctcgagggctgtcaccacctctacacctacctcaacacactgtgggatacgcaacaattactggataacaattacctaaacaccacgtctaagcaattaatatctactttagtgtttataactcaccaaagcaatcactatattttaattaattatagtgaacaataatcccgtatgctatttacgaactaaccaagagataattctcacaagataaatctaaattactcaagaagaatattatattgaattcagagtaataaatagaaaaaaaaataggagaagattaccgacaactccggaattcttccgactccttctactctacacttttcctattctagtatacaatataggacaatagagcatcttgtaattcagctcaagcttggaagtgtgtgtgagagtgaatgaagtgaggtccttttatagggcagttatgacggttgtgagaagggaaaatgtccgaactgccctgcaaccgtcattgggagaacatctggagcgtccacgccaaaccccaggatcaacggtgatcaggggggttcggccgaacctgggctgggccctcttggcctggccttcggtcggtggactccctgagacgtcctctatccatttctcggagttttgggttgatttactaatgtttcgatgaagttcacaatccctccttgtatggatacataattctcctcactcgagtctgattttcctcccaacactggggtttattatctgcatacaaatatataccaacacttgtgtaatatttgagatgaaacacctatcactatgttggatgttttattatccaaactttatgcagatgttggcggtatagagtcggcatttaacagccgccaacaacaacctcctgaaagagaggcgttaagttagtacagatcctaggtgcaaccataccaacgtactaatttgttttcccaaatcaatataccacaaacctcgggatctagcgcagtcacctgtcctgtgaggaccttcatggtatggcacacgtggaaaccacaggtctcgctggattgttgcttgcatttgaagtcgtcatggtgatagaggttggatttttccttcttgatgcatgcccatttttgcacgtattagtcccatgctgtgttcaatgcctctttgagagcgttaaagtcatatttgtcgcttatgcggcagttaagatagtaaaacctactccattttggcactatgcacaatagaatccaatggaacccgcaaagttaatatagtgtaagttaaaaaccacacttttagatgtaactagatgatgccccgcgctttgttgtgggatatatgttagatattggagaaacgatgaaatgatttggattgaaatattacgaaaatgatttgagaatgatgatttagcatgtgtatgtctagttttagaatgaaataaattatatatataaataattattactgcctccgtttcaggttataaggggctgtttggttgctatcctgaggagaactagcctgacacggttttggtcctatttggttgctggcctgagactgttttcccctcgcctggcctaatgcatatctccgcgcgtgattagcctgagtcaggcgacttatttcggtcgcgtgagctccaggcacagcagctagcgagattaccgtcgtataattttcctccgtcctccgggcaagccatcgctaccgtcacgcaagactccgccgccgctgggcccgatgtcctcacccgccatcgttgtcgcatgcacatgaaaagcttgcctcttcctccgccaccgccattacgcgcatgcagtgaaaagcttgcctcttccaccgccgccgccgtcgcgcgcatgcagtaaccttgcctccgccgtgggaagccaccactagcttgccagatccggcgtcacacaaatctgcggtgaagtatctcaattcgtcggttccatctgcgacccatctgatctcccacacgcagcagcaactgtcgctgatctgccgaaacaattgaagcactttacacgcagttggagtcttgaagaaatcgttgtaggtttgggcatttatgttttttcttttttttcctcttctttacgtacgtgaagccggcaaaaattattaggcaataaattgatttgttacagttagcacttagcaatacccatctaaactgtagattctttttcctctcagacaactgtccacaaccaaacaagcaaaatgtcaggctgcctggccaggcaagtttcatcaacttctcctatgcctttcaggcacacaaattcctcaggcatgatacttagggcaccaaccaaacagcctctaagactttttagcattgtccacattcatatagatgttaatgaatctaggcacatatatatgtctagattcattaacatatatatgaatgtgggcaatgctagaaagtcttataatgtaaaacggaggaagtatacgcttgcatgttgagctttgtgtgcttaatgggttgatctggcatgcttacatgtaggttttaggagtgctaataaatactatgcttgcatgttgagctttaggtgtttagtgggcattagctttatagaaagaagggattattaattatttagcatactcactattgattgtgtgctaatatgatgaagcctttgtcctagtgggccctcaagttgttcatgatgtaaccgaccacatcatccaatcaagacttaagttgtgtctcattgacttgacgtggatctaggaatctaacttgacttctggtcttccgtgcttccatccaacataaccttcaaggttgatctgtatggctagaagcattctacatggattgttattagctaagtttagtgttattagtacttacaatgagtagcactttgggagatcggtgtccaccgctcgtagcctaaagaggttgaaaagatcagagaagcccactatgatataactgggtggccccaggaagggcgcttggtcatgatgacccagtatggacatatcactattcttcctcttggagttcaatttatccacgtagtaccgacgcagctctcgagtaatagtgcccattctggctaattcattgtcttgatccaacggcatccctggccagaatgtgtcgtgatctaggatcttgagagcaacgtacacctccttatctagatctagccgtttgggaggtaaggacgaccctcctacctttccttttcctttcaattttccccttccatgatttggcctgctagacaccatcggtggagatgaattggccttttcttttctttgaaggaggacgatctatggccattccaccaaaatccaagacgtgggacccaaaaggagcttcaatggccatctgaggtgcatgagctttagctgaccgagctagatgagttgggcctgctgcaacatttgaccttggaataatctttgtggtgatgaggtcttttggccattggataaacattccacgtgcatgagcgagtgtaagtatctcgtcctttggtgggattggtagttgccaattcagcaattgtctttgaccatgtcaacttggactttggcatgtccagctaccaaatccacgccgtacactcttgtttctggagtagatgttgacggtcgttacagaccaattttgaccgtcaatataactaaaataaaggagaactagctatgcttgcaatacatatttattttagaataatatatttccacttgtacttggagtattatttgtttgcagagattagcacatgaataaagaagaaattaatgaaaacttcactcctaagcaagcttaagaatacaagggcccacatgtcaggtgtaaccgtcctggaaaccgtcataactgccacaactgccatgaggacccatctgtcaaccccctgaccaaatctagaggcctgctgggccggcccaggttcggtcgaaccctggtagcaccggctcagctcagccctccacatggacgctccagatgcactcctaatgacggttgcagggcatttctgacaattccaactgccataaccatcattgggaggctatataaaggggtcactttcttcattccaacacacactcaagcaagaagctttgatatctctctctctctctctctctctctctctctctcaagtttagttaatgctctagtgctaagtggagtagaataggatagttctcgaagtcctcgagtattcagaagatttcagtatggctctagtagcttttctttcttctttcgtaagactctcggaattaatagaatattcttctttatataccttcggtactttactctgtctgagtactggatttactttatatttgtgccgacatagttgtatgactagcctaccagagaggtgcagtggtgtgggtttaatgttcatggaaatgattgatctatgttattctagaggatatagagtaatatttgataatgtaagcatggtgcttagattattagatatcattaattgggcatatatgctgcaggacagtagaggtgggccgctgatggtgacaacttagtacgggtattcctccacgttagtatatattcctaagccaatttctggggagggtactcctccgtatttagctccggttggacggccatgacaggttgttataagaaactcagcaacccgaggtggtctctggaagctaaccaattgttataagatactaacaattgtaaacttttactttgcaagagctaacatgtgatctattactaggtttgtactgaatttatattttcgtttgtatcttaaaagaagttcagaagtggcgttgtacagattctttctttgtatctattgtggggttcataccgtatttacgtttcctgttacacaagcatggcttttttcaattgttcaaatcctattaagaaccatgcaaaaaaaaactattaggaaggtacagccatgcatctatggaactaagagttctcatgatttggtttctctttccaggtgctttctcacttccaatctttcatggaatggcatccatattgtgtattattaatcatgtcataagaaatggatcatttcaccaatcatatcattttattgtatacctctttgatatactaacattttggtgtcatttagatactggggtttgtcttcctgcttataaatactttgggatctatcaatcttattgtagactgcaaagcataatagaagatctaagaagatttaaaggtgacaactgacaaagtaagcatcatgatctgcaaaagatattcaggtttctcaggggatgtttatgcagtcatagcttcatcagtattcagagcgcacttcttaacctgtagatcttggatctctaatttccatttgtatcagctacgttgtgtgtttcaactacatactatcttattttctgagattttgtgggagtaagggtgtgtctctaaggtaatatttatcttgactttctgttcaattctagaattggttgattacactgccaatagaatttactaaaatcaagagtaaacatctagagacagaaaaaatctatatggaaaacagaattttattgaaagaaagagtcaaaatccaatgactaccctattgcattcttacctcttgcctattttgctttaatttttatctcagaccagaccattgattttattccaatgcaatctcttcaatttttgatggtttctcattgttaatgtggttcattttcttttgagttgattcgctctcaatgtaaggcattcattatcatgtaggtactgagtgttatacttgatttatcctgctaaaatatcagctcatgtgataagatggctaaataggctccttttcttccaaactcaatcttaatatgaacagatgtgctcagggccagtcctatgattttgagggccctaggcgaactcatcgtgatgggccctctaagctatatataaaatttattgatatatatatacgctaattttacttacaaaacggaaacaagtacatccatatattaaatttaatatgcttggtaattatcaagaaataaagtcgaccaaaataacaatatatttgtaacttggaactaatatcattattcattaacttaatgaagaatagaaccctattccattgcttcctatgaaaagatacttcttctgacatttcttgatgtaaaatcatcaagaatggtattaagatcaatattgtccaagatatcattctcgattgagtacatagccaagccatttaacatttcttgcgacatagttgatctcaaatagttcttcaacaacttcaattttgagaaacttctttcagctgaagctaccgtcacaggtacggttaagagaattcgataggcaactgaaacatttgaatagaaatctgcatccataacaaacttcagaatctcaggtgcggacattgaagaatctagcaaactcacttgcaacacctttaattctaaataaaaatcattgatctcaatatcggatgacgtactagattactagtattaggtgttggcccctcaccattatgggtccccggccgtcgcctcggctgcatagggccagggccggccctggatatgcttcatttatatgctagccttgaggttttcagaccgtcatcggcattaagatcatcaaactgcttgtcataatagtatagatttaagtatcaatatgctctgtcatagccatattatcaagttgacctgacttttttagttaatgaaaactttattgaactcagacaattaaagttgaccaaactatgtgaggtccacctttaatatacatctagatccttctttgatagcaaggtaccacgcttcatgtaacaactctgcaagctatatgacaaattggtcagatttaggtataattttgcatgcttatgcatgatactttcaacgtgatgcttgataatagttggattatcaagtttgaagttaaattcatgtcaaatatgcatcatttattgactcaggtatccctgtatgcagtgtcctccccgattggattttgagcagcgtgagtgtctcctggcacagccattatatgctctgctagctccacttgatatccctgccctggcagtgagcggcaaatacaccaacattttgcttagatgttacaactggtgtaaaagaaattatgattccacagcaactgggtacagatattattccctgatatattttgggttgttgctgtggaatgaagattactcacagccgtgtccagtcgagccagcctcttccggggtaccagaactactttggcaaggggcagcagccaccttcccactaccagccatcacaagatcaccaccccaactccacgaggatgatgacccaggcaatccgacaagcttctaaggtgctgattggatgctggtttccaaagattagttatgctgtgcatcatggacaaattatgttcatgtagttataaaaattttttagcccaagaattagatggatccgaacatatagaagttgtgatgatatcgtgtggctatgtatttaataacaaaataaaaaataagtaatggttacaagagtctcagtagcaccttagttcttgggtttgacttcccatggaaacgatttttttaggttttaacggtattgtgctttcagtgataggcgatgtacccgtcaacagcgaggcacctgtggtgacttcgtcaatattcaggatttgccgcccatgggaacgatttttttacatgcattttaaatttatctaattatatgcttgattgcgataatatatgatctctttagtttatttatatgcattatcaaatattacggtagtgttagcacagacaaattactagttttataaattacactataacttacaagatattacactgtgaatttgataagttcacagtgtaatttcaaaattccattataagttttaaagtacaatgtaagatccataagtattaactttgaatttcataagaaatcaccataatttaaactttcaattttaacatcccagatagtcaccgttgtacaatcatagcacaggacacacattaaaaactaacaggcatattcttttagcctatgtaggccagccaacaaacttccgttggcccatattgcttgcatgttaacccatcaactgtaggcccatgtccgaaggacagttggcccatgaaaacacacagatctagggatggcaacgaggctgcacccgtcgggttctactaccccatccccagagtgagaaaaatattccgtcaccatccccatccctgcacacggggaagatttctcctcgtcccgtccccacttgggtaagaagcacccgctgggtgcccatccccgaaaattatcagcaacatcaatgctatacggaagatagaaagcagcaagaagcataccaatgctatactccctccagtttcattttaattgatattttagacaatgacacggtttacaaaatatacctttgatcttatttttctattataatatatataataaataaatgcatgtttatttttattatagtgtatcttattctagtttatgtaaactaaatattttaaaagttattgatggttaaaattataaaagtttgaccttaaccttgtccaaaacgtcaattattatagaacatgcagcaataatgatttcatttagccatcggcaacaacaatacatggctaaacactaatgtacacagagttgctagaaatatggcgccactttttgtgtaaaaaaatagtcaatttttagaccctaggatatgtttcaagattcgtgcgagtgctctccaagagaaaacacgatcgataagttacagcaaaaggcttttgaccaactgagcacaaagatggtactcgttctttactcaaagtaattataattaataaaaattacactatagtaacttacatgccacttacattgtaattacatactaattacatatataattttaggacttacatatgtaattttgaaacttacagtgaaaatatattaaaattatatatgtaaattttagggacttataatgtaaatacatatcgataaaaaatacggtgccatgtatatagatagtcccataagaaaagttatggtgagaaattgtgtttaatactataattacactgcacttacaccttacttacattgtaatttatattaaaattacactgcacttaagtgtaaattttgtgatcgctagttttctatcttaatttaatttatattgtgtattataatcaagttacttatttgctatattgccacggctcgttaatggtcaactttgtgtttgaaatggcggtaatcagtgtgaagtccaatccgagactaaattttgtggcgtcatatatatagatggacccgatgaaaatcgtactttagcgtcaacaataactaacggggctgtctatatatcatgtgacggaaaatctcacctcctatcattcaaattttaaaccattggatgtgctttaagattcatgcagccccttaaccctcactcctcctcctcctcccccggtttctagatcacgccgccaccctccttctcccgtcccacgcgcgatccgccgccgtcaccactggcaccggcccaccgcgccgccgnctgccttgtcggctggccggaaaaggtcaacggcgccggggagggccccccggcgagccccctccctcttcctcttctttttcctttctcttttccttctcttctcccttcttcttttcttttcttttctccttctccccttttctccctcctccttctcttcttctcttccctccctcttccttctttcctctttttctcttctntcctccttcccccttctttccttcctctctctcttttcccttttcctccnctttcttctcctttcccttccccctcccc

SEQ ID NO: 9095 - DNA, 22479 bp, Oryza sativa
  unsure (1)..(22479): unsure at all n locations
cccttgtttagattcaaactttggccgagtttagttctaaactttttcttcaaacttccaacttttccatcacatcaaaactttcctacacacataaacttccaacttttccgtcacatcgttccaatttcaaccaaacttccaattttggcgtgaactaaatacacatttttcttcaaactttcaacttttccgtcacatcaaatgtttagatacatgtatggagtattaaatgtggacaaaaaaaaaccaattgcagagtctgtatgtgaatcacgagacgaatcttttgagcctaattacgccataatttgacaatgtggtgctatagtaaacatttgctaatgacagattaattaggcttaatagattcgtctcgcattttacaggtgaaatctgtaatttgttttgttattagtctacgttttcaaatgtgtgtccgtatactttaaaaaattttggcacacgaactaaacacgccacaggccgtgtttagattcaaacttttttccttcaagcttccaacttttcagcacataaaatgtttggacacatgcatggagcattaaatgtggaccaaaaaaacaattgcaagtttgcatgtaaatcacgagacgaatcttttgagcctaattacaccatgatttggtaatgtggtgctacagtaaacatttgccaatgacggattaattaggcttaatagattcgtctcacagtttacccgtggaatctgtaatttgttttgttattagtctatgtttaatacatcaaatgtgtgtccgtatacttaaaaaaattttagcacaaaaactaaacacagcccttataggaaagttagatgtgatgaaaaagcaaaaagtttaaagaaaaaaattggattctaaacaggcccaaaccaaatatcctaccatgaacacagcgtcaaattttgaaaagggaggaaagttaatatgcaacttttgcatggctgcatgtcaaacccgtaacagtccccttccttatttaaaataaaagagaaaaaagaaaaagaaaatgtgaataaatctgcaacgttcacctgtggagtccgatccaatccaagccgtaaatacgaacgagtcttccatcggaaggaaacccgccagagagagagagagagagagagagagagcgcaacggcctcctcgcaccaaatccgccgtctctgcggctcctctccttctcctcctgcaatccaaccgccctcaaaaatacttgcaacccccactcatcgtctcccctccccgtctccacgccatgtcgtcgtcgtggttccactcctcctcctcctcctcctcctgctacttcacccaccaccaccaccgccacgtcgtccaccacgcgtcgacctacttcgacggcgacgacgacgagggcgacgtcaagccggcggtgacgcagcactggcgttacgacgcccgcgctgcggcctcctacggcggcggcgaggatgtgaagccggcggtggtggtgaagcagccgccgctgcctcgcccgagagtgggaaggggtgtccacgaccgcgcggaggagaccacggcgctctcgtggccggtggtggagcccttcaggtccacgctccgcacgcaggagtcgctcgccgggatccgcgccaggtacagcgtccccgaggggttcggcctgcaccccgccggggccaaccagaccgcgtgcgcgccgcctccggtgactccgcgtggcgggcgcgggggtggcgcggcggcggcggcggtgccgatctgcgtgtacgcgcaggcgttcgcggcggggatgcgcctgccgctgcacccgttcgtcagcgacgcgctggcccacttcggcatcgcgccgtcgcagctggcgcccaacgggtggcgcgtcctggccgggttcgccgtgctctgccacttccgcggcgtcggcgcgccgtcgctcccggtgttccgccacttcttcaccctggcgccgctgcccaaggggaaggggtggtactccttccgcgccagggagagcgtccccgcgctgttcacgggcctcccgtcctccgtcaaggcgtggaaggaggagttcctcttcgtctcgccgccgcccgccgcgccgtggcgctgccccgtgcgctggggaaccccgtccaaggaggccacgagcgacccggcgctcaccgagagggaggccgccgtggcgcggcggctcacgcagggccaaggcgtcgtcgacctcaagacctacctctcggagagcaacctcgtcgccgccaagatcagcagcgccccggcatgtctgggaggtacggacggacgatcaaatgccaccaacaaaacgtacatcggatggtgcagattcctcaattgctcgattgttttcttctttcttgcttccagggacggaagcttcacggggttcgtcggtggcggccgggaagaagaggaaggtgctgggcgatggcgtcagcaccggcggtggcgtgcttcggtcagagctgcaggcgaaggacaaggctctggccaaggcgcagggagagatcagccgcctgaaggcgcagctggggagcgccaaggcgagggagctggaggaggcgaggcaggcgttggagtacgagcggaagctggggacgcaggtgctcaagtctgatggcgccgccgccggggccagcaagcgtcgccgtggcggccagtgatccacgttccgccgctgaacgccgccggccagcgattcggtgatgtgctaggtatttactagtactactactacttgccaggataatgagtagctttgcggagtagtgttttagcaaggacctttcatgtttcttcataatcagcatcagctgtgacagacagtgctgatcttggttggtatcatttcgcaacaaactgctaatggaaaatctgttcacagacaccaggtgatgttatgaatcgcaatctgcttagtttatctaccatgttaattagcagcagaaattgctagctactggaatgatcatgggtatgagggtatcccactagttgagcgaaatgaactaaatacatagataatatgcatcagaaagaacacattttatagctgatcttgtaaaacaagagcaaggtcaagttgggtaaccacaagtgaaccgcgcccatactatcgccaaatatccctgcaatctgccatcttccatgaacacaacacgagcatcaggcttctaaaagatggtattttcacagcaaagggtcattataatgttattccacaagtacaagggtagattctgccaaaaatattcatccagttgcaatcagaaagtgtccccaaaaaaactgcttgctaccttttttctttgtacatgttcagccgaaatgttactacagtaattgcaattcaattggtccatatttgcgctatacaatgacactacagctcaagatgagaaaactaaatgcccacaaagattatccaattgtatgtactccaagatttggctagtgcatttgcacggtccactccagctaccctttactcttatcattgctagttgattcgttgtcacttgttgaatctgtggagctattagatgatgccattgtgttggactgctcactgattttctctgcagcgctgctggaattgtcatcgcccatgatagaagcaaaagtgagctggagaccatagagtactaatccaattgagttgattccaaacacaaatgttgctaggtagcatatcccatttataattgttctgcagagaaaacgtggttcattcattagataaaaggattacaatatataacaaacaagagaacagtgaatgaatggagttgtaccttattgttattgttatttgacgaacctgcagaaaacaaaaggaggattccattagatgaattgtgctagttacaaaaaatatgacgaagactgaaattcagttcctctgtaagtatatggaaagttggtagcacgaaatagcacattttacggtgcataaatgtgttaaccgacccacgggaggacaacaagaaataatttttgttgcagctctcttagtatttgttccctgcatcattgttgaatttgtatgtgttggtaaaacacaacaataatttgcattttccatgccttattctccatttgtgaaataatattgaaatgggattcaattccttgctgtaaacttcaaggcacattggcgacaaaaaaatggatggtgattacagcagacaattactcaaagcattgcatagcagtagcgctaacttctactagaccattaacgaaggataacaagaaaatggcaggtaataatacaaatgaagcaaacttcaagttggaaaattcatttgaaaccaaaaaaatgtcaaaaacagcataaggtagaggggttcaaattgctcaaaactaatctgcaatccttacaagaatatagaattattcccacaaaataagtgttaccacactgaattatggtccacactccacacttcatcagagctgctacgaaaattgaagtgtcgacctagggctgtgttttgttcaccacaccaaaattggaagtttggttgaaattggaatgatgtgatggaaaagttggaagtttatgtgtgtagaaaagttttgatgtgatggaaaagttggaagttcgaagaattattttggaactaaacacggcctagataacatagccgcacaagtttcatcggcaaacttggcctgcaataaactatttttgttgaagtctttatcacttacactttcagcctttgaccagaaaactgcatagctctaacacaacttcacttgtgccgtgtttagttgttttggcaaaaaaatttgacgcatacggacacacatttgaagtattaaacgtagactaataaaaaacaaattacagattctgcctgtaaactacgagacgaatctattaagcctaattaatccatcattagcaaatgtttactgtagcgccacattgtcaaatcatggcgtaattaggctcataagattcgtcttgcaatttacatgcaagctgtgtttttttgtccacatttaatgttccatgcatgtgtccaaacatttgatgtgacgaaaaagttgaaagtttgaagggaactaaacacagccttaatggtttatgtaaaccagcattcattgtccactatgatatattgaattatcatccatgtggttagttcacaacctttattaaattgtccacgactccataaaatttatttgtagctattcacataggttcaatggcgcatagacatggcaaactagttccaaacaatggcgtatatacaattatacatttatttgtcggaacaacaaaaggattaaccgataaagtgaagtctgacaaaaatcaaagcaacacagatacttgtcatcacagacacaatcggacacatacagcacagcctcaagatccctgttactcatgctagatttcctccaaaacttatatgaatttggcaattccaatggaagttcaaagggttcggtcctttgttccaaaggagaacataggcaaatcttcctaaaaggatattcatattctaaaaaatttctcaaagaaaccttagtttgaaaggagccctaaacagcctaaatcaatttaatgtgctgtaaaaaaaacatgtatattgttgcaacaagaaaaatactaaaatattgtggagggggaagagagctgaccgagaagctgtcggagatggtctggcggttgagcgcggcctcgatggtggtggtgaacttgtagaggatgagcgcgatgacccccgcggcgatcccgccgagcagcgcctgcacgggcgacggcggcttgtcgacctcgatcggcgacgcgctcaccagcctcagcccctccagggcctccttgctcaggttgttgggcttctccaccccgccggaccgaaccctctgtgtcacggaagcaaaaaggatttttagaccatttttctccagtcgagaaagcgcagcgcaggtggatgaggagggaggggattacgagctccttggcgcggcggacgcggcggcggatggagcggaagaggaagacggagatggcgccggtgaggaggacgctggtggcggtctgcagcggggtggggttctcgtcgatggagaagagcgtcggggtgcggagctccacggggccatctccctcgccgtcgtcgcccgggggaggctcggctgccgaggtggacagctccggctcggcgcggacggcgacggagcggcggaggcggagggcggaggcggaggcggcggggaggaggtcgcgggacggggggaggaggaggcggtggcggaggaggaggcgcggagaggagtggagcagcagcatggtgggagtggagagctgcttggcggtgctcggggagagagttcagtggataacgaacgggtcgggcgagaaagggtgtgatgaattattttcatttctaaatttttattttttaatatttacagaaatattataccatttaaaatatttacagaaatggcccccctgccgccaaagtggagagcggcaaggtgtgcacatttttcattgaggtctcttgccgccctcgtacaaggggctaaatgcaattttcgccatgttaaaaatgcattttgctaatttttcttttgcatctcggctgtctctcacgtcaccctgggtctatttttgtaaatatttttgccggtataatatttctgtaaatattaaaaataaaaatttaaaaatgaaaaaaattcaggtgtgatcggtagatgggctactttgatggaccgaggccttctccatcgtttcttggtggtggcctggtgtgcgtacggtgggggtgggtgctaagggacggggaactgacggaaagttggagaaataagtttatattgactccctcaactcatgcccctcattgaatcgcatccctcaacagtaaaatcgggtataacccattgcaaatcgactccccgagcagtttcgaaggtggttttatcccacgtggcatctttgcctccgagcaacgaggtaaggaataaaactgcagacgcagttgaacggtggtcaggctagctcctgcaacaaattggtattacaatgtcctaaccactttcatttcgtaccaaggaatctaattaaatattataaaatctatgtgcaaccttacaaactatagtccaaattggtggaagaagccttatgattctattttctccgtttcataatgtaagtctttctagcattgtacatattcatatagatatcaataaatctagacatatatgtgtgtctagattcattaacatctatatgaatatgggtaatgctagaaaatcttacattatgaaacggatggagtatctctcaagcagattgctagggtggacatctagtcaaactatagtgaggataggctcaaagtttaagtctaagagcctgttcactttgatttgatgttattttcaaccttaccaagttttggtaaagttgctaaaaaattggctacatttagtttactgtcaaatttttaaattttggtaattatataagaaatgctgtcaaaattttgacaagttgtcaaaatttcggcaactatgccaaagtgaacaggccctaagtcaataaaagcaaagtaaagtacgtacctttacctacatcgaattcaatgttaacataatcaaatagaaaagaaaacggaggagtgcattgccaacataaaagtgcattcttgattagcaagatactagagaaaaatacagaatcctcattggttagcacaaggccattagctaattagcacaaggttattagctaaggagcgaacgagatgagcagagtagcaataatagactagaaccagttgacttgcccatgccagtgacttgcgcctgcattctgctggtagcctaatgcctcgggcactctcccctgtgtggtcgcatcgccacctcacaccatctgcctcgtagatttcaggcatatagcctccatcccaaccctagcccccaaataccaaatgaatgaggggggttcctgttacacgcttaagcgctagcatcagaggcagcgcgcactttcacggccctaagagcgcttagcgctgttttttttttataagaatgcgtatgtttcttccctttgtttaattaactgaaacaaactttcaactttgatttattcaagatttggaaacttttcaactaatatttgaaaactttcaagtctagatttgaacttagatttcaaaattttcaagccaagattttaatactttcaacttaaatctaaaagttttcaactcttattttaaaactttcaaatctttatttgaaaaatttcaagtcaatatttgaaaactttaaactcaaatttaaaaactttcaactaaagatttgaaaacttttaactcagatttaaaaactttcatctcagattcaaaaacattcaactcaaatttgaacactttcatctaaaaacttaaaaacattcttctcaaatcttaaaaactttcaactatttaagttaagatttgaaaactttcaactctgatttaaaaactttcatctaaggttcaaaaacattcaactcaaatttgaaaactttcatctcaaaacttaaaaactttcaactcaaattttaaaaactttcaactcaaattcaaaactttcagcagcaattaaagatgaaagattcaatttctaaaataaaaagatcacaaaaaaaatcggcaaaaaaacatttcacggcgcggcggaaaaaaaaagaagcgagaaaaaaaggaaaaaaaaggaagagatgggacgcgcgtgggggtgggccagaaactcgcgccgcttgtgctaatagcgcatacgcgctaattagcaatttcgaagaatgaggcctggtttagttggggaaaaaaattttgggtttggttgtcacatcggatatacggaaacatatttgaagtattaaacatagtctaataacaaaacaaattacagactccgccagaaaactgcgggacgaatttattaagcctaattaatccgtcattagcaaatgtttactgtagaaccacattgtcaaatcatggcgcaattaggcttaaaagatttgtctcgcattttacatacaatctatgtaattgtttttttcctacatttaatactccatatatgtatccaaacattcgatgtgatagcgtgaaaatttttgttttgggaacaaaacaaggccgaatcacgcctcgctgctacctctaacctcctacccccttcagttcctaatttgttgacgttttagacaggattacacataccaatgagtgattaattagtgttcctacttcctgttttacccctaacaaatacggtttcgaggtacaccaaaccacaacctgctcttggtttgagtggccatcgcatgcaaaactaaagctactagtcctaagttcgattcttggtgtccacttatttttgcactcatgcacaacgccggcagcgtcaaccacaacggcggcgccgtccacctgttgtgcgagcttcaccaccatggcgccagcgtcgacctactccacggcagcggtggcgtcctgcacgacctgctccatggcgaaaagtagtgcaaggaggcgaatagaaggcagcgccccgcgcagcatgcatgacgttggaaataatgggagtaatggccggctgcatgcatgcagggcaagcaggtccaagatgcaaaaaaaaaaaaaaaaagctaaaacgtcaagaaatatcacacaatacaatggttcaagagctaaaacgccaacaaatttcaaaccggagagagtagtccaaaagtacccaagtgacctatgggcccgcactatgtaacgccaaatcaaccaatttgaccgagcgcgtaccactttatcttctccctaatacagatcatcctcttcatcttcttcgataagcccaatatagatagaaagctctcatgaatctcaaaattaggatatacgggtctacctgctggcttcatccctgcttatttgtaataaataaatacgaaaacggttcttctcattttcctcggtaattttcattttcatttttcaatgggcatagcatctaaagtattaaaacctccccccgctgctcgctcgtccgagttttgcgctggcgtggatgctgccggagcacggcacgtcagcgcgcgtgggacggcgagtagatttcacggcctctcgtgagtccgcgatgattctgtgaactttgcagaaaagccctctccgttatagctattttgatatatgtcctcgccgtacttgttcctgtttaaatatattacgtttagacccttctatttctacgaaatctaatacgaacgtgacaaaaatgagaaaaaaggaccgcgccctgaatcgtggaaactgaggggtcttttcgtagaatttccttttcttacacgccatctctccccctccggaaacccccagccgcgtcaaaaaagaaaacgaaaaagaaaacgaaaaaactcccggccgctagggttccatcgccgcactcatctctctcgctctctcttgcgcgatgcgtcgcgccgcctagatctcacggagccgtggccgccgcccactcttctcccgttcaatacgcttacatttaagaatttaccacttaattcgtaagccattaagattttaccactaggatagcgaatttcttcatttcataccactcccgtcaaatttacagctcatccatctccttcgttcacactagtgtagggcgccaccgtcaccatcgccgggccctcccttgccaccatggcgcgtttctttcgccttcgtttgtcatccccgccatcgtgctcgaaggccggagctgcactccatgccattgcgctcgggtgagcataccagcgagtgatgatggcggtggccaagttcgagtactgcacgggtgcaacgacaatggcgtggtcggggatggcttcacgccgctgcatctcccctcctcctcgctcctctcccctctctcctctagcacgtgtgggtcctaccacttgagacgaagaactcatagccaaaacttgcttcgcgttcttgaggaggccatgtggatggatgacgtggcaacgaatatttggtttggggaggaggctgaacgccacatcggcgcaatgtgaatgccctaagggtgttcttagcttttcatgtcagcttttgccatcttctatttttgtcctcacatgtttttaaactacataacgtataaaatttagcactaaacaccctaaaattcagaaacaaggatacaatttctccccttccatcattctctctattccccaactaccacaactcaacagcggctggcagcacagcgagctccaacagaggacagcggctccccaacctcctcccaaacagcggctcgaagggcgacagcggcggcgcgagagctcgctgggacccctcctctcctggccggcaacgagcgctcagcgagcgacggcagcagcgtgggagctcgccggggcccctcctctcctggttggcaacgagggctcggagggcaacggcatcaacgtgagagcttccggggcccctccattcccggccagcgacgagggctcagaggacgacggtggcagcgaggatccgaagcggcgtgagagctcgtcggtgccctccacttcctgccggtgatgaggagacagagcgccgagggtgacagtggcggcgcagatccagagcgacagtgactccgacggtggagagagaggtttgtttcgatggtggggaggtggggatgatggtctacagcctggattccatgcttttatctgctttttccgttgagcttctcgtgtctcaagttaggatgtgtttagttccaggggtgtaacgtttttgaagtatacggacacacatttgaagtattaaacgtagactaataacaaaacaaattacagattccgcatgtacattgcgagacgaatttattaagcctaattaatccgtcattagccaatgtttattgtagcatcacattatcaaatcatgtcgcaattaggctcaaaagattcgtctcgtaatttacatgcaaactgtgtaattggttttctttttccacatttaatgcgccgtgcatgtgtccaaacatccgatgtgacgttttggcccaaaatttttgggatctcaacaaggcctagtcccgtattcctcacaaagaaatggtccccactgccacattagcagctgtcctacgtggcgagctgtgccaactcgccacattcctgcactgtgaagggacaacatcacaaaagtcagtcaacttgagaatcatatgaatcattgaatatggtgacagccaaaaatatcatcttgacttgtctagatctgtaggtagcagagagagtagcagatagcctgtgaaagagagcaattgcagagggaggcttgcagctaagaactagtccccatggagcatggcggaatcgctgcttctccccgtggtgtgcggggtgatcggcaaggcgaccgacgtgcttgtccagaaagtcacccgcatgtatggcgtcgacggcgaccgccctaagctagagcggcagctgctggcggacgccgagttgaagagcgagaccaaccccgccatcaagcgttggatgaaagacctcaacgccgccgccgacgaggccgatgacatgctcaacgagttccagtacgaggcgctgcgccgcgaggccatgagcctcgagtcactgggacacaaggtacgaagctgcatgaccccactcgagttccgttttaccatgagcaggaagcttgccaaagtgctcaagaacatcaacgagctggttgaagagatgaacatgtttggcctgttgctgcaagatgagccagtacatcaacttccttactggcagacgtactcagtgctgccatcaaatgaattagatgatatctttggcagagacgacgacaaggaggcggtggtgatcaaactgttgctcgatcagcgagatcagcacaagtgggagaacctcccatcgtggggatgggtggtttaagcaagacaacgctcgccaagatggtctacaatgactacagggttcagaatcacttcgagctaaagatgtggcactgtgtgtcagacaactttgaagttgtttcccttctgaaatccatcattgaattggctacaaataaagcatgccaactgcttgacaacgtcgagttgttgtgaaagaccaagaacagctatagaggggggggtgaatatagcaattcaaatcttgcccccgaaaatactcatcaagccggatttctcaaaatccttactagaatcgcggctattagagaagccggatctagaaaagaagagagaaaaagaagagagaaggaattcccgaaactagaggaggaagagaaaaggaattcccgaaactagaagagaggtgagaaagagagagcaaaactcatcatcgcaaagttcaaattgcaagcggaatttaaattgcggaatttaaatggacaaggcaaaaatgaaatccttcaaatcatttcatttataggtgatgcaaaataaccgctcaactaggagcaaacatacaccttcagaggaacattaacacaaacttaaaatctctcggacaaacacactccaaactaatcctaatacaaaagcctctcgggcaaacacactccaaactcacatggaaactctctcaccgagcatctcaaaatgattaccaaaaggagcaacctccacccttgcatccatctctctatttatagcctaagacccctaagacattgtctcaaatacccctagggcgaaaccctaactcagaacagatctggtccatccattgttccttctactcaaaggaaaagctccagatgattgccacctcatcgatccgaaccttcacatggtcttcttgctgatgaatccgcgtgctctccgtcttgacgaatccaaacttgccacgttgcctagccgcgtcgtgcgcgttccgtctccttttcctcagcgcgcgctcgccagcgcccaaccagcccgaagccgccacgcgtcccgctgagccgctcccgcgcgcgcttgcaaaatcgcgtgtgggtcccgcgctcctgcacccgcctccgatcgagtcacgcgaaacggaggttgccgcgtacggttttcccgcgcgcgtccttgcgcatgcaagctgcctgcacctcctgagcccatgcgccatgggccgccgtcttgggccgtcgctgcttggacgatgcaggcctgccgagccgagccattcaccatcttgggccacgtggaacggctagattggcttggcctccctgccaaccaatcacagcgcacatgcacagctagctagcttgacttttccaccgagccatgctagtagcaaccagtacaatgcaagctcctccttgcacaagtacagtacgtgtacatgcatgtatgctacctacagcaagtactgtagcagcaatgcacttgcacagtcccttctgatttcttcgcgaatccgatgcttgcacacttgaccttgtgaagcctgttgcaaagacctcctcacacggtgttcgtccaccgtgtgcaaccttgtgtccaatcttgtcacccggcatccttgatcgctttggacctcaactcctccctgagtctagtcccgatccgccgttgaccaagatcgaccccgatcacctgcacacacatgaaccaaacaaccgttgtcttggcacagatgtcgcaacctgaccaacgttagtccacacacacacttcttgcacatccggtacttgtcaatttcccatcacaaaagaactataaccacacatggtttcacatccggtacttgtcaatttcccatcacaaaagaactataaccacacatggtttcacaatctcccccttgatgggaacattgacaatctcaagcaaaattttgaaaatttgatttttgattcacaaagcaaaccattttgcaaaagcgaactttggtcattttgaaatcgcgaaaaatcaagaccaagtgacaagaagaaaaagggatgcaaatgcaaaactccccctatgtgccaaactccccctttcaccaagatttaaagcaagttttaattttcaataagtgcaaatttctctccccctttgtcaatgatgctatcaagatcaaaagagacaaaaatgcaagataaaaatgagatgaaacttgcaaattttaggttttgagagctttgagagttatctaaaggcatcaaaaggtagacatggatcacacagatacaagcatgtgctcaagcctagctaagcatgtgcataagaagtatgaaacaagtcatgaatatcaagttagtatcgccagcaagcaaaaagctttcaagtgaattagtgatttagtgtgcaaagctatttctagaagaagcttaaaaggaagcaaaccagctcataatcatgcaagatttacataatcaaagcaatgaacccatgctaatgtgctaatgcccagttcataaagagtatcaacatgataacaaagcatagaacatgagcttttaatcttttctcatgacttttatttttatgattttttttaatttctttaaagacaatagcacaatcacgacggtccacctgatcttatcagtcagcaagtgatggttgtgccaaacactgccgtctgacctcaatcaagttttccagctagagttcccattacaggctgtctcagtgctatcttcggcactactcatgcgtaaacgcactcagtagcccggacaaaacagagataaatcttgtaaagcatgattgatacaaagtatggacgcataagcatgagcattcataagcatgtactgacagttattgcgaaaagaatgtaaacatggcatgagtatgagatggatacttcaatttaaacaaacttctagagcaagcattgcacattgattgagttcaaatgaatagttaatttaagcaggtttcaacacgcttgaacagcataacatgatcacacaagctacttaagcaaatgaaagctagacaagagatcaaactagcataagagtgatacatccatagcatagtgatgaccaagagataacaagcaaagctcaattgaagagtgtataatacaatgcataaagtaaacatgatgcaatatgttacaaatgcatgcaaaagaaaaacaactccccctcaaatcaagccataggggtggatcactcctaactcactccgcaagaactcaaaacgagagcgatcaagtggttttgtaaaaatgtctgccaattgtttttcagattcaacaaattctagcacaatggtacctttctcaacattgtctcggagaaagtggtaccgtatctcaatgtgcttggtcctggagtgttgaactggattttttgcaatattgattgcacttgtattatcacaaagcagaggaacaccagagaaagacagaccataatctttcagagttgaaatcatccaaagaacttgactacaagcactagcagcagctacgtactcagcctcagctgttgattgagcaacagaagactgcttacgagaggaccaagagaccaaagaagtgccaagaaaatgacaagtgctagaagtacttttgcgatcaatcttacacccagcaaaatcagcatctgaaaaagctcgaactgaaagggcagaagagcaggagtaccaaataccgtactcaagtgtagacttgatgtagcggaagatgcgcttgactgcttggcgatgtgatgttcttggagaagcctgaaacctcgcgcacaggcacacggagaagtggatgtccggccttgacgcagtcaagtagaggagggagccgatcatgcttctgtactcgcgctggtcaacttcttcatcgtcctcatcaggaccaagcgatgaagtagttgccatgggagtagcgattggcttgcagtcggccatgtcgaacttcttcaggagctctttggagtacttggtctgatgtacaaagattccttccttggtttgcttgatttgaagtccaaggaagaaagtcagctctcccatcatgctcatttcaaattccctgctcatcacatcagaaaactgggcaacaagtgcatgagaggagccaccaaatatgatgtcatcaacatatatctggacaagaagaaaatcaataccactatgaagagtaaaaagagttttatcaacagcccccatttcaaaaccattttgaagcaaaaaggttttcaatctttcataccaggctctgggagcttgttttaaaccataaagagctttttcaagtttgaacacatgatttgaaaattttggattttcaaaaccaggaggttgtttgacatagacctcttcctcaataactccattcagaaaagcacttttcacatccatttgaaaaagcttgaaaccttttgaagcagcaaaagccaaaagaattcgaatagcttctaatctagcaactggtgcaaaagtttcttcaaagtccaagccctcaacttgggtgaaaccctgtgcaaccagtctggctttgtttcgaacaattgaaccatcttcacctagtttgtttttgaaaacccattttgttccaatcacattaaaacccaagggaggttctaccaaagaccaaactttgtttctttcaaaattttctaactcttcatgcatggcattaacccaattctcatcagataaagcatgacaaacatttttgggctcaaaagaggcaacaaaagctgaattgacaagttcataagaccgatttctagttaccctttcacccaggcctccgatcatcgagtcaggcggatgtcggttctggatgtgtcggggagctgtcggtcctaatgtgccaccatcaatctcctcagctgctgaagatgatgtagttggtgcatctcctgaaggtgatgtagtcgaaggagaaccggtttcttgcactggtggtgtactgtctagaggtggaggaatagaatcatcatcatcatcatctgaatccacatccacaaagatgctttcatctggaacacctgaaatttctggtctagctcctgggctagcctcatcaaaagtgacttcacaagtctccacaattttgttagttgaaagaacataaactcgataagcccgagaatgagtagcatagccaaggaaaatgccatccaatgatcgagattcaaacttgtccaaatttccagatttaagaacaaagcatttgcaaccgaagaccctgagatgtgaaacttttggtcgacgaccaaatctgagctcatatggcgtcttgtgcaagatagttctcaaaaacacacgattggagataaaacaagcagcagaaatagcttcagtccagaattttcttggagtcgtaaactcatcaagcatagttcgtgccatctccacaagggtgcggttcttcctctcaaccaccccattctgttgtgggacatatggcgaagaaaactggtgttcaactccagaagaatcacagaaagattcaaatgcagaatttttgaattcagagccattatcactgcgaatggctcgaagagcaccaggaaactccaaagccaaactacgagcaagagactgaaagaagccaaatgtttcctcctttgattcaagaaaatagacccaagagtagcgagagaaatcatccacaacaaccaagacataccacttccccccaactgactggacccgagcaggaccaaccgtatccatgtgaagcagttgtcccggtccatctgtcataaccattgtaacaggcttgtgggaggaagatgtcattttcccatgacgacatggtgcacacacaagatctttcggaactttcaacttaggcaaaccccgaatcaaatccataccactaatgcgagacaagtggtcaaagccaatatgaccaagacgtcgatgccagaaaaacaaatccctattctctgtggcaatgagacaacgagaaggaccaggagcagaagagtcgaagttagcaaagaaaactcgaccaactcgagaaatgtcaaaaacaggagattcagaagcatcaagaactcgagacctgtcctttttgaaacgaacttccagattttcatcacagagttgtgaaacagagagcaaattgtacttaagcttacttactagtgccacatctttcagcatgaatttgtcattgaccttgattgttcctttagccatcatgcgtccactgctcgcatccccaaaagtgatggtctcatcaccggatgcacgagtgagagaagtaaaccacttggcttcaccggtcatgtggcgtgagcaaccggagtccacaagccaagaattacttctccctactccaaaatcctacaagaaggacacagcagatctcgatgattcagtactggggttagtgaaaaatgacttaggaatccagtactgaaccatgcgagaagtacaagcatctttagtgttatgagcagaattatatgcaagatgaccatgtctgttttgccccaaccctgctaggtcacgtcgagggtgcacatctcggcgaggaaagcgagatacacaacttgaacgacaatgacacgcacactcgaacctctcagggactctagtagctcttctagtcctaagacgttcttgtcgctcttttctagcctttctaaagcagaaacctaccaaatgaccagctttcccacaataggtgcactcatacttggttttctctacaggcttggtttgtctctggttttgcttgtgctcaacttgttttggatttttgggtctaggtaactctacaggcttagacttgctagtcataggtaccatctttggttctgaggttttgggtgtactagaactagtgtttccaatgaaacctgcagacttgaaggttataggtttttgagctagttctatcatcccatctgtgacacctaaaatctcatgggtacctatcctcaaagactcagcaaaatcatagcctataccttgattgtttatggacactttggattggtctaggatcatgttcaactttttctttccttgagcaaacctctctaaagattgttataggtatgagttctctttcttagcagactcaagatcaactttcagagaaatgcatgaagaacaagaatcaatagatttgatagaatcaatgacagttttagcatcttttagttcagtttccaggatagcacaattagcacatgaagaatgaataggttccttagtagcaaaagattctaacaaattattcttggtcctaagcatggcaacttgttgtcttaattcatcattgtcactagtgagaatgggacaattttcacacctaccaatcctatcatgaacaaatttttcttttagttctttcaattccatctcaagcaaacccatatcaactttcatttcatagcaagtagagcaagcagcactagcactagaaggattcctagctcctaaagcacatgatttcaacttatccttgaggagattaatttcagaaagatatgaagcacaagtagaacaggtatcctcctcaggaatcatggatcgaagcctagcaatttctagcgccattccatcattttcagattttagtttctcaattttatacttagaagacctatacttatcactaatttcaatcatcaagtgtgccattctttctttgcttagttcatcatcaacagagtcattatctgagcaagaatcatcacaaagagaaccatccaaggaagggatatcatcaagacatacctcaggatgctccgatgagtcatccttatcctcaagcgccatgagacacaggttgatgaagtcctcgttgttggcgagacagcacatcccggagaagtccttgtcccccttttcttgatcatcgtcgtcggagtcgatgtcgctaagctgcacctcctcaagagccgccaagaccttgtggatcgccttcttcatcaaatccttcttcccctttcgcccttgtccctcgggcttcttggtcgtcttgtcactcttcttcttcaacttgggacaattcactcttttgtggttaggctctccacactcaaaacacacaaatggttcattggtttttcctctttttttatctctcacatttttgtaagctcttgagaattttctagcaaaaagagcaagatcatcttcagggatcttctctaattgctcctcagtgactgagtgtaaagcggcaagagagaagccaccatacacaaaagctgagtcattagaagaagtactaccagagggatcagctaccaaagccatcgagtgtttgaggcctttccgatggaaaacatccatctcatgggtttttagctttgagtaaagcttgtccatggtaaggtcactcagaggtgcactctctgtgatggaagtaactttcatttcccaaacaccataatcaagacaattcaaaagatggcgagcattatcattatcagaaaattcttttccaacagatctcaacttcgaaataatttctccaaaacgtttgaaataagaatcaatggactctcctgagtgcatctcaaatctttgatattctttatgaaattgattctgacgaaccaattgaatatcattgtttccctcatggaaattgcacagagcagtccacatgtcatgagcggacttgtggtgttgaacacgattaaattcaccagaagaaattccaccaatgattgcatttcttgcacgataattaaaatcaacctgagccatatttgcaggcgtgatgtcagcatcatcgggcacagtgtaaccttattccacacattatgcccttgcgactggaggtaggcctccattcgtgccttccaaatgacaaaattgtgtccatcgaaaacaaatggtttcgcagagtatttttcctccatagctgcgttcgttgccatggttaggttacaacgaacttaaccgggctctgataccaattgaaagaccaagaacagctatagaggggggtgaatatagcaattcaaatcttgcccccgaaaatactcatcaagccggatttctcaaaatccttactagaatcgcggctattagagaagccggatctagaaaagaagagagaaaaagaagagagaaggaattcccgaaactagaggaggaagagaaaaggaattcccgaaactagaagagaggtgagaaagagagagcaaaactcatcatcgcaaagttcaaattgcaagcggaatttaaattgcggaatttaaatggacaaggcaaaaatgaaatccttcaaatcatttcatttataggtgatgcaaaataaccgctcaactaggagcaaacatacaccttcagaggaacattaacacaaacttaaaatctcttggacaaacacactccaaactaattctaatacaaaagccttttgggcaaacacactccaaactcacacagaaactctcttaccgagcatcttaaaatgattaccaaaaggagcaacctncacccttgcattcatctttctatttatagcctaagacccctaagacattgtcta

SEQ ID NO: 9096 - DNA, 4148 bp, Oryza sativa
gaacaacatatcagatcattaggtgattccctttttgaaatcatatggataccaccagatctgcgagtgagcgggttctgttcatatcttatcatacttggaaaaccagcaagaaaaatcatctgccaacttttaaagttgttggagattatccatgctgccaacagatttgcttccaggtttacaatagctgatctggtgttcctccctgatctgggttgtatagcttttaagaaaggagtaaaaataaggtggaacctcaggagagaggagtacaaactcaacatggtgatgtagctagcataattagctgctggttcaggtttaaccgcaggaagcttgaagcgctggaagcagggatccatgagcttcgtcctggccaaggtgactctccaatgtttgttgatatattagttaaggatcttagaagccccacacatgagactggtctcagtgccaattatagaggtttctacaaaaattgtagtgctctgagatcttgttcggcccacatgaatttgttcacctctttggacattcgtaaggacttcatggttggttctgctgattggggtaattttgtcaaggctttgggtgatatcaaacttccaggctggtatcgtactgctatgcgatcacctgaaatgaggaaagtactcttctttgagtttaatgatccacatactggggagttacgaggcaaaagatatcgtgccttatcagttttttcatggcttgaatttgcgcggatatttattaagcacatgaagaaagggctggtaaaatcactaacctcatacatgttttagtatagacttttatttgatggttttacttgatggttctaatatagacttttattttttgaagtgtaccgataaacaggcaacagcacttctctgtgtgatattctcgaatattgtacctgttgtggagaagaaacttacttacagttacaggccaccagctaaggagaagagcaatgaaagctttacagttgaagaaatcctggacccatcatagtcataggtatgaagtgcagcttgtttctttgttttccttgcatgcatgtccagtaattgttctgtttgctgctcctagattctgcaagttatatatatacgtatgtatatactaatgcatctggggataaagcgagcatacattttctgttggacactatacatgaatgtaggtgacatagaatgatttatatatccactgtccaacaagaaaagtgagttggtttatatatctactttccaagatgatagcaaaaatgcaattagagttttgcaaactttgtaatcagagaaacaaccaatcacatcctgtgtgattaccctttggtttgctttgcttggagtgtaattagggatatatgtggattagggatacccttgcagtataggcaacaaactcaatgtatacactatgtggattagggatatgtatgttaatataaaactaacagaggaaaaagctactgtgttgcagtatagacaacaaagctactgtgacaatataaaattagcagaggaatacattccctttcttactcttaatatacatcggccggctattcgccggcccggcgaaaaaaaaaattagcagaggaaaaagattagttagaatggactttgacaaaaaaaaaggggagtttagcgtgaaatccttttacaaagctattaaaatgcaggcggtagcctctgatataacaggaatgtataaaaaggtgtggaaaattaaggtcccattgaagattagaactttcatttggttaatgataaaaaaacagcatcctgaccaaagataacttgaggaaaaggggattgaagaaaggaaacgataattgtcaattctgtggaaaaaaaaaagaaacgatacagcagttattttttgaatgtcctatggcaagattcaattgaaatgtggtgatttgtgctttcaatttaaaaccagttaaagatctgaagcatatgctttgggttgatgggcactgaatggtgatacaatgacatagctattgttagttggaattgctgctattctttgggcaatttggaaggccagaaatattgcttgttttaaccaaatacttcccattgatcccactgaaattattttatgtgcttgtaattggatttcaacttggtctgttttacagatgtcggaggaaagacagaatgttgctgtaagctacaaatctcagtatggttggaggatgactctgcaaaggttggagtatgtatgacaaagcgcgaagaaaaagctttcaaggaaagggtttctgaagtttttattggtttgaacagatcctggaaatgaattcatatggatggggagctatatcagttgtagaagttctttttttccttaagttttctgtgtttgtcagtttagcctggtagtgatagactgatagatcctgatgatgtagctgtgtgttagtttgaacgattttctgtttttaagctttttgttcgatgccctggaactgtccaggcatgagtgaccttgtagaaactttcacatttcttttaatagaaatggaggggtattgcccttttgataaagaaaaagggatataatatgttgggctggtattcctgttgatttcaattattctttttatagggcaagcaagggttaaatatggtaaaggtcaagtagttgctttgttagctgtcgtgacttgaagcttatgattgattttttttgacgcaaatcgaaatattctgtttgacgcaatgattgatttgaaatgatgtgttttttagcaacaaattccttttcaaacttttgactttggtttttcgtgtattttctctacagatgcagtggaagatgattgaatgtcttcctggaacatgtgcaagaaattgttaatcatctgcacccctcaaggactgagtgttggttaaaagtagttgttccctgcctccctgggagttagggctttagtagagtttagcgttactagttctcaggaggaatgatgtccagtgcctttcgttaagagttgtgtagaaactgaggtggtcgagtaatcttctctgctgagcgttttcgttttttagctggagtacccagcctaaacttggtttccctttaaagctggcaatacaagctgactctgtttccgtttaaagctgccaatacaaagctgactccgttcaagttttcaaacccaattgggtttgaaaacttgaacatcgaacaactgaacatttgcatcatgattttagcagctatcagttggcatttgtggactgagtgagatgattttgtctttgaaaatatcctttttaaaccacctatgcaagtgatacattagatttcttttctacagcgatggaagtctttgcagagaggagaagaccggagcaggttagaagttagaacaactagttgaagaattcctgctaaagtattgcttcaaaaaaaaaaaaagaatcctgctgaagatgagagttgagacatgccgacgtgcggcccgtagatatctaatactactagttctcttttgtttagatcctactatttgagactgatgatgtctggacttgtgtgtggtactcccttcgtcccataaaaattgcatttctagctccaaggctttgtcccacaaaaattgtatttctagccatgtgaggcccaaccaattgattcatctatataagttttcttccatcccacataatttgggctgctaatgcttgtaattttattaagtatgctaattatatgtgttaattctctcaaattctttttaatcatttgtatatatggaatgtgtgcatgtagtgggttcattaaataaggttatcatggtcattttccaatcctactattttgtcctaaattagctagaaatgcaatttttatgggacggaggtagtaactggtttgatgctttggtagatgctagttaggaggtggtcttttgcaagggctgttcctttttcctttaggccttgttcacttaattcagggaggagatttattccgtacctcgatattgtagtatagaattattccccctcaatctcctccaaaccgaaaaaagcctcagaggtattcctcgaaatgacgtgtccacgtgtgtgtaactgtgtatgtctaaactctaaagcttgagtattcta

SEQ ID NO: 9097 - DNA, 5639 bp, Oryza sativa
tttgcagaactgcataagatttcattgtgtcaaatttagaaagaatatttcaaccaagtactgcacaaaagaacatagtcctgttgcataaaggaaaagatgaggggaaaaaggaactcacgtaaatactcggacaaaaacacggatgtagaaatccatagacacagagagaacaggcacaatatatcgtttgtatcgatttgcatgactctggtattgagaaatggaaaagataacaagaatcaagatacatgaaggatgaagcaatggaacttcagagtttatgggtcatttagcaaagcaaataattcaaacttaacacagttctcctgcgttttcgagaaaacttctaaaaacagattcttaaataggtattgaaatttgcacatcctttaataggaatatacttcatcttatgcagttttttaaaccaattatccagttatatattgatccaaactaataagttaactgagtgatataggtacctcaatactggcaaggaggattcgcaaagccatttcatggttatacttccctttggttggataggaaccatacctacaagaccgacttgatggttagaacaaaaaactagatttagatttttgcttcaaaccagtagtaatgtccatacttggagtggcaaacttcaccatttggcccacatagaaccgccatatcagtggcagtgcacattaatagcccaccatcagcaacagcctgtacagccgaatcaaggaaaatagaaggtgctccataggggtcaatatcaacctgaaaatgaggcaggtgtaagttgacatagaaagatacaaatggagtaactgtagtattcatcactttctaatgattaaaattcatttctttcaacttaataacatacaattgactgtttggcacaatcaacagtttgtcaataggggaaacaaatcgattaaaagggtaaagcatgaaaatctaccatttttatatagtaaaatgttgctaccaaaaacaatgctataaagatatcctcgtaactaccagaagagaaaggcttaccacatcaaactcttttggatgtgtgagcatataaactcgagcatcagtcaaatgaggctcgatcttactcatagcagaagcaccattaaactttatattccgcttgcaagcttcaatacaagctgaaaaggaagaacccacacagtataatgaatacaagcagagaagcatcattatttagaaaggaaaccagttcagaaaattgggccattacctttatcaatgtccagagcgaccaccttttctaacacgtctatttcacgagcataacggatagatctcaacccagaagcagccaaagcctgcatttagttttgttagccggtaaaaactgaaaaactattacatatcaggtcaggcaacattagtatggaaccgtaaaactgatgtaaacataacacagtaatgatttttttattgtcaaaactgcataacgtattatgacttgcagcacatagaaccaaatattatggtcctcaggttgcaaaatatcccagccctatttaaaattcgaacaatataacattcagagtacatatttaactaaaagtccaaactttcatgtcagagtgttttatgtatttttttaaatattgaattcttgattaagatgattaatttaactcttaattaatttgctaaaattaactgagatttgaacgaagggtggggctctatgaaacccgtagaccataaacctgggattatgtgccacaactcataatatccttgtttttctggaatgtcaaccattaaacctgcatttttttagatttactctatactattcatactatatgtctcacctcaagaacaactggtgccttaagctctctggctactttccgcgaaggtgtctttgttgcttctgttgacagatcttctgtttcatccgcaactttatttgtttccttttcagcatcaacatccatttcatcatgctgtcctgttgacccattctctccatttggaccagatgatttactctggctcactttgttatgcgccttgtccctcttatccatcattgccttatgttcttcctcacgcttggcaatgaaagtccttaaaagagcaactgacatatctctattgtggacctaatcaagcaataaaattgaattacagaaaagcacagtagctgataggagattagacataattttaggccaaatataattactctgcaacttttaaaagcgatagatacaggaaatattaactatgaataaactcatagtaatttgccgatgatatcacattcccataaccaccctttactcaattcctccatagcaaaagttcaggctgttagtgacttgaaaaagttatggctagagatactaattgttgagaatgcagcataaacaagcccgagtggctgttttgaagcttcacatatattctcctagcaactgcaagtctacaaccttaaactgattataacgtgtcgtgatgcgctaacacaaatgaccaacacaatgcaaacaagtcgtaaagaaaagcaaagcaactagtactctagtggctacaccagagaccactcacttgaaacgacccaatcacatacaaatcaaatagccaaaacccaaacttatagtcctacctatgcacgattggtgaagctcgcagctcacaccattcgatcaattcgaaacaaaccaaccactaatgatgcacgtattctaagaagatagaggagccgacaaatccatcatacagcatcaaataacccccaaaaaaatcgcatacagaacatatacacaacaatacctgcacgggattgtagaacacttcatttgctgctattttcttgttgatgatgatctccgcctcgccttccctcacaatctcatagtcctttagcttgttctccacatcctccatctctccgaatccaatccaatccaacaaaaacctcccgattcaagcgacctaacgagagacgcagaccgtaaagcataaggcgtgggcagagatagatgaggaaggaggagcgtgagaacggatgctcaccaccagatagacctctgatgcagcgggaggacgccggcgaagataggcggtgctcggcgcagaaggcggggcgagctcgcgaagaagagacggggaggggagtctatgccgaggcgacggcggcgtcgaactagggtatagggtagagaggaaggaaggagacaggatgggcccaattatgatgtgccgtgatcactatgggctttttgtatgaattaagttcactttaggtcccttcgtttatcgcctagtctaaaattcatcccacatgtcaatggtcagcactttcttcctcctctcttgccacctatcttcctctctctttccatcttcaggacgccgcctagcaagtggcgtggagagcgcgtggtggacgacgtggagaggggctgcgagagcgccacccctgctccaccttcctttctggcttgcacacgactggtgttcgactggtttgctatgataggctctcctagcttgcacttcgccccaatagcacggacatgttgccaaatgctataatcagcataaccagcaccccacacatacatcacacaatcaaagacgcgtactttttgggaataaatcagaaggatcactcggatcacaacgtttcaactagtagtaaacaagaggaggaggagagatataaaaggcacacctttaggacggaggttggccttattccctcgggacttgaacacggggcgatgattttgggaagcaagtctccgtgagcctgctaaagatggctagtccccagggccgctgctcgcgaggtggcggcggtggcggtggagaatgggcgaagcccgatcaaatctattacttgataaatagctatgcaaggacaaagagagagaggagaagcatgacgtgtggcgcctcggaggagaaccccccaccgtcaccgaagtcatcgaggatagtggcaatataatacggctcgtcggagagcttcgaggaacaccatgggggaaaagatcctacaaggtttgggtggtctagggtttttttggaagagtgagaagaaaaatgagctaaagtgggggcagcctgcgcccctatcctggcaatcgccaccaccaccaccgccgtatctactagcctgcgcggtcacctcgctctagctgttcctctccgctcctcctacccctcggacggatgccttggggctcgggcttagggctgtcaacgagccgagctcgagcgagctcgtctgcccaagctcgagctcggctaccgagctcggtcataagtagtataatatatattttaatgataattttttgataagtataattattttctagttaatcacactaataaaagagtagaaaatgattaaaataaatatattatgctaacacatgctaatttattgtgtaaatagatactaatatatatatatatttacctattagtttattatatcaataaggtgaacatgcaatatgaactataaatagtcaagctcggccaggctcggcaaaagctcgagctcggctcggtaaagctcgcgagcttttgctcaggctcgggttcggctcgtttgaagctcgagccgagctcgaatcgagcctaggacgagccaagctcgagctgctcgcgagcctcgagcttttttgacagccctcccgggctctcctcgagcgggggtcgctaccagcaccgttgttgagaggggagaaggacgaggaagagagggaagaggtggatgctgatacgtggggctcacaggggtcccacgttgacttagcatagctaattggagtcaaagcgccaagtaggacgaaatcaagaactatattgccttgggacgaaagttgatacggatttgcgagttcgggacggtctatacatgctactgtggtttaagacgaattttagtctgggcgacaaattaggggaccaaaagtgaacttatttctctttagccgtcagaattgactacggcccaatagacccaatagcccaacaggaaacacattctgaacagcccgttaacccctaacccttccacgctgtcttctccactcccaccgccggcctcccaacccgccgccggcgacgattccggcgagatacctggtcggcggacaccggctcccgcgggtacgagccttctctagacgggctgcgtctctgtccatctcttcttcttctccaacatgaggcccctcgcgatacggcggcgggaggcgcggctcctcccacccctcgccgtcctcgtccggtccatggcgtacgtggacgtgaagatgcgatggaagaaggacgcctccttcgacgccgtccccgtgctgtcccaggcgcgggacctccgcccgctcgtgtccctcgccggcctcctctcgccgtcgccgacccccgtctccgcggtctccaagcttcgcatcccgctcgaggtccccgaccgccgcgtcatctccttcctgcggcggttccccgccgccttcgtggagtccgtcgggccggagcacaaccacccctggttccgcctctcgggctccgccgccggcctcctgcaggaggagcgggaggtcttcaccgcgcggcgcgcggacatcacctcccgc

SEQ ID NO: 9098 - DNA, 9554 bp, Oryza sativa
gtggaggacggatctagagccaggcggtcggaggtggcgcccgtcagttgggggatggaggtggcccccggcggtcggggatggaggccgcggcgccgccgttcacctcctcctcgcctcctcaccgctgcgtcgagccgccgcaccgcagcaccgccgcgcgccgttgagaactccacgccgctgccacttcaagaaaaaccggattgagaaataagagaagggagaggaggggagaaagaagggggaggaggatgggggtactgccgccgccgctcgcagccacgcgccgccgcaccacctcgccgcttcacctccgcaccgccgccgctgctgccacgcaccgctgagccgttgccgccacgcgccgccgcaccacctcgccgcttcgcctccgcaccaccgccgccaccacgtattgctgagccgccgtccagcgccgccttgcccgagggcgtcgggtcctccgccgccgtcgcaagagcggcgtcgcccgaggcattttttttcgcggtggagaaaatgtgtggataagggagagagagagagtgtgagggagagaggagatatacatattagtctgacctagtcaagtccccacccacacctgtgacgggcctagtgaccggaccgtttgaggtgagttaacctcacctttgacggtttataatcatgcaacccgtcacaggtaactagtcacgggccagaagtggaagccgtcagaggtgtaactagttatctgtgacgggttgcagaaggatgcctcactgatgacggcatcctgtaagaaccgtcaaagatgaccctcatcactgacgagtgctaaagtccgtcacagatatgccgttaaaggtgtgaggatctggtgtagtgaacctcttccactacgatgtgagctcacattacccggcctcttcctctccttcccacccccagatctacgtgtactccatgcatgccgtttactactgtgctcccgtggattttggatctgtttaatttacctctgtatgggtgtgtgtatgcacggattttggatgctttttgtttccttgtgtcgttgcaagttcgtttctctgattctttcatttgcagttttgtatggagcgtggcttccaatctcatccagttcgtgggtgtttggtcggagcgtcgcgtttcctttcttgcataaagtttctggtccgttttttgatccttccctttttgtttggtcttttccacttcggtgctcgctgctagtttggtgctagagatctggctgatgtcgagagaaatctcgtggccgcagcacacgcagctcaccattcgaacttcgaatcgaagccttccgttgtgttcgtttcggtgacatgcatgcacatgtactacgcataaagcatatcatgtgctcaacgcccggcctacatgcatgtcgtcgttttcttgagaacgttggtgctgtgttttggaaatgctgatttcgtacaagggtcggcctgatctctccctcgtgagagctagttcgggtctttccctctgcaagcaaaggtctgctcggttcagtgcttttgcatctcgttttgtgctgctttacaagttattatgtttcttttgtgtgtgagagatggaagaagacgacgaagcccctctgtgcccgttcactacctctcggtttgacttttttttttgttgttttttggagactgctctttttgtgtaagcggatgtgttcgcgcgagcttctagctgctttcttgtaagaacatgctaatctgttcttcatgtaattaagcgaagcctttgcgtgaacttttacatcaagtcgtcgtcactgaacgcctggtagattccctttttctgatcttcggcaaacactccatccgaaagattgtcgctggaatggttgcagaaatagagtggtgatccacttttaaaatatctgtgaatacatatgtggcttttggttctgtgttttctgcttttttttttggagtagctatatttatggcaccatatttttcaccaaaaaatagtcagcatatatttacattgtaagtccctaaattatatatgtaattatagtgtaagtgctatataagtgccgtgtaagtgaataaattacatatgtaattatagtgtaagtgccgtgtaagtgaatgtaagtgggtggtaattagtgtataagtactttaaaattcaatattaatttgttttggcaataaagtgaatggcaataccgtgctcggttggttaggagctctgtctgcgacttcgaaggtctgggttcgactctccgtcacggcgccttatggcgacatatttttagcaaatctattttttttggcattttttttttgaaaattttaattgttgtctttgtcgggatctcgttcttttttattccatgcgaaaaaaaaccagtcgtgttcaacagtaagacatcgagttatagacttgttccgatgattttttttttgtccaataacgtttttcagtccctttctatgtttttgggctttcgaagatgtcgatttctgatttctgagctgtggcccagtttatgtgggcttttgtgggccttagaagaccctatatcatccatccttcatgttctaacctagctataatcttcaactctcactatccattcttccctccccattattcctcaacgcttcgccggcgattcccctctagactctagcgttcgccatggatgcccgccccatgtaagtgtcgtaccccgtagtatagcagcgtagttctacctctatcgtgatttgaatggagaagatcaacctctatcaccttttttttgttgtttgatttctgttggtccttgatttaggtttcgttacttttgggcattcagttttttttggtggttttcgcctacattgatttccacaatcaataggctctgatctgaacgaaacacactgaattttgagtagtttggtgtgttagtgatggctaactgctctgatctaaaattactttgttattatgtgatgttcatctgtcgagttcttcttattttgccctaagatcttctctgtaaaaaaaaaaaatctgcccctcatgtcctatagaaaggctgtttatcttccttttggattatgttacaggtttcaatcaatcctgagtcaaaatcaagagcaacaaatagggaagtactcaatgagctcatcaagttgcatgggaagacatctcttggtggcaaattgcctgcttatgatggaagaaaaagtctctatactgctggttcactcccttttgaatcggaggagtttgtggttaagctaattgatcccgaaaagaaggataaagaaaggtttgtatgatgctagctagatattttcgttcttatgaattatgtgttttgtagtctcaggttattgtttattgtcttctgcagggcggagagggagtacaagatcacaattcggattgctggcagaacagacttctaccacctccagcagtttttgcttggaagacagagggatatgccccaagaaaccattcaagtcagtcattgatgttgtcctcaggtagtcgccatcttggaagtatgatttttttgttgtgtttgttttgacttttgcttgattatttactgactagggtactaataatgctgtattgacaactacttgttctgcagttatgtcacagtgtccagatccttcttctctacccagtttggtcaccggggtgacattggtgagggacttgagtgttggagaggttactatcagagcctgcgcccaacacagatgggcctttcgctgaatataggtacttacctgtcagttattgtttatcagttttcgctgaatggaagtgatcttttcagatactaactactgttcggtatgcttcattcagatatatctgcaacatcattttttaagcctgtgacagtgatccaatttgtggaggagttcctgaacatacgtgacacctcaagacctttgtcagaccgggatcgtgtgaaggtaatattcctactgatggaattcataaaattatgcaatactgatactaactcatttttcatgatgttcagataaagaaagcattacgtggggttcgcattgaaacaaaccaccaagaggaccaaatcagaagatacaaaataacagggattacccccattcctatgagccagctgatgtacttatctttcctctgcttctgctataattatctttttgtttacatgctgtaagatacagcaaatcaatgtagattgttgatggaatatttgaaatgtctttgtttatggatcttgggcatggtagtacattaattgtttgtggacttgtgatagaaacattttaatccttttcaaaggtttatgccttagatatcaatttatgcgcctttgatatccatactgtcaatgttgttaaatgtccttcaatgtgcctttgatatctataaatgctgttaaatgtccttcaatgttctaaattgatgtgtaaaggatgattgcacactgtcctgagaatagcagtgctttgtcatccttttttaggacctgcattttgttatcatgcttgttcactgttttatagcatgaacataacttgtttttctccaaactgatgcctggtttgatgttgttagatttcctgttgatgataatgggacaaggaagactgttgttcagtacttctgggataggtacaattacagactgaagtatgcttcttggccctgcctacagtctggcagtgattctcgtcctgtatacttgcctatggaggtattgattcatcatccatttacctctacctgaattgtgcatgctgtgtgcagtttgttcatgcaaatgtggttgcaggtgtgcaagattgtagaagggcagaggtactccaagaagcttaacaacaaacaggtgaccaacatccttagagcaacctgtcaacgcccccagcagagggaacagagaattcatgaggtacaataccatgtagatgcagagccaaatttttatgcttttggattttggctcacatttgaatgaccttctatttctgcacattttcttagaataacatatccgtagaacataaggctattttttttcttgatgagataatgaagataatatcatatatttgtattgacttccatttcatcttctatcagatggttctccacaacaagtatacagatgataggtttgctcaggagttcggcatcaaggtctgcaatgacctagtctctgttccagcccgtgtgctgcctccacccatggtactatataggttttattccatttcttttgttcgcattgtttaaacttctgggaatttctaacaaccttaatctttgcgcttttcagttgaagtatcatgattctggaagggagaaaacttgtgcacccagtgttggacagtggaacatgattaacaaggtgatgccttgctttattattacaactcaatttctctctcaagttaattttgtattgcctttgtttgaaagtgaattctaggtacacttgcttaacttctttatgaattgttcattagctttattttttgttggagagtatctgaaattgacaagccggtactgaaacataatttcagaacctgtaaagatacaactacttagccaacataatttactttctgatgtgtttaaaggaagactctaatacttgttaattttttcagaaaatgatcaatggaggaactgtggataactggacatgtctgagtttttcacgaatgcgtccagaggaggtacaaaggttctgtggtgacctgattcagatgtgcaatgccactggaatggtaactcctgcatagttacaatgctattaaagcagtttaataattatatgtgctgcaattaactttgacttgaccttgtagtctttcaatccaagaccagttgtggatgtccggtcatcaaatcctaacaatatagagaatgctctgagggatgttcacagcagaacatcagaactgctagccagagagggaaagggaggcctgcagcttttaattgtaattctgcttgaagttagtggttcttatggtatgtatattgttggttgggtaatctaaatttccattccctgattttttttattaaatgtagtatatgcatgatttttacagggaaaattaaaagggtatgtgagaatgaccttggcattgtatctcaatgttgtttgccaaggcatgccagcaggccgaacaagcaatatttggaaaatgttgcactcaaaatcaatgtcaaggtctgtaaatctgctgggcttgtatttttttccccttgaagataccaattctgtggactttatcttgtgtgcttttagtgttctcccccagaaatatgacaattctgtgccataaccaggtcggagggcgcaacactgttcttgagcgagcctttatccgcaatggcataccatttgtgtcagaagtcccaacaatcatctttggtgctgatgtcacacactccacctggagaggactctgcatcatctattgctgcggttagtacattcctagctaatggttcttcaattcattacttggtctatttgatgctgtcctacaatataagatcatgggctatcctgtgcataacttgatgcaatagatgaactatctttttcttcccaaagtttattgcttcgcagatgcaaactttactggtattattttctttgtgatcatgtaggttgtggcatcaatggattggcctgaaatcaccaaataccgaggtctggtctctgctcaatcacatagacaggagataatagaagatctctttagtgttggtaaagatccagtgaaggttgtaaatggtgggatgatcaggtaaaatttgtggttaatctggtattgcaattgtatattatcgtaggttcatctgggaactgaccattatgctcttgtttacagggagttccttatcgcattccgcaagaagactggcagaaggcctgagaggataatcttctataggtatgtcctgcaaattctgttctgttcagtgatatgtccagttaaatgaaatttgttgagtggtcattctcctctacagagatggtgtaagtgaaggtcagttcagccgtgtgcttcttcatgaaatggatgccatcagaaaggtgagcttcgcatcatgataaatctgtctgtgttatctattctggacaagccaatttcattgttttttctgagtttaatccttttacattgcaaggcttgtgcatctttggaggagggatatctaccacctgtcacatttgtagtagtccagaaaaggcatcacacaaggcttttcccagaggttcatgggaggcgagacatgactgacaagagcggaaacatccttcctggtcagtgttcttgttggttgctactgagaacatacgtctgctacttcttcaggcatttgataattggatatattgttgtaatctgtttctttttggtcctgcaggaactgtcaaggaccgccagatttgccatcctacagagttctatttctacctgtgtagccatgctggcatacaggtaaacccatgctggaagctgtttgcagattgcacaaatttttccagcctacaaaattttcagttaatgtgtgctgttgacattccttttctcagggtactagcaggccaactcattaccatgtcctttatgatgagaaccattttacagctgatgaacttcagaccctgaccaacaatctttgctatatgtaagttcatttctctctatctccacttagttgcttagctcccttagtctttcggctgcctcaactctgataattcctactgttggcaaaatgcagctatgcacgatgcacccatgcagtgtctgtgggtgagtcttcttttcttgcatctttgtttctttttatttctgcatcttcgtagatatgctaccttaacagatgtatacactagtttctgtgaatggttttactgtgaattggactaatcttattagcatattattctcaacaatacagattcttatttagcatgtttgaaattgggtctttgtttactttaatgcactcaatccatcatgtgatatgcttttaacgagaagtgcactactgtcatcttgttatgcgccaccaatgcgtgcggctcattagctcagcccaggtgctgaaggaaacacgacctaaggaactacagaaatattttctttactttgttttcctcgctgctaatgcaccatcgatgtcatcatgttagctgttgctcaacatttgcttttcaaatccattgcattcatatcctagcctcgtctttgtgatgctcccatattactctctggaactagcaaatgaactatagaagaaatattttctttcccttgtttttttcgctgctgattgagtgcttctttttctttctgtgcagtcccaccggcctattattctcatcttgctgcatcacatgcacactgctgcattaaaggacatagttcaggtagtggctcaacccctggcaatgagcatgacatagttaaaaattctgctccaacactccaggtaactaagggactgttttcctatgtagtattttttttttactttaattcatttgggatgcatacatatatttcagttaaaagagtgactaaccagggaactaaatttcatgcctcacagatccttgtcaaagtgctggacttccaaatagttccactgacaatgaaactgaagtcttcagctgaagacattgtagctttagctctatcaaaacatcgcgtctctctgcatgatgtctatgtctaccatggtaggcgagttattgccaagagcttgactcttgaatctttaaaagcagacagggattcaacttttcttataatgccacgtatgaggggtggatgcaatgatacgtaagtatattttctttcatctattgcaataattatttttttacttttgaattttgttctcttatgatagataaattttaaaatgtaggattggcggtttcaagtgcattcctttagaacaacatatcagatcattaggtgattccctttttgaaatcatatggataccaccagatctgcgagtgagcgggttctgttcatatcttatcatacttggaaaaccagcaagaaaaatcatctgccaacttttaaagttgttggagattatccatgctgccaacagatttgcttccaggtttacaatagctgatctggtgttcctccctgatctgggttgtatagcttttaagaaaggagtaaaaataaggtggaacctcaggagagaggagtacaaactcaacatgggtgatgtagctagcataattagctgctggttcaggtttaaccgcaggaagcttgaagcgctggaagcagggatccatgagcttcgtcctggccaaggtgactctccaatgtttgttgatatattagttaagatcttagaagccccacacatgagactggtctcagtgccaattatagaggtttctacaaaaattgtagtgctctgagatcttgttcggcccacatgaatttgttcacctctttggacatttgtaaggacttcat

SEQ ID NO: 9099 - DNA, 11334 bp, Oryza sativa
tcaccacaaagacaggaaagaatgttggaaggcagttttatcgttgcccagctaatcaggttcattcatgaccctgtttatcctcccaccctctctcttcctctcttctttcctcacccaacaaagcagggaaagttgttttactgtacaatattatgctgatatcccctataaaatgagttctggtactgtgttgattatctacagctgtctcattcttgctaaatgagtgcgtcatttgctaggcccagtatgattatcatcaataactatagtacctacagatggaagttactttagtgctttggattgtaccatgggaattttgaactgtttatcttgtgaataggaccaagatactgctcaccttatgttagtctagaagatgtggacagtatgatggttacagttgcacagtgcattcgtgaactaagattttttggatcagtttgccgctgttgtgttgtgtgctgccatgcttagtatgaaggtgttgctgaaaagcagttgtgagtaacattgagccggcttataatatttattacattatacaaactgttatccaccgctgtgtttctccacctgttctgcatttgaaatacccaaatacgtccatttaagacttggtttagaagacagcagctagccagctgatttagttttggttcaacttggttccagggctggttaacacgattattcttgatgatgatgatagtttgcttactagtttaaatacgctcaatataaattctccccagtttccattgattggttgatgcatttggtgtgaccccatagctggactcaatgtcctacttttaatgctttatgtccaaaacccgtagtacttctaatgttaacagtgcgttcttcttacccttgcaacttcgtattttattgttacaattctatgtcttgtttgctcttcataccaaaatgttcttttgcatttgctttaagagatatagtggtaagttcctatgtgtagttaaatccttttgttctagtggagcacttatttctatctgcacctttctggatagcaattgatgctaggatatgatatcatcacttgttctgttttacctttttcattattgttatattcttgtatgcatttttttcgaaactagggcatttcatatctctttcttaatgtacgatcgggacatatctccagggaggtagctcttgtggctatttcaagtggtgtgatgaacaacagcttaggacagctgctccactgcaagcttcaacacaatatcatactgatgttgcttcaagtggccaaattcccagcaagaggagctcctccgcctgcttcaaatgcgggcaagagaaccattgggcaaaggactgcccaaatcaatcttcagatccttatcctgacaaaggtgggagaacatttacttctgcaagctctcccgatgcgtgtttcaagtgtggtaagagcgggcactggtcccgtgattgccccaccgcaaattgtggttctagtaccgtctccagccatgtcaagtcctcttctactttgggctcatggaacagccacagatactgatagccggtacctgtgaactcaattgaactgacatggacatgctgtacgaaacttggacaaatgcacatgacacgtgttgcttaggtacgcattcttgccaaattccttttgctacttttaagtttggtaatgagtttttactgaggacatttccgtcttcatgctggttgctctgggaatcttttgtcatctgctctagacatttccactgatgtagatataagaaaaatcagcactatgttcaattctatgctctgttttcgtactgatttcatgttcattttcgtgctccttttgaaagctttatttggatatttacatgagttagattgaatgcccatttaaaagtttagaccctgggacctgtagggtagttaatagatgaggtagatatggtgcccttaaaactttagggcctggaccctgaactacactttaatatacaaccttaccttctgacaaggctaagtgaaacacccacaaaaagattgggaacagttgttctgttgggttggataaacttaatactatcacccactgtgccattcataggacccgtctattaaaggataggaacaaaggctgaccattcactcactgcgccaagtggggagaatgctattcactcaaggccacagaagctcacatggtcatgagctcgtgagggcaaggaatctcctctcccctggatattagttatcatcagtagtagcagcagcagcagcagtagtagtagacagccgtagtaatcatctttgcacaaggatgtggtcctggttgctggtgcccagccaattgaactgcaggatggttggtgccatgacatgtgcttattgtttgcccctgcaaggctttgaatagtcactggccaacactacctgccatcacaggtcggtttccctcagcgatcttggggtcccctatgcgtagatctgagatgcctccactaacctcgctgggagcttgatttgctgtttatttgtttgctgtctgttcggtcggtcttttgcagttgttactttgcactcagtgcttcgcctctaggctcaagggagggcctgatttagttactccatagtcaactagatagaaaattttaaacatctctctggtaatttatatatgcccctataacatactcagtgcttccgtatagtctggtaatttttgcttggtctttgactagaacatgaatccaacggtttatactagttgcctgcatccaacggtgcttgatttgtggcctacgtggctcaaccaagatccgagaaagattttattctttcactactttagatcagatagagttcctccaaggaaatctttcagagtcactagacaaagtgttgtcatgattcttgattagtccccatagcctgcacttagcggtagtgaacctcttgaaattctttatggccccttgggagcacatgaattagttcaattcctacgaacttcctcttccccccccccccaccccaaaaaaaaaatgcctatatcctgactgtaacagtcagttgttgctacaaatcctccccggtgtgactgtaacagttcgttgctgagttgcatggttgcatgcatgcatcaactcatgagtcagtcattacacgatgggaagcatttaggagtactttcgtggcacccagcaaaacatgacaagcagccgaggacgctgggcctgcctgttcgagctgccactgccgcctgcatcatcccaaggaggaccaccacccgggagaagtggaactggatcgattggcaagaacacgaggccgcgggggccacagccgtgaagcgcagcgagacaaatcccatggggcctctcctgcctctcccctctcttaaatgcccctttggcctcggcctccccggaccccggtggtggatttcgctaaggccttcttcggtcaatccctacgagatcttattcggttaatccctgtgaacaatcccctctaaaccgaacaaaagcgaacaaaaggcctaagtttgaaaaggagagaagagtagtacagtactgtagcaaagatgccggcgagcgacacgctcacccaccctcctctgcgccggcccccagcctacaggggcatatggctccagcacggcgtgtacaacaacgtagtgctcggggcatccactgtgcgtgccggcccgcccctccctgtccctgtggatgtggcctccagctgattgatgcctttgcttgttattattgctgctggtaggagaagtagtgcatcccgttattttcagccacttcactctattattgccgtggattttttttacctctatttttttttctattgcatagcttagccccctttcctaagctactccctccgtcccataataagttacattgggacgaagggaataattgtttactttatttcttaaaatagttaatttatccttacaattaagtagataatttgtatcaataatctagtaaaaaaatcaacaaaattttgagatgtggtctatgagtgatcagtcagtgagaatatgaagaagctagagttaactggctcctgaataccgatatgagtaagaatatggattatttggggataattggagattatagggataacttttgctgtcacaagttccccataacatgggtttagactttagagtagcatggtttggccatttagggtctcttgcctgctactccttcggtattattattgctgttgacttggtgcttctgctgttgccgactttgccatgagccatgatgattgtgctctcatacatggggtggccgggtgggcactcatcagggggaggaggcatccttccatcttgtcacgccaaatggggttaaccccggggaattttttccccttctctcatcactcacctctctgaagccgatccacatcggtgtgtatgtcacatctgccgatggtctcttcgctccctttctccccgtcacactttgcttctccctcactcactcacaacctcttcttcaaatgcctctgttctttttgcgacttctactactgttgcgtaataattgtagtactagtaattcaatggtcgatttggccacagtaattcctctttaatttaatggactagacatctgttactatcatcagtgaactgtagtactccctttcagaatataaggattttttttcttgcgctgattctcatcatttcgatttttgcaaagccaattaaatatttggaaaggcaatctaaataattcaacaattgacaattgaaatgaaacattactgtttgctaagggcccctttgaattgcagggtagaaaaaacggaggaataggaaaaacataggattctgacaggaattgaagtgtaaaacagaggattgcaaaacacaggaaaaacacaggaatggtcgtttgattcgagtgcaggaaaaacgcaggaatcggatgagagagatagactcaaaggaaattttccaagaggttggagctcttgctaaatttcctccaaaatctacatgcaatgtgtcattccataggaattttataggatttggaaagcttcaatcctttaaatcaaagggccaaataggaaaatttcctataggatttgaatcctatgaaattcctacataaatcctttgatttaaaggggccctaaacaatgtagaaactcttatattttcgaacggaggggtttacgatttttttgagctccaatccagacagtgtgaggattggattggggcgtgatgaattatcaatcagcttgtggagcacagttgaaggaatggtacaaggagagatggcatggaccactactcctttcatcctttggccattgaaaggtgaagtgttgggagattgagagagatggggtaagctgtaataacaagtgagggaggccaagacaaaacaagccgagacgcgcacataaacaaaatttcctttcgctttgagttggaaacacgtcctttttggactgaaacttgatggatgtgtccctgttcgggacaaactcgtaaggtggacgtgacagcgcgacgtgcccatccagatctgccgagattttactactaccatcactcgtgagggagaaacaaacctttctccctattgcttcagatcatactaagggcccctttgatttgtaggaaaaatgtaggaattttggaggatttcaatcctatggaaaaaaaatcttatgaaggcctttgagacaaaggattgaatcctatccaatcctttaaaattcctatggaatgggtaatcctatgcatattttggaggaaagttagcaagaggtctaacctcttggaacatttcctctgagtctatctctctcatctgattcctgcgtttttcctgtggtccaatcaaacagctattcctgtgtttttcctgtgttttgcaatcctctgttttacaattgtattcctgtcagaatcctgtgtttttcctattcctctgttttttcattcctacgattcaaaggggccctaagattttactactaccatcactacaacaccaacctattgtactactactaatgaattccacttggagccaatagtattcctcccttctcctgcactttaggaggtaataatgagttgctaactaattaatccaaggcctccatggctccaactaactagtaataatcttttgcaagagtctttttttaatatatatatagcggataaaatttggtctttgcttcgtaatactccctcagttccaaaatataaattttttttgacctcaacgcagttttcttgatactactttgaacaataatatctataaaagtaatatattttaaataaaatgagtggcatatgttgatagtttgttgaatgataaatctactagtaacatcaaagttgcatgattgatgttttttatttttatatgatattaatagtcaaagttaaaaatgtttgatttgtcgctattctaaaaatccttacattttgggatggagaaagtacttattatggtctgtttggtacaactctagagatggagctgagtctatccaaatagtttcagcttcgtctaaaatggaagcagagctagggtttacaaaaccgcacggttaccatgcggttatcgcggttaccatgcacggtaacctttttagtttttgaaaccacggtatgtctcgcggttaccacgcggtaaccgcgcggttaccgtgggggtgcagcaaccacgccaaaaagagggttactgtgggggtgcagtaaccgcgccaaaaagggtaaggggaaccctgagtagagctaggtggagcgctctcataatgtgaaccggggtttaggctgctccacaattctattccagactcaactcctagagtaaatttaggagttgaagctctaccaaatagactcttataaagtacttagctccagacaagtataaaagattaaaagtatcttaactagttatcctctgtgtcttgagtgctaaaagagtttatactgcaagtagcgtttagattagcagtctcacgtggtggcctctctgaactctcacaccctagaggttctgctgccaaattgttttacttgcagctttctacaaagggtaactagcagatgttatgcgaccaggaaggacaggtcacatttggcatcttgcgagggatagttttgtgggtctgctttggggacccatctaggtatcccctgttaatgaccagcttagagaatcccttttggtgctgaattagttagctacttgttgtagatgctcctgttggaatatgtgtccagatctttatatgatgcatactccacgactagactaaagataaccagtaaaggcttttgtttggattgatgcccaaaagaaccttttataacaaaattaagaatactacaagcgttcaagtaaacccaatcatgcaaaatacgctagctatcctgctagtgttggtaatgattgtagaatttatccttagctaccagaaacttggtatggaaacaactttaatgtaaaaaaaaaaaatcagccctagcaactttcaaaattctgactttaatttgtcagcaaaattgttcaactttattaaccttttttggtaatggtcaacagatcaaatcaaacaacccataaaatctctcaaaattgggtattttctactactgatgtgtgttcgtggaggagtgcatgcgtgcgtatagcacatgaccttcgcgtccatttattattattattgtcctggctgttggatgctaccaagatcgcggcagcagaacagctaagcgagctcctgtagctggataacacctctcgggccagttgccgcgaacgcatctccttttatctggtgaaataattaggtaatcagagtacaaataaatttgatgtgaatcgttttatccccttgcacttaacatcacttaggagcacatatagtagcttttttttttgttgtttctctctttaaaacgtgcattagtaatagcaaaaaaaaaaacgacttgcatgaaaggttaataaaactctgctgttactcgactctgttgggtgtgagtgtgacttttgtgttgaattcctttggtttttaaggcatttacgttcttggtaaacgagttttactttaatatatgttgcaaaagataatattattgtttagaaaataaaaataatcaggagaggcataacatttgaatacattctttttttgtataatcttagattgatatgtaaaacaagctatagcaattactcccttcgtcctataatataacaacatcctggatacatcctaaaacaaactatgaatcctcatagcccctgttcaaatcgatagcagtaggatatgttattttagatgttactgtctctccattttgtattataaaactacgaatctcgatagccctcctgttcagattgatactagtatgatatttcatccgattctagtttactccgtttagtattataagttgtttgacttttttcctaatcaaactaaatttatttaattttgactaaatttatataaaaaatataatattactttcaaaacaaaaccttccattttgtgaagttagtagaagaggatagatccagtaaattgtagtacatacgaatgtcaatcttaattattgtagattaatacactggtaagggtcgatcaggcaaataccaaagctgactcccgaacaaaacaaacatattatcaaactatattcaatggtaaatttaatgaaactaatttcatattttagatgttgagatttttctacaaacttgatcaaacttaacaaagtttgactagaaaaagtcaaacgatttatgatatgaatcggatggagtatattttgggacggagggattacaatcaaggcccccccccccccccacacgcacacacgcgcacacaaaagcatggtgcacgaaatcaattataaaatgagttcgtactcttgcacgtgttgtatgtacgacttcggtacagaatcaccaagtcgttacagtagaccaaattcatttcactatgcacacagctctcctgtgtgttcctgctaatgattcagatccacttaattctgttgcagcagttggctaggcaaaaaaggtagtgggcacctctcgtaccacatttaccaaaaatcacatgcaaatgcgggcaatgtatcaagtactaacattatatgggagatgccgatagttgcagcttcaagaatctctagcttacttaaacaattcagattttcatttaaattttgagaactgtagttattgaatttagaaaatgaattaaatttggttgtgtgtctaaaagtggaggccgaaatgtaaataattttcactatctaaaggagaaaataaactagaaacaaaaaattagaaaacttattttctagattttcatcagctagctacttggctgttttaccagattgttggttatgagtgagggaactccaactcgaataattatatgcttggtttatcaagcttgatttttttttctaaattagaactagcatagattaatcttgttggcacgctttttaaattgttaaatgcgttttttttaagtaagaggttgtagggttgagagtgtcctacctcgttttaggtgtgtctgaaaaagctaagccatcgtagtcaaactccatacaccattcttagaccaggttttaaatactgtattttagaccataaactcaatatataatgatgagctaaaaaagagtttgggcatgtcagtagaggacccaagcacaagctctgtttggcgtgcaagttggcaccagtcctacatactgtagtactccaacgtacacgcccacattgctgccatccactgcggcagtgctgcttctgctggtgggccccacctcgctccgctgtggggcccacttccggtgggggccagaaattattgcgcacaagacccgcaggcccaatggcgagccgccacgtgtacccgcgcctcccctccccggccaatcgggaggcctcgtccctctgggatccacctgtcggtggcacagagacctccccacacacgctcgtctcccactacacgcccccccgcatatattcccgtcgccaccacggcgcaactgcgcgaccggaccgaccgagaccgccttgtctcctccttttctttccctacttttttttctccactcgtgtgtagtgaaaaaaaaatcgcccactttaatcatattccctctgtctcaaaatatgactgacgattaattttagcaaggtctcaaaattaaagtgtagtatttttatcgacaaaatcatttttcatatattcaaatgttaaaaatctaatggtaggagtactaattaaattgacattaacctaattgccggtcaaattctgcaacagtagaatcgcaccttttttaaaaaaaatttagcacggaagaaactaatatgattaattaaattttgcatagtaccggtactgtgttggatagttgtacggaaaaggctatacgtactaactttttcttactaaattcttactaacactgatgtgtcatgctatgagtgcatctagatttttttttaacctccatctacttaaatcaaatggttgagatgattgttataaaagtttagtaagaaaaatttagtacatttagcattgctcagtactagtgttgtgactcgactccaataataaaataataatattactattccatctattcatgtccttgcgaagccaaatagcgctgaggctactgcttgcagcaacaattcttccttttctatttccatatatagaaacaccaacctcctcatttcccccctgaccccaaccccaaacccactctactctactgtgcctcacctcttgccactactatttctagtagtcgtgtatcatcatttcagatatcatatcgccacctctcgtttttttaataatatcagcggcgagcgagcgagatggactccccgtcgcctatggcggcgcaggcggccgacctgtcgctgacgctggcgccgtcgggagggggtggtgggggaggaggaggcggcggcggtggtgggtcgtcgtcggcgtgcatcgacggcaaggacgtgcggctgttcccgtgcttgttctgcaacaagaagttcttgaagtcgcaggcgctgggcgggcaccagaacgcgcacaagaaggagcggagcatcgggtggaatccctacttctacatgccgccgacgccgcaccccgccggcaatgccgccgccgccgccgcggcggcgacgcccggtgggatgtcgtccgtcacgacgccatccggga

SEQ ID NO: 9100 - DNA, 7888 bp, Oryza sativa
tgatctagataagattcctaatgcaagcagcaaatttttggtgccaaatccatttggcgctaaagcatgtaatttgggctgctaatgcatgtaattaagcatgctaataatatggttaattctctcaaacttccttttaatcatttgtatatatggaatgtgtgcatgcaatgggttcattaaataaggccattgtgatcattttccaatcctactgttttatcctaaattagctataaatgtaatttttatgggacggaggaagtatataaaacgttggcaatggcttgaccgttcgaaaaaacagctttagcaagcctcacggagacccttgacaaggtcatcatgagcagtttagcacccgtcttcttcatcacaagctgggctctccattgtctccaagaactggagcagctacctgaactggggctgggatatcctccctgattaggcgaaaatgaaatgtcagttcactgaaaagtgaaaactgggagagaatgttgaaattacaacatcctaatcacagcagttaccttcctagaattcatgctaaaagcacaggatgcaaatgcaccatccatgcatatgatctgcaagaccgcaatcgacattcaacaggttacagttcaattgatttcaaagcaagcacaaccaatctccgcgaacacctgtagccctttgctcaggtattttgggtaagaccatgcccatctttcaacccagaaaattcatcagtacaaaacgttcgcaaagatcactttacccaacctccacaaattatgctacatataatttgacacaaagaaactacgcgattaaacatggcaatacaagcaagaacattgccacagtaggtataacgttgcttgatatcaaaggtttacattctcaatcatactgatactagcaaccgtctacaaatacaccatttctctaaactaaagcacaacgaaacaatcgcatcatatccggccatactcctagatccatcttcgaacattacacaacccgcatcaagattctacggctacatacagaaacatcaagacgcgtggcaccagcagcaacacgcggctaaggagctaaagaaaatctcaggcttcgagcgcgcagtgatctgagagcggatggggatgcgccgatgaggggagcagagctcagcgccgccgccgccgccgcggcggtgccgcctcctggggtttaggggggcggaggctggttgctcagctgggccgcatatccgcatctgagaatattgtgggcctgaatttttggcccttttctactaaattgtggcccattcatgagtagaaaacttacgggctcgtatacatggatgggctgagttttagggatgtatttgggaagataaaaaaaaaaggaaaaataacaatagtaactgaaatgaaattaaacactatactagtataggtttagaaaaccctaatttttgttgattcaagtctggcttatggccccccatatttcttggattttaaggtttgacaaaagaacccttccatgtaaaattttacagtcctatgaaattgtatttgcccaaaacagcaaacatattatatcaaaatgatgcaataatcttcaatggtcgacaagtttttttatggtagcaaagtcgagtaaatatgtgtttttgtagttgtttgagattaaattagattgagtattgtgaaaatctagaaccatataactcaagaggtaaagtctacccgtagagctcctcgttggcttatcagttaaggccaaattttagtattataacttacttttaaatttatttaaggttttctttttctccttttaagcattgggcgttatgttgctaagattaccagtagaagtacagctatgcctatttttcaatttataagccaggaaaaaagtacctaccaagcatgtcgctttaaaaagtatgatcggttttcttaaaaaaaaaactagcataaatggtttaaatgaccattgtgcgttatatataaaaaacatatacaccttccattttttgattggttgtcatatttgctttgtgcccggtaccaatacaaccccccatgacacttaatcagtattgatcaacgtgtgttgacgtttcgtatccatgcacgccatcatgatctgcatggcgcattggcctcgcccgcgcgtcgcgccaatttattgtgatcgcataaaatccatgcatacgaactactcccaaattgatttccgcaacacaccatacaaaagcatcattagcgtcttccacttgatttctgccagctcccaacgtcttgcgacgatcaaacatggatcttttttttattgtttttagcaatatgatgaccaatcgcggatgaagggactacatacgactcagacgacaaataatcaattgaactatttcaaataaaattaaataattaataaccttatttttatagacgagtatagatggtactccctccatctccatctacttttgatagtcatatttcatcttggcacacagaccaagaataagtaattctacttatcatccatttaaacatgctactagtcattctttgtaaataaacgattcattaatatttacatttctcaatgcccatgtagccaatcatgtgtgaaagaatggagagtcatgcattaaatccgagaaagtcattaagatgatagattgttgaattgaaatatgcctatcaaaaataaaatttccagatttgaaaatatgactatcaaaagtagatggagagagtattaagctatctactaggctgtttgaaggtactcttttttctctctcgctcttccctctacataaaagttcgcaaaccccctaacatcatgccattattgatgccctaagccaaacacttagtaataatattttacaatccttactacaaaatactccatattattttgtctaaaatgtaccctctaaacaacaaaacttccctttacgtaaaagttcttacttgtgtcacctactcgtataccctaacatcatgccattgttgacaccctaagccaaacacttagtgtaacaatatttttacaatccttactacaaaatactccatattattttgtctaaaacgtacctctaaaaacaacaaaactactttagtggagggtgtagttagtaaaaaagccggctttgtctcctcgtatatacactctctcggccttgctcggttcctcctgtcctgtctcccctctccactccaccgccgccgccgcctccgcgaaatggcgaatctgccgccgtcgctctccatcggcgccgcctccttcgccgcgccctcgcccccgccgccctcgcctggcgcctcctcgtcgtcgtcggcggcggcggcggcggctccgggggccgccaaggaccggaagatggcgtccgcggagcagctcgtgctcgacctctgcgaccccgagctgcgggagaacgccctcctcgacctctccaaggtctccccttgtcgcgagaagctatgcgttttctctcctcttcctcaattttcattttttttatcctcctctctctcgatcgatcgctgtgggctccggcgagggggattttatggttggattcggggggggggggggggggaatctgtacgtgccatgtggtgcctacgaaagttgcagcctttgtgatgtaatgctctgtctaggcaaaagtaggttgggacttgatcatctgatgctagtagtctgttctgaacgcagatcggctcacatgctactcatccaggggtaaatagcttgctccatctactgtttgatcagtgtttggtatgggaaaaaccagtcctttttttttgtacggagggttcttctctgggagttcgtggtatgcagatgtggtagcttattagtttcattacattctgccttccccatatccggcaatgacgagaatctagagattttgtgcaatccttcaattaattttagttaggtgaatcatataagctttatttgtgagtgggaatttgcgttttgttttgatgtctatgctgtgatgatgcatattcagaatatttgttctgtttatctgctatacatgttcatatctcctggttgcaaaagagttaattatctccagagggcatcctcagcttgcgatttctgtttctgtgtctgtgttaggtcacttgggatttctgtttctgtgtctgtgtctgtgttaggtcacttagtttgttctacttagggttgttcttattaaaatggatagtgctgtggttgtattctacgttctgttaggattggacagcagaaggcacagcccatgatttattaagagtaccaattaatctaagaactagaagatatacatatatatatatatatatatatatatatatatatatatatatatatatatatatatatatatatatatatatatatatatatattaagtcagaatcaccatgctctgtactttttttcatttaatcttgataagttacatattcactagatattttctttgtcgctatagcatgagtgtaaagagcaaaccaatcgtaaccactaacataaacaactactttttgcttaacagaacattaatagtagcccaaattggattttaatatgtgaaattgcttattttgctttttaatgtttgaagtcataggcaacaaatatagaatacatcattcttttttaaaattttaatttgacaactgtaacaatgaaaaattgaatacctatgaatccagagttgctaagcagttaaaaatatatgacttgttgaaatttttctccatcaagtcaacttcccgccaaattgtgttcttggtggcgtgggaccttgggagttccaatagcttgggtttgcattcaaatcctgggccagcctccagatgcatggtgttagcagatctcctttgaagcccaagccccacttgcagtgttccctagtcctctttagttcatgggtttgccttccataaaaacgaaaagggtcggcctgcaggtatagtggattggacaaattgatccaggtgcccactgtttccgacatgatccacgtagatgtaaaggggccgtggcccaagtaaaatggtgaggtccaggctgcgcctggaaacccaggcccaaaactattttgccaaatcggacatcgtgtctgagtcggattccgacatggcaacacctgtctgattctgactagtaagtacctcacaagtgtgaacacccaaatctgagtcagaccccgacaaacttatccttgtctaggactgtaggtacactttgctgaattgaatccatgcagcctatgagtacgaagatttgcttgggcataggagcggtgaatgaaatttgcaatctgctccaccctagacgagacaatgaaaacagtaactcacaactcatttttcgtttatgaatttaggcgtaactttccttattttgatgctttcatagtactcctaaatgtactgtttggcatcctgtggttacacaccctgaatggtctgatacaagagttaaatgtgtgattgtgcttttgtgtgcaagtgtattggggactgtttctatctatggagtggaatcttaccaattcagtgctttatggcatatagcttcttgaagattctcctatttggtagttgattagtttttccgttttgctgttcagcaaagaaattcataaatcattgttggtttctcgtcacgcctgaccattttgggaatagagattttgttgcctaacgattttcatggacttctttttccagaagcgagagatttttcaggatcttgctccactcctgtggcactcttatggaacaattgctgcactactccaggtaggttacaattcttcatgttgtttaagtcagtgtggttgagtacgaatggtagttcttccgaaaagaaattcatttgagtctttcatggttttctcattcagtttatttgtggtttggataatgcaggagattgtgtcaatctatccatcactttcacccccaacattatctccaggggcttcaaaccgtgtctgcaatgcacttgcacttcttcaggtacacctttacatgagaaagaaagaaaccttacgacagtgagaaatctctacttatgacactggtgcctcatgatgggatgagagaaggctattttttcagcatgttgcaatgcataaaagggggattgataaaatgctactacctctatccccaaatataagggactttgcctatgtaattacataggcaaaatccttatatttgaggatggaggtagtatcagcttaggatccctaaactgatttaatacaacatgttgctttctaaacttcattgtatttttattgcagtgtgttgcctcacacagtgacacaaggattcctttcttgaatggtaataagtgctgccatttttattccaagtattaaatatttccatgatgatactcattgttcaagaatatttcccctcttgcccaatatactatgttcacactattattgtatttattaaaaaaaaccatgtaacagataatgctgattgcatctatttagtttcagctgtgagcaatatgacctacttatggactatggcagtcccaatgctgaaaatttcagataatactaatcacatctagttagttttgcgcataggaatgttcatctgtatgtggctttatgcttccagttggctattgtgagtgacctgtttcctctcttgatttttcccttcttcttttcagctcacatcccactgtatctgtaccctttcttgaatactactagcaagacaaggccttttgagtacttgaggcttaccagcttgggtgtcattggcgcacttgtgaaggtaattgcaagccagaactttatgaaaattatgagggatatgggtgtgtttcttgagtggaagcgtagatttttaaagctagaccattttctgatctactaagatccctattcagctgttcaggtgattgacatgtggttcaatttaaccttacctatgctggtggggtgggcacttcagcttctacatgttcctcttttgactcccttctacatgactttttgggaaatattttggcctgaatttataagagtatcattgtgttcacgtatatctaatatgagtctataactttccttattccaacaacttcacaattgatacacttcgggtggcaagccctcttgtataagagaagctgtgagtttgaactacttatttggtatatctagtatattatattctttgcctgttattttccttctgggtttacttctggacaagctgcttgttcaattttttctctgttcttgaatggtggtttggtccagttctcaaaactatgttgagagggagggggtgaaagaaaaaagaaaagatggtgcaaatggtatggactatgggtagaactttccctttcttcatgacagttcttgtggacactggatacttatctagtcatgctgatcaaatggcctgatttgggtttggatccccaaatatccctatgtgaactgcaaagtttgagccaaacaactcgatgatgttttttttatgggcatactaccaggtttaagccctgtagttaattttataaaataagatggtaaaaccatcaacagttttacagagtttgagccaaacaattcgatgatttattaatgatcaagttgcttttaccagactttgattttgtcaatgagcatactcaataagttaattcggttttgttttgcaatatatgcaggttgatgattctgaagtcattgggtttctgctgcaaactgaaataattcctctgtgtctccgtactatggagatgggcagtgaactttcgaaaacggtgtgtagctacctgcctcctttctctcttgtagttcttccactgtttt

SEQ ID NO: 9101 - DNA, 11949 bp, Oryza sativa
cccaccagaagagagctgtgtcctcgtctcgtctcgtcgccggcgaagctcaccgacgacgcgacgccaccccagccgccgccgcagccgcagcccggcgaccggcggcgccgcccccggctccctgacccgccgcggccgcacgggggtaaggcggttcccctgtcggggctctcgccgcaggtacgcgacgttgcctcttcttgttcgtttccccccgtgctccggcgatcttttcgccgttccagatccgcctccgctcccgtgctttgacctggcgttgcgcggtttaactttttgctatcttgattaagctattttgggtggtcatctgcctgtcccccgattgaacagcagggatcgattccttgttggggttgggcatttcggctttgatgggagacgccaaggaaggagaagaggagcggccgcgctgcgtcggctgtggccggcgtgtgaagacgctctacatgcagtactccccgggcaacatccgtttgatgaaatgcgtaagagagggactagtgttgttgattgggcatgtgtaaatcctttttgtcatgtgcgtgtaatctgtttaagtttggatgccctgttcttgtgcaggatacctgcaaggctgttgctgatccctacatcgagtgcgagttcatggtgcgttaatctagcagtgatgatatcgaatttctcgccatacttgtgtgatccgattgtttgcatcacatatgcagtttatttactgctgaactgatgcattgagttgagcatttaactattctttcttttttttcgtagataatcttgattgatctgattctacacaagacaagagcatatcgtcatcttctatttaataagttgaggatttattcatcacttgacaaggtgggaatcatatggtattcaaactcgttcacatgctacttttagttaaaatgaaaaaggaggtgggctcagctcttttgatgtttacttccgttttcttcaacaatgcttcttcctagttttacctgtactctgtcctgtctgtctgtcatgctgctcaagaattattagcttcatctgtcttagatctgcttgttagttagtatattcttggtgtctatgttctgtattacatgatatctttagccatttatgccttgtcagtccatctgacaatagtttaaaatagccaatcccatggaatacacagttttctattcattcaagttataactgcatagtttggtaacgtttttgtaataactttctgtcaccttatggtagttccattagccgttattccctgatattttgaatttgtttaatggggtatgtcaagactcaagagttacattttcctatgttcctgatttttgttcttttcagggagtactggtgttgtccattctgacgcatcttgttcttgatgcatgtatccattctatttataaatgttcatcttcaattttggttttttttatgtatatattcaacttaagcaccccttaactatgtaagtcagaatatctttttcaagaggcaacatagctgatggggattcttccataaacatattctcagcgattctcaattgcagcaaggtaattaaagttgactgcattgagaagttctatgtttctgctgctcattaccttagtaatgtatccggtgtctattattcttcaggttctgggcgatgcattgttagggaacatcgtatttatgaccatgttattcctggaagtgcaatttatcctaaaactatcttttgatattagaaggtacattgaatacctgtgatgtggaaatttcaattacatttgttggtagttcattacgcgcaaatgaattggtgtattctcaattggaattatgcaaccagtagggattctgtaatagtacacttctgttgtagaagatgaaaccatatcagaatttcacattaaatgtgtcatgggttaacagttgcgcttactttgtcatttctcaggtatagggaggttctgttagccgtcatcatttcaagctacttcaagttatttctcatggcaatgatggtatagaagatttttgtgatgatttatttctaagttttatttgacttttttatttcctttcacgttcatcatcaaattttgcaggtttgggagtttccgtcatctgttatattctttgttgaaatttctgttctctcttcaaatactgtagcactgagaggtaagtgcacattttctttcctcggataattctcgtctttgtttatgacaatttaaactgttgtatcaatgttgtttagctgttcctttttcttgtgctcccactccagtaacattcatgttccctccattgggtatatagaacttatgcagcatccctggtcattgaatgtagctgtgttgaaaagcatgtagaaaagctggaaatcgtagattttagtgtcattactttatgtatgttgtgtgaactggcactgaattacagaatcctagtaactctgcagtccttccacaagcactactatacaatactagggtgaaaagggcacctctgttgtcacaatctccagtgattggatcatattgattaccaaacatctgcatcaaataattgaggttttgcacatcccaccgtatcacacataattgattgatagatgcctcagctttattgtttccatcttctagatttttctttgaaataagctgcaagtccaatacagaatcaatagtatagtgcgtttatcactccgatacttcatatttgaattctggatagataacctaaatacaaacaggttcatcgttctgaagcattaatatatcgatgcacccttctctttctagaaaaaagtactgacagggatgttctttgatgaataggaacctaatacatagctcatactattgatgatcacaatgttcctgtttcttttgcagttgtgacggagttttcaaaggcccattgcttcggagtctgctttggagcgcacgcagcaagatacctgactgagcgatggcttctcggggcgccatgaacccaaccgccgtgcttcctgcatccatcaagctccctgtagctcgtggtgccccccaaattcatcaggattcaggaccacccgccatgcttcttgcgtccatcaagccccgtgtaggtagctgtactccccagtttatgcagcatctaggcatactgtgccgctttgatgagcttgctctgatgaaaccaaatgtgatcatttgcaatgcactcactgactatgatacacactgttcctgtgagttgcaactggagtgtctcttaggccttttgtacgagatgttgagcaatcctctcctagtttccccatctaactggggacagtacattactttatggctggtctattttcttgtacttatatgcccaacgcagtagctgctgctgctcctgttcagcgaagtacgcaatgaaagggcctgttcaccttctgatgattgtaacggtggcttctgaagaggtatgttccctttgttccatttgcaatataatgatacgaatacatacaacatacagaataaggttctgaatattactcttaacaagttaggctgcagcagagtttcagttcaagagtctgaatattactcttaacaagttaggcagcagcagggtctcagttcaagagttttgttcttcagtgctctgaaccttcttgaattgaacatgtccctcttttcctgtgctccttcccttccttttgctgcttcgccaccaccaaatgcttatctgcactaacaccaaacagctccaacaaatatgcaatctgcctcctaatccacagttttgttaatcacctgcactgaggcgagaactattataattcgttcaccctgctcatgatacatacaagatgatgtatcgagtagacggggcacaaagtttgcttaaacaaaattacacttttccccggaatttaaaaaactcacacttttgtacgtaatttgcgctaatctgcttgtgtaaagcatcgcattatcggttgggttgcgatcatcgcggccggcaccactgaaattaacaagtggagtacgtgcgcacttgtttagtgtgaatgtgtggtagctttggtcgtgtttgcttcagtcttctgtggagcctccactttaaacaagctcctctcacaccatcatttttaggattaggacaaataacacactaatttttaggataaggagcacactatctattgcgatgaaaactagaccaagtcaagaattaagacacgagaaatagatttcttgttttttttttttgctgaaatcgttgtacttttagtaatttttttattaatgtgtagttggaacaagaaagttcagaatttgtgtgcttgaggcaagcggccagcaaataagaagaaatagatgaagcatcatcaaggctttcttttagctgtttaatatttgttgaaatgatcactgtagttagtaaaagaagttgcaactaattaatctccgcaacttttgacgaatgttgcaataattatggattcgggtgctacaacttaattagtgagcttaagcacatcaatgcgttacgtgttacgtcagatttccttagcagctatgagaacctacactcacatatgtcacacaccaaacgttccctaaagctaactaacaaagcttaaattctacagtagcaatgagtagctagcggcgaatcgtatcaagaaacaaggtgagtaaaataaataatataatctaaaactttatgaaagatacttgtcaagacataatactcttatatcctcccttgaccttcgtgttgtgtaactttcttatcatctactactatagctagtgctgtcacctttcatcatcttccaacaagaagtggaattataatatggagttgagcctaatcagtgtgcctcaacttttttttttcttttttgagacggtgactacttatgatcaacgcgggattttgagttctttgtctgaagaatattttatctttagaccgtaagtcaagcaaaatttagtggccatggaatgtggctctcttcaaccgagtcaccaaattacatgatcaacggctattaatcatcttgtgcacccaaccttagcttcaaagaattcttccttgtgcatgattgcactgcaatatatgaaatctgaccagaaaattccttgtcctgtcatgtagatttcagggccatcactggttgtaccggacctactctattttaatttgggccattgcaacattaagaaaccagactcaaagcttccaaactgatccacaatacaatcccaaatcaatatcgttatttcatttgcaaaccaataatttgaatttttaatttttaattggatggcaaaataagcagcataaacattaatatttttagcttcctgatttaaatttctatctcttgacaccaatgatatactcctaggtaaacagagaggggaaagatgtcataaaatgaatctgacaacattaattaaccataaatttagctgacgttgacatgctagaaagattaagcattagactggggaacaaagttggtcaagcacccgtgctagcttacacttatatagctaataggaagcttttgctgctaaatgtgcgccccaaccaccacctagctgcgtctaatttcccatgacacgagatcgatcatatcgatgcctctaaaatccttaattaggtcgaaacacaacacgccaagacgcgcttagccaacacacatcaagagaactaattaatcacatcttaattggtaggagaagtccaatgctgattaatcattaaaagggatgcaattaagtaggactctgagatcttcattggagcaaatgggattcatagactggtgatacctttgttcccagtgttgtccatgtacagtcactcggatttgacgccctaacaatacataactagtacttgtcatgcatattaactaggaaattgatcttagctaggccccaaaatgatagggggacacgctatctcgtgatagttattgacacctacggcccattacatagaaagttacagttattttagacagaattcacggcccagttagttgcaagaagtcactgtgtcaccagatggcctacagcctaccagtgaccagccaccggccgtcccatttatgtgttaaaccttgtttggatgagcttatatcaggtacagtttctactgtaatctctgaaaatgatttgtgtaactcaagtagacatacactcgtttcatgcatatctttcaaaatgttacaaaaatgtttttttataaaatagatatcactacacaaacatataaggtcaaattcgacttatataatttggaaaagaaacaacaaatatcaactataaaagttacgcacgtttgatagccacatttatcatttgtgtttcaactcatgtaagtcgaatttaaatttgtatgtttacgaagtaatatattacatactgatcaaattgttttaattttttatgactttttgagtgacacatgaaacgagtgtaccactcaagtaaaaaagaaaagctttcccataatctccaccttctcaaacaataattgagaagattataagaaccaatcactgcataaggtgtgcatgtgtacgtttataaagacaagtatgcgtgtttgtgtatatgagtgtgttaaaaaaaatgaattcagacaaaaataaactattaacaagaaggcgttagctaagaaattacacactttatttagattctagctggtttagtgaccaaattgtttccaaggccttacctagctcttcctcgccaaaagaaaaggaaaaaaaatgcaaggggtttgcttttttctcttcgtttttttcttttatactttgtggacatggggccatgcatgcagatgtttttttctctaggctttaggaagccacagcctctaggtatcaaccaagcagcagcagatttccccagcaccccacgggtgattgcccccatctgaaataatttaatcgatcgttggcaaatcgacgaaaagtaaatacagtagtggattgttcgtagctgatgcatgcttataattatatattcttgcaattatatatctaccccggccaatgcaggagcaggatcgacgacgtgatatattccccggtctgtggatcgatcgatctaccggttgctataaagtgtacgtgcgtgcagtgaccataggataccggcatattgtcacgttgatatcagtccacgcatgcagccatgtactactcgtgtttagtttctgaaattggggagaagtttggggaaagttgttagtttggaaaaaaaattgagagtttttgtgtgtagaaaagttttggatgtgatgtgatgtgatgtaatgaaaagtttggtgtgaactaaacacaccctagtactccctcagtaggcagaatataagaaattctggtatttaaatcttgttctaaactgtagaaatttctaataccattccgttaatcacccgtcatttaatttcttttctatcttacctctactcgttaattatttttttcttaatattagcttaaaaatgcttatattcttaaacaaaagtactactataagaaaaaaagataaccaaggaggaacttaattatcaaataattacaatcgtgtaattaattgggaattgaacagagtacctcggggttaaaatgacaagcactttctatcaccgctatcaagtgcatctggggatattacaataggcatctgcgtggttttcacatatcctatgcgtccactgggcccaggaggcattggcacggcgagtgtggtggcccggcggcggcggagggcgcgccgacgcgtcctgatcggggcgggccggcgatgtccccggccgccccggcaagcacgcatatgagccgtacaccccgtgcccccggcgtctgcacctgcgtgtaccgctcgatcgcatccgtccgcgtccgtatctgcatgcatgcatgtgtgactgtgtgagcaaaaggtttgcatattactttttctgtttcacagttaaaattattctagttatgaatgtgtgaaatactaaaataactttcatcgtgaaacggagggagtacgttgcgttgcatatgaatcggcttgtacctgtgtggctgtttggtctggctctcgtactaggacacatgcacatacgtataccgggaggagcaaccacgtacgtacgcagcactgccaactacgtaatcccttcactttaaaatagacaaacataataaagatacgaatgatataaacttcttaagatttgtagtattaagaatatatcatattttatattaaatttattcattttacaacgaaaggatactacgctagctattacgaccatacgggtatctattgaggtgatctgtatggcattggcttcttttcaaaaaaaacatgtatggcattggcaaagtggttcagataatcctggcagagaggcatgaattgtttcgctcaaccagagcaccatgaatcgatcggccgggtgcattgcgcacgttgtctttggaattgacggatggaatcaaccaattatagttttattacctaagttatgctttgggccatattttattacctaagtttcactttggaccacacttaaacatatcttttcactttggatcggataaatttaccattgttacgatttggaccaccacgaacgattttttttctcatgcaatcaacgatcttaaacacatcagctctaatatacggccgatctcctctatatatggttcatatgtttgccgaaagggaagttaaacatgacgagaaaagttgttcatggtagtccaaaccgcaacaatagtaaatttacccagtctaaattgaaaatataggtttaagggtggtccaaattgaaacttgggtaataaaaggtggaccaaagtgtaatttactaaaaaaaaatcaaccaattatctccagcaatggatcggagtgacgtccacccagaggcgaagccaggatttgagattaggaggatgtcggtgagggtaagccataagagttgagaatgaataaccaatattaatattgatagtaaaaaaagggtcaaatagttactctcaataacaaccaatgtttaaactaatcctttaaaaaactggaattttagccctttaataatatcatccaaagtttgaaactagtctttaatttattgctaaattcttttaatgtaaactattgaataatctcacaaataagtataatctattttactttgaaaaagatgagaaatcacaaactaattttgtagatcatgtttcttgctaatgtttttagacttactaactaactaagctgataataatttcaagctacacaaataaactagataaatacttattttagttaatcttaatatagagtaaaaacagttgggtgtggtggtggtgttcagatggggggtgttggcaccctctagcaatcccctagctgcgcgactgcgtgtctgcgtccaccatccacgggcatcacgtaggcgcaccatatgtataacttgttgcatatatatgcatgcaatatgcacattctcgacgtttcgaaacgttgggttaaattttataactttgactattaattattttttaaaaaataataaagcaacatatattgatttatcttacaaaggactataacaaagtaaaattaattatttactatatacactataataaaaatatattttaaagattatgttatattggaaacatcaataattatgaaccggatgaagtaaattccgtgaacctcctcagcttctcttgacgccgcatcctcacattctcacctccctctcgagtctggaccatgccccagctttaatttgctggcggctcacctctttttggtgtagatccatgcatgaccaccaaatcattctgttcttgatacctcctcccttccgaatgtgtccatcgtatccgtgacaaattcatccccccaatccaaaatcctaccaaacgtcgaagctgtcatggcttcctgaatgatttttggtcaccatactagtagcacacgaccatgcattatcagctcattactgtcggttcggcttgaaccaatggcgattggctgtgtttggaactccaaattcccgacacctccctctcattttccacgtgcacgtttttcaaattgttaaacggtgtattttttataaaaagtttctatataaaagttgcttaaaaaatcaaattaatttatttttttaaaaaaaatagcaaatacttaattaatcatacgctaatggaccgctctgttttccgtgcgggaagattgggttcccaatcctaaaatctgaacacagtgtgtatataactatataccactgacggttatcgccacaaatcggcattgcttcgaactgtttggatgcctgacgtaaaagatagcggtccgggttttgaattggttggctggtcaattggactgcccaagggtttaacaactatccaaggtcccttctttttccccgcaaaccacaattagagaaacggatttgctaaataatggaaaatactataggacgatatcgtgttaaataatgagaaatgtccaaacgtgctaccgttctgtatcatttcccggatgtatggattgaacccacgatctcaagtgtgcatgcttgggtccctcaccaaccaagcaatgacacgattccaatcagttttatgccagttacattgtaactataattataccataattacatgtaaaagtttttcatccaaaaaatggtcaaaagttatatagctaatcccttagagaaatgaccccactaagggcctctttgaatcgcaggattgagaaaacgtaggaataggaaaaacgtaggattttgataggaatgtaaatgtaaagcagaggattgtaaaacgcagaaaaaatatagaaatgaccgtttaattgagccgcatgaaaaacgcaggaattggatgagagagatagactcaaagaaaagttaccaagaggttgaagctcttgctaaattttctccaaaatctctataggattgtccattccataggaattttaaaggattgtgaaggattcaatcctttatttcaaagggctttataggaaaatttcctataggattaaaatcctctaaaattactatatttttcctccaattcaaagggtcctaaaatacaaacagtaattgatcccatggattaaatttctagttcaaccactggagttctaaaaagaaaagttcaactactggtgacctagtgcacgaatcttgatgtcgatcaaacggccaaaattcgcaagatttagggctgatttggtttgaggccctaccaaaatgttggtagtgccatagagtagatttattactatttagccaatccaaatactatcatgaagctactaaaatattggcatggcacaaattagcactaatccaaacatgcccttattgaaccaaatcagccaattaatactcctcaatcaccaatttaccacccaaatacccggatccaattcttgactcgacgcacgagttacacacttaactacacgagacgacgaaactcgagtaattaagcccagccagggtcatatcgttacctcgccgccgcaccggtgagtgtgtcagtcaacgccacgaacccaactccactcatcctctcatcccgcctctataaatcctacccgtacgtgctaccaactgctcgctcgatcgatcgcccacacgcgctccgcacgtcgacgcgcaaaacccctcctcccctcccctcgccggcgatggagccggccgccgccgccgccgccgggcagctcgacgtggacaagctcacctacgagatcttctccattctcgagagcaagttcttgttcggttacgatgatcccaagctcgtcttcagcggcggcgacgagccgcagggggcggtgaaggggactctggcga

SEQ ID NO: 9102 - DNA, 9676 bp, Oryza sativa
tcttcccgtgccacgtccgagtcaccgcatgataccatggaaatgaaaacctgtctaaatcatttgctccttccttaaccacctctcctactcgtggatttctttttgttcctttctttctcctctcctctcttcgtaccccctgtcacgtagttcttgtttactctttccattaggtgtcacaggtttcttctcctcttatccttcctttccatcggttcttgtacttggtggtatacccctagctgctcgcctttgtgttaatttggttggattgggagtttcttgttctctctttagccttgagcgatcttggtttcttgcaattagcctttgactgcttcttcttcttccacttgccgccggcagctagaagtggtccatcgtaccaaccctttcgtcctcattgaaccattccgcctcgctcccagctccattactagaagcactagagctagcgtgaatgcgtgatccttgatgcgtagttagcagctagctcctgcccccaatctgccatctccgcattgcgattttgagtttttgagattgtaatttgcgaacgatctcggttgtgctgagagcttagcgttgacttcgatgggtgcatcgcgttcgatcgccgattctgatttggtcgcgtgatccgggggtgatcggtgattactccgagcgggaggggagatcgtctcttggcgcggttgcgcttcgccgcgcggagggagagacattcgcggcgtaatccgaaggtgtttgttggatcgaggcgtggtgtccgagaaagattcggagcggcggcaatggggaacacgtgcgtcggccccagcatcagcaagaacggcttcttccagtccgtctccacggtgctctggaaggcgcgccaggacggcgacgacgcgctgcccggcgccaatggcgcccctgacggcggcggccagggccggttgccggcgccgccgccgccgacttccgacgcgccgctcgccgtccaaaacaagccccccgagcacgtcaagatcgtctcgaccacggacaccgcctccgccgagcaggacgcctccaagtcgagcgccggctcggactccggcgaggccgccaggccgcggccgagggtgccgccggtgaagcgcgtctccagcgccgggctgctcgtcggctcggtgctgaagcgcaagacggagagtctcaaggacaagtacagcctggggcggaagctcgggcaggggcagttcgggacgacgtacctgtgcgtggagcgcgccaccggcaaggagttcgcctgcaagtccatcctgaagcggaagctggtcaccgacgacgacgtcgaggacgtccgccgcgagatccagataatgtaccacctcgccggccaccccaacgtgatctccatcaggggcgcctacgaggacgccgtcgccgtgcacctcgtcatggagctctgcgccggcggcgagctgttcgaccggatcgtccagaaggggcactacaccgagcggaaggcggcggagctcgccagggtcatcgtcggcgtcgtcgaggtgtgccactccatgggcgtgatgcaccgtgatctcaagcccgagaacttcctcttcgccgaccagacggaggaggccgctctcaagaccattgactttggtctctccattttctttcgcccaggtgagcgaatcacattttcttttccttttttcttttccagaatggcgcattgaatttagtatctataactgttataacaaacaagatttccaatccattcaagaaatcacactgcatctatggataagtagagaatgaatatggcctaatctttcatgtactgatttgatctttagtgaatctgaagttcttgagtttcagcatttgtttttgggacaactgcattattgtgcttatgatagtactaatactgctgtgagattttatgcttcagaacttaatttcctttacctacatttcaaagttttcaacaccatttgtttctgcataagttctgcaaaaagtttggctgcatatctttaccattctgcagtctgctaccatatcattcagatgaattcattctccattgggtttctactcatatgccattcttattccaggtcaagtattcactgatgttgttggtagcccttactatgtcgcgccagaagttctgaaaaagaaatatggtcaagaggcagatgtctggagcgctggtgtgataatttacatcttgttgtgtggtgtgccgccattttgggcaggtaagaattttgctgatttttcagtcaatcacaaaacaattatactaactttcgtgacaaaatgtgatgtattttgatccgaactcttgtactaattaagctctccattgttgtgaatcagagaacgagcagggtatatttgaagaggttttgcatggtagacttgactttcagtcagaaccatggcctagcatctctgaaggtgccaaagatctcgtaaggagaatgcttgttagggacccgaagaagagattgacagctcatgaagttttaagtaagttacttgattaattttcatgatatattcctaaatgtatttttctagctattttagtagtgcagggctgcaggccatgaacagtgcagtctgatttacttggcattatcatcttttcagggcatccatgggtccaggttggtggtttggctcctgacaagcccctggattctgctgttctatctcgtatgaagcaattctcagctatgaataagctgaaaaagatggctcttagggtaagtatgacttggacacaaattgttactatatttctgatttctctatgaaatattttcccaatattaggatagcaccatcttgtcgttggccttttgtcctcatgcaccaaaggaaaatctgtttggagtttagctcatgcaagatacagtacataatcattttaaaaaataagtatccaatgttgtattagttggagaatgttgttcatcttgaatggttcaatcatacttacctgcatgtcctgatacctttgttgattccaggtcattgcagagaacctatctgaagacgaaatcgccggcctgaaagaaatgttcaagatgatcgacacagacaacagtggacagatcaccttcgaagaactcaaggttggtctgaaaaaagtcggtgctaacctccaagaatccgagatctacgcactcatgcaagccgtaagttcttaagcaatctaccaattccgtcgagtacttttacggtggtctctactggtcgaaaacatcaaaattgcatttgtatctgaattctgaaatggtattattacaggcagatgtagataacagcggcacgatagattacggtgagttcatcgctgcaactctgcatatgaacaagatcgagcgggaggatcacctgttcgcggcgttccaatacttcgacaaggacggcagcggctacatcacggccgatgagctgcagctcgcctgcgaggagttcggcttgggagacgttcagctcgaggagatgatcagagaagtcgacgaagacaacgtcagtaaaaaaaaaaaagaacctacttttccattccattctgatcgaagctagctaatcacattgcctgaaatgcttgatctgacggaactttcgctgttctttttcgtgccttgtgtttgcaggatggtcgcatagattacaacgagttcgtggcgatgatgcagaagccgacgatggggctcccggcgaagaagtccggcgggctgcagaacagtttcagcatcggcttcagggaggccttgaggatgtcttgagaaacagccactagagtcagtcacacacttgtagaggcgacgacaacgagatcgatatgttgtcttccatagggctggtaatttcgaaacggggaaaaaaatggctggaggagatgtgcgtgtacgtacaggcgtagaggggggtgggtcactcttgggtcattggttcgattgttttcttctgacgttaaaaatacaagagaggtttttcgttcctcgccgccaccgtcgttcatgtgataatccttggccccctcgatcccctgcgcgcgatgccattctggtgcgtgatttcgccgtgtgctaccgtgttttcggcgggcggagcggacgaacgcgctgtaccgtccaaccgcgcggcgtgtgctgcaaagcgcgcaatcgctcgtaataaaacggagctccgatcgcgagggcaaacgccgtgtgggggacaagggcagacacgtgaaatgaagccgttttttgtccttcctgggttattacttccacttctttctcccagcggagcggcacgttggtttcggaggccgtggcactgtcgctttgcccatcaatccgcccgcccacgggcgcagatgcagagatactactggactgctacgactagtacccgttgcgctgcacgtcctgccgggaccaccaccagactctgaccttctgcacgttgtagtagtgtttagcgtttactgtaactctctgaagatgaatctaccactacaaggcgatcacctgatgcagtggtgggcaagttatgcttccttgctagtacagtattatagcaacctgcaacctcatataagttgtagtaggccactactccctccgtccaaaaaaaacaaaacctgagtttccgtgtccaacgtttgtccgtccgttttatttaaaaaattatgaaaaaaattaaaaagacaacacgtataaagtattaaataatgaaaatactaattataaaaaaattccatataagacggacattcaaacattggatacagaaacacagggtttgtctttttcttttgtcaaacattggatacggaaacccagggtttgtctttttcttttggacggagggagtagtagagatgctgtggtaataggacacccgcaatggttatctataggctctgtataagatatatatgtcagcatattttcctacttgaaaaagattaaatgaagagagagagcaaagctatctactaaactggagatagtctatagagaaaaacgaagcaatagattagagagctatagatacccatgtagacatactattgaggtggtttactattaatctagtctattgctgagatgtacatgttttatattttatagagagcaccttactttatcattgcgggtgctcttaggcgaagacgattcacattagctgtcactttatttcattaataacgacgtcgttgcttcttagttggagcatctatagtttatagttcagcaggtacatcgtgtattcatgttctcacgctgattagtccgctgtcccgaacgaataatgcaggcctgtacgtccaaatgacaaatcatagcctaataatcttcagagaataagattcgcataaatgattagatctatagaagatgcagaattgattactactagctttaacaccaaggatgctgtgatgtttaattgtttactcggcattctgtcaaaacagaaaaagaagaaaaaatgacggaaaaaaatataaaaaaaaacgctcctatacacagaagatctcggtcttcaagtatgaacattttcctgcctttttttttttcagacaccaacagccaccagattacattccccacctgatttattattcgtaataataaacaaaaataaaaataaaaaaaaaacaaatggtaatgtggacggctccagcacagtccatcacctcattctagttcgtgtttcggtatcatgagatcaatctttcgccgtctactggcagcttgcgaatcgcaatcgctgaccaaggatgccagccatttggcacgttgcttctaacaacttgcctgcagtattttaaaatgaacaaagcataagattattattatcaatgtgtgattaacacataacgacactggtgttatactgaagggaaaaaaagctagaagaatatgaggctggggagtcagacgattaatgttagattatgtatcattagataccctgtcaattcaacattgggtgcctataaaatttttggcatttttgttgttctcaagatgtggcaatggcttcatgtagcttggactcaaaggatacaagtagtaagcaataagctcaaataatctagaccaggcaatagcaatatctaatgtcgaaatcacaagacaactgaaaatttaggtcatgaatacccaagaaatatactgccatatagttctataatcagcatcacaccacgttgcacacctaaatgaactaatcaacaaaaggaatatcaccaagtgatcaaggttcacaggcaccagggtagtttatcttactcacgaatccacaatccgtggccacccaaccatttctatggagcagtatatatattgctgctcactatcatctaattcttgagattaaaatcaacataagttttcttcagatcatgacaacttatagatgcttggcatactttttgagcacaggtctaggaaaatcgaggggatttagattgatcttaactatctatatatgacctagatcatagaaaaatacatctaagacaaaattttatctttaacatacatatgtaggttttctacttctgtctttgttttcaccaatcatagtccaaaaatagctcgctctaacatcagcagcattcgcatacaaaggcacacagtttagcaattgccatccctcaacccataaccaatccaatcaggctactaccattccaccaaactctagtaacaagatgtggcaaaggcttaagcatgagccttttgatgctttgggggaaagaaaagctgttgctcatgtgtcacgggcagagcacaattcttgcttgcagtcccaggtacagtatcaagagatggtaaagacagtaacccaccagcacacgcacaattctaatgtttcagtacacaatccagtgctaatatcacagaccagccagctatgtgtaatggcctgaataaaatgtataagtgcatagacaccaaagagaatgactgcaactttggtagtattactgaccacatagtagcaagtgcccaaacgggcaccgacaggccatatgccattcagaacggcaataaccctaattgcttctattttatgcctaagccttcgtctttattccgcccagtacacaccacccaccaatcgattaattaattaatccccgccgctacgatcagaacacttaccggtagcacttacctgttcctaccggtgaagagtaaaccctcacactggcaacattactagcatcaacccgcattgacttaagcaattgcataaacaaaatcatctcctaacctccccaatctaggttgtgaactgtaaatttctatggcggatttgcacgattaataattgagtagaaaatgcaagttcagatctgaagagaatggctgacctctccggagtttgttcttcttgcgagtgccggtgacggcgggcgccctcctgaccggcgccgtgtccggcgccgtcttggtgtcatccggcgggaacagcacggcgtcaatgccctgcactgcgatcctgccatccgtgtagatgtccgggtcgaagagatacgccgagccctcgccatggccgaacttgactgagccgtcggcctcgcgcgccaccaccttgtgcggcagccgcagcgtgtcgtagcgcaccttgccgaaccgccgcaccgcgttgtacatgctctcctcggtctggtactccgggatcatgtggtagtacaggatgttctccggcgagccgggctcgctgagctggtcggtggtgaggcgcgccatggcctcgtcgttgggcgcgagcacggtgagcacgtacccctcggagacgagccggcccatctcggtggcgagcgaggtgaggttgacgaggatgtcggcgagctcgttgtagccgccgtacaggaggagggtctggatgaagtccttcacctggctgtggccgtcgaagtggtgcttcccggagcccggtccaggggcaggcgccggcgcgatggatgggccgggggccatggcgtcccagatcggaagcaccgggggcgcgccgggtggcacgggcggcgccggcttcttgaggcggtgcgtcctcgggtcaacctcgggcgcgccagttggcagcacggcggagatgtcggcgaggctgcggcggcggttgaagtcctcctggacagagcgcggcacgaggaggcgctcgatcccgtggatgacaccgtccggcctgagcacggcgtccgggcgggtgacggcggcgtgggcgacgcgcatcgcgccgtcgttggcggcggcggcgagctcaacctcctcgccggagagcgtggggtgggagacggcggaccaggacccggaggggaggcgggcggggaggacgtggaagaggagcagcgactggagcgacttgaggttcctcggctcgagcaggaagcgcttgaactccgggtcgaggtcacgctccagcgcctcgttccgcggcgcgaagatggtgacgttgtgcttgccgacggcgtcctccagcgtctggagcagcagggccttctccaccagctccgccagctccgtgtaatgcgagtccagcagcgccaccagcaccgagttcgagttgattcccgttccagcaccagcgccagatgttgtcccgctactagccgccccatcggcggcggcggagggcaatgtgggttcctccggcgccgtctccgcggccgcgccggcgagaagaagcaagaagacgagggcgccgcgcaccggcgcgcccatcgctgcggcggcttctcctgcccgaatctctccggatgcggctacggctgctgctgctcccaccgctctgctactctgctagctactctccaccactctggtggttcggcgaaggaatgaattgggggaatgggggagaaaggaggagaagagaagtaaactagtaatggaggaggtgggtggtgtgagcttttctcctctttttctcactttcccctccttttttactccaacggaagagagagagagagagagagagagagagagtgaggtgtgtgtgagcttgcttataagtgaagagagagagagtgagaagggttgtcgaagtggaatagtggatgcgaggccgaggcgagaccgcgagacgaggaaggagaggagaagacgacgcagagtccgtggttggtgggggcagcgtgcagcggcggcacaggctggcgggtggagccgtggagaggggccagcagcaacaagtgtcggtgtgcagctgtgcgtgcgtgcgcgcgcacaaggttcgcctgccgtaagcaaggaaagtgtgggcagtgggggcattcggtcgcccgccgctcgcgccttgtctcgcggctcgcgcgcgcgcgcgcggcgtatgcaacatttcgccgtgccccgcccagacgcccagcagcgcagcgcgaagccgagccgcgaatatttccgcgggtttcgcccgctttctgccgcgcgcgctgccttgcacggagacacagtgcaggcgtgcctggatttttcataatttagtccttttaaaaaacttatttcgtaaatagacctaaaaaaacttaaaatggtcctttttggcgtcagaatggctggcgccgtgatccaactggacagcgccagccactctagcgccgtcctcctgccgacgtggtgggacggtgctaaagtggtgggggagggcgggtggcgcccccctc

SEQ ID NO: 9103 - DNA, 7853 bp, Oryza sativa
  unsure (1)..(7853): unsure at all n locations
cgcggcggcggcggaggcggaggacgcgtacccgccgcagggtggtggtggtggtggtgggtgggtgtcgaggctggtggacccggcgtcccgcctcatcgccggtggcgcggcgcggctgttctcgacggtgttccgcaagcgcctcgaccctgcgccggctccggccccgccgaagtccacgcctcccggtgagcctgtggttcctgtacgctcccatctgggaagactcgtgcttgctcccgcggttcgtgctcgttagctttgcgctagggtttcaatcatccagggcgttctagggtttagctcagattagctggttcctacttctagtctgattgattttagctataaaattgctatcctccttgatatggagcagtagactcgtgatgaaaatgacgctgttctacaatggaagtttagtgtggagtttcatcacctcctatttgtgtgttttaactttaaatcataccagagtgtcccattctcttatttaaaaccatagcagtgtactatttgcttgtctgtcccaaagactagaaggatttgatgctccaaggtaaaaacatcaagtgtagtatgatgaatgtatttatgccacttaaaacaatcttaattcagtgtaatatccggtctttttatttttatttaaaaccatatggaaagaatacagtatgatatggtcttattttgtctgcctgtagtattacctattgataattttgtgcttggtgctgcagtacgttactaattttatagtcgcttcatgcatgcaggaagcaataatgagccaaaccaaggcttacctgagtcaacacaaactgtaagttataaccaagtgcttgcaaaaaaaaaaaatcggttgtattgtttggcaaattgtgctttatacttttggttaacctattatattccgcttggtgtttttttaccctttattcctttatatttatataacaaaatctgatgcagggttcaaaaccaatcctcgagaaagggaagaaccccactggtgcatcggacaataaggcattgtctgaagtagagcacttgttaatgaggaaaacattcacaaggaaagtatttttcatattaatcttcttgaagtggtacttccatgataactgattttttagttaaccagtgaggtatcaaacaatgttgatttacccccagtgtaatggctatattggttttgtgatgttcaactcttctgttgacaatcgttggaggatcaaacattgttgttctctttccttttttgctggtgtcaactttttgggggtcctcttaaaattctaaacgacagcatctcttctgtcccgtgctttttaagctgccaatgacaatgtgattttgtatcagcagggttgagtttgaccgccttacagacttactgcgtgcaagaactgtggagtctgatttgtctgcaccggcagataaccttgataataagaatgaagcaaggaatacaatggatggtataggaggctccacatcacatgggatggctgcagatcattctattgctgctgatgtaagtagttcttttggtcatgaatattttttattctaaatgctagtccatgaattctggatattggataaatctcctcgagccaacaaagaaaatttaatcatacctggcaaacactgaaagtttatgttgttggtactgaggcatctgtagtctgctggtttggtttgtttctaatgccaactgatatactgtattaccctttttgccatcttcccattatggaagctccttttattgtctgattcttttaatccttttattgtctgattcttttaatgcaaggtaggctgtagttcctaaagtagccttcttgttacttgaactcgtgagtgcaaaaatatttttcgggtgcacacatgttagatgctgcattaattgctgagaaatgctgatttggatttgttggatctgtcattttttttaggcttgattgtgcatcaaagctctttactgaccttttaatatgtttaagtgctagctatataggatatgtgcagctaaacggccctttttgcagtgttggtatgccatatgattgttggattcaattcctacaaattcccatgttacatgcataaaaggcagtggattttacctttcgtttccatgctccatccaactaccatattgcagctttgctacttaggtttttcagtgtttttatttaggaaaaaagcaagcaagtgtgtccttttattcaacttcctttggaactttagtctgtgtttaattttatttctgtttattttgtaggatccggtttgtggtgctagttcacccgcagagctcgcaaagcaatatatgaattcccgttattcgaaagaaaaccgaccaaacagtttgcggagccaagtactcctgaagaacaaggcagaagcaagcaacattgcctatgatagaaggagacctggaggaccatttgtgcaagaactgagtcaatttagcaatgaaaactctgagcttcctgtgaatggctatgtaactccaggattacatgggcggtcagcaatatatagaatgtcctgttccccattctttaaggtattgtgtttactgcacataatgtcaaatcattctcagccatgttttcatgtgttctcaacatgccatactgattactggcgctcgaatttttttcttgttcagtataatgatgctctaacaatgatctcacagggaccaagctcttccaatgatataaatatgtcaccattttcatcatctcagacacgggctaatagtttggtttctggctgcaggcaggtaatttattagcactttatggaaacatatactgcattatatacagtatatattttaaatttgctatacacttagttgaacaagttcatgttactgagaaggtgttacggttgaataaactgtctagctattgaggttcttttctttttcttatatatgtctgtatcgttgcaaatgcaaagcatatatgtggtataaagtgctggtcatcatggacttgatagtgtgttgtgtcgtggcaacatctttagacttgcagggtttgcaccactgagaacattctccatgatatatgatctaaactagacataccagagcttctcttattcctatgtctccctaacaggtcttgaaacgaagaggtgccgaattggagaatgagcttggatctattggtcccatacgcaggattcgccaaaagtcaaatatgatgtctacttttagagatgctcgctcgagcccgcgaggaaactttcttcccagccgtacaattggttcagatttgaccgatggcggttcacccattcgggattcacctagttcgaaaagactattgctggggacgggtcaatctgtggaacctgcagaagcacgtaggaatgatgaagatggtaaaatttcaagtgataatgttcttgctgcgtcacctcaatcaaacaagatggctgaaaagatatttgagcagcttaatataatagtcccatcaccaaaagagaagctgtctcttccacaatttgctgctgggaatgcaagttgctccatgtcaaaacaacctgttaggcaaggcaatgagccaaacgggacgagtgaccctagtagttcccagaaatttcaacctatggatagtgttaagcattcccttgatccagaactgaatggttcaccatcgagtaaagacaagctgagaaaagatggatcatcaaaacttctgtcacattcatttaaggatttaggcaacaaagacattaggtctgataatgttgctctatcttcagttgccgctactacatcaagcaaaccgggctttaaaatggctgtttttgaggtatggggaaagtttactcttggttcctcgaattatattaaacgctcactcatgtcctgagattattctttatcacctttttttgttgcaggatctaccagagtttgatgatgaccaggaggctcctatcccatcgaaaaattcaatgggcaagactgaggtgaagacaactgataaaaaaattgatctgaagaaggagcagaaagttgaaccaattttattcaaacaaaaagttgagtcaaattcagtgcagaaggctgtcagttctccagttagtgaaaagcctatagcatccgcattgaaagatgcccgtccattaggcttattttcacctaatgaccctgaaaacagggctactcatgatgttccttcagacaacaacaatggtttcaaatttccacatgtaccttctggcacccttctggagagttctgtgtcacaattgccacttgcttcaaataaagacgataagctgatcagtgcatcatcttctatatttggtctcaagcagtccagtacaccagattcagaacaaacaaacactgctgatgtaaaaacagaagcaagacttggggagaggtgattttcttggcactccctatttccctttttctccttattaattgtttgcactggtcatcttctggaaggaggaagagtaaaaactataaaacaaagacaacccagtatttgcaaattcgtttttcttcaagtgcttgcaaattcatttgttactaacacataacctactaaaaagaatgttcattctagctattgacttgagaagtcccttatggttttttttctcacaatgacatgacatgtatgtaaaggctgaagatcctgtacagtactcttgtttaactcggtcataatttgtatatacatgttaagagatggtacattttattccaagggttattttagtaggatggatcgtaaatatgtaattgaaatgcatgtacagcctatcaggatattccttttttttttcaatctttgattacttatttgctgtttggaggaattttttggaaaataacataacagggctttaaaataggatatcccttttgtagtgtagaattgctttctatctatggagtaaccgcttatgttttctgctatttatgtttctagtgtcaccaagcccacaacattggacatcactaatttggagggaggtaatgaaagagaaagaacagaagatgtccataaatcatcagataaggtattaccctcggctgctcctttccactttgcatctgctgcatcaactacagcaagcctgagcaatggtttctcactgccatcatcatcaaagttatcaaatgtaacaccaattgataagcctgaagttagcttggctccatccactgtatcgaccacatttgctccatccagtaccagcccacctgtttcatctccaatccctgcaattccgacattcaattttggttcaagcacttcaatggtggcagcaactaaatcagatagtacaaatacagtggcaaagccagctagcagtttattgttcggtactggggatgctatagctgaagccaaatctactgcccaggatacagccaacaaggcatcatcaaatctaagtaccactcctatttcttcaaatatttcaagttctccagtcacatcctcttctgctttctcaagcatagcaacattttcatcttctatggttgcagcttcaaatgatggaattgcctcaactacttctgcctcaacagcaccttttacattttcgagctcaggaaacaacacttttgggttcaattccccagctcaacctgctggtttcagtacatctgttgatggcagtaccacccaaccatctgccaccagcacgatctttggtagcaaactgccacagtcagagggcacaatgtcgcagccatcgaagagttcacctgttcagtttagttcaccgtttcaaactgtgaccactaccacaggagcttcctcgtctgggtctggatctgtagctttcggagtaggaacagcctcaactggttctgggatcacatcttttggaaccggagcatcctcatcttggcctagcacagtgtctttcggattaggagcttcctcatctggaactggtgctctgttatttggagcgggggcttcctcatctggaactggggctctgcctttcggagcgggagcttcctcatctggaactggggctttatcttttggagcaggagcaggaacctcctcatctgggcctggaactgtgtcttttggagctggaacctcgtctgggcctggaactgtgtcttttggagtgacaacttcctcatccgggtctttgtttggtaattcaccatttggatcaggaactactttctctggccctggaagtggattcgcattttcatctcctagctcttctgctgggtcatctttaactatggccagcacaagtatgttcagcaccagttctacggcttcatcatcccctgctttcagtaacccattcggttcaagttcatcacctcccagcatgtttacatttggccaatcggcttcttcaggaggaggtttttcatttggagcacagtcatctccagctttctcctcacaagctccagttttttcatttacctcagcaagcatgaattcatctactccgcagcctgcttttgggatgacaaatgccaacacatccttcggcatgggatctcctggaaatgatcagatgaatgtcgaagacagcatggcagatgacactaaccaagcagcaccagcaccagcaccgatatttggttcctcaccatttgggcagcctgctagttcacccgctgctccagtatttggtgctccagcagtcccgtccgccggagttttccagttcgggggccaacaaggttccatgcagcagaatgcggcattcccgcctgccggtggtagcctagagtttcagggtgggaacttctctttgggaagtggtggcggaggcggcgacaaatctagcagaagggtgatcaaggtcaaaaggaacccaaagaaaagataagacgctctgttcaaatgtgcatttcatggtgccattttggatctgcctggcaacatgtcgtgatcatcagagcgggactacgaccatggttcgtatggtcatacaaattttccagcgtcagcacagttttcgcagcatcacccggctggcttgtaaaccccaaggtcagtagtgtattaccactcaattattcctttcattggcaaagccggattgcatgttgttgtatgcctgtgctattggagtgtaaaatagaacaaaaaagaagtgtatcccgaggtgtaattttgttctcttttccctgcgcatctgctgtcttatttgcctccgatatatttggctcggagtgtaatgtacactgttgtatttgttctttttgtttacatccgacatgcccagaactccctagtatagaatctccctagtttatcaatcttcgaatcccactgagttttacatcctgcgtgctttacatttcaatgtagtttagttttcttctattgtttagtgtggtattatatgagctgttccgtgatatctaactccacgctgtcttgtctccattagaaacgacttctttttatccaatgtgcctgaccagttctttcagaaaacctatcaacacaaacgttgaatttacaaaccataatcaactagtagaatcagcgttgcatgtcgcaggccgttgtgtgactgggacgttaccggccacctgccgcgtgtgaagtgatgctctctccctctctacctacactgcttcttggatggtggtgatgatgcgatttggacttttgcacaggagcacgacctggtcggccaccatgccacacgcgctttccccttctacgctctcgcatttgccatttcttttttcgcgatcacattcgcgttaggcaagtagttgggcaaggaagaagaaacatggaaacaacacgacacaagagtacgcanaaaaaaaaaaa

SEQ ID NO: 9104 - DNA, 18816 bp, Oryza sativa
gggggagggttagggttctcatcaatttggaacttatccgagccgtccattaaaacgaacggctcagatcgatcgagcgttgggccaaaccacttgggccgtacgcgggccggtggtccagcaagcgagaggaggagtatggggatattaattagactttggtcgcttgagggctgaagaagaaagtgggctgaaaaaggcccatagagataaagggatttttatttagatttttatttcaataaatgctgaaatgatgtttgtattataaaaatagcaattaagctatgtaaatttcaagaaaatttcaatgagtgtaattaatatagaaaatttaataaaaaataaatccaaccataacattttatttctcacacttactttacttataaattaatttaattatatacctacctacttaaaaaatacccaaatatttcagaaattttgtgtttcatttaattataatttaatatttttctaattcaattttatttttttcttttcgtttcaacgcacgaccaattttgctataatttcaaatagtgtaattaatattgcagaaaatttatatttcattaaattagaatttaatatgttttaattcaattttcttcttttttttcattccgttgcaacgcacgggcatttttgctagtaataatagagatatagataaagatagctagagaagtagaacttggtccgtccgtctacccttattaggatattcatggggattgatttggggagtcaatctcccgcgactttgggaagtcgatcttaaacgactctacatattcgcaaaccctgggaaaatggcgaaacttaagcagagcttcagccttctcttgctcatcgaacccatcgcagtatgggccacaatatattttctcatattttgaagcaccctcgttggatctgtgaagagcctctgcatttttcttgaatatcttgaaccggtgagtcatctcagcaaggtcacgcttcttatcgtaagccttgcaccagcgctcatacatggcccctatggcttcatcagactcaaaatccttgtccgtaaaatcgtcagcagactcatcaaaattcgtcaaaaaggcacctggctcatgaccatcatctatcacaatggaacaacattaatactgtcaagaacagcgagttggcttgcaagtttcaatttggttcctaatttgcgagcataaatgtctactattgtaaacattaaagatgtttttgtcggtactttggtacgttatccgtgtatgagttggattttaagttcgttcacttttggaaatacatatccatatttaagttcggttttaatctcgttcacttttggaaatacaaaatgagtcgtataagaaattctttaaaaaaaagattcgcatgctaacttgatatgattttctagaaaaatatatatctaaacaattctcacggtgaatttcaatgaacaataataagattaaaatagcttcacctgttacaacgcacactttttctagtctaaagaaaactatcctgcctaatatgcccatgccctgatgatggcaatcagaaggcccgtaagagcaggtacaatagcaggctataagccagctataaacatattttaaagagataaacgaagagagagaagagcagcgggctatagatctgtagccagctgcagcacggactccaagacgtaatgtgcgtatgacaggtagaaccgagtattaatagtatagtaagcaactattatatgaattggctattacattagctatagatgatttgtagttagtagttggctatactattaaacttgctctaataagattggggggattagcttacctgatggatcgtaatcgtcgaggtaacataccgcgcgtgcagcgtgacatgcggcgacggcggcttggcgtgctgcgcgacgtgctgcgatggccgccgagtgtggagattatggttaccccatatctacatagcggttatattccagctggatatatggtaccaaatatagatagaatatctttatgaggactcgggttagattctaaacttgtatgtcaagaaaatacccaggattctagtcggttacgattgtattttatctgtaatcccatattccgttaggatatggactgtattttgtattacggatcccttcccctatataaggaggggtccgggttcctctcgggacgatttcttttttctctcaatcatacaatcaataacatactcggcggaatcatccccggataggagtagggtattacttcttgaataagaaggcctgaacctgtataaaattctttttctccaaacccatccactttcctagcttgatagccacccccttttattattgccgaaatcttgttttgacagttggcgcgccaggtaggggttgcgtcaagttctcgccgactaagtgcgatgggtttcgtttctggcatcgacgactgcgccttccttcctgggcaggcgttccggttcggcagcctcaacttcatcaccaacgacttcggcaagatctctctccttgactcggattcaaaccagttggggagagaccaggtcctcgtgccattcggtattccgaactcggccgaggcctactccaagatcatctctcccaagtcggcttcaaaccactcggacgagatccaatctactcttccgcgaccagatcaagacgacgggtcctatccctcaatcctgatgaaacttcctgatgatttggccgctgttttcactgtcaagacatctcccactcgaagatctaggagagctccggcttcggccccgatccaatctagatccagagaggttggcgttatactccaacctcttgggacagtctcgacggaagagttggatggttaccttagctcccccggcgtcagttctcgaccaaccgagatcctcgactacaacgatttcggctaccactatgaccatggcgacctcgacaacttcgatgacagctctgaggataactacacgcccctcttcttcggcgtattcatggctgacaacgaaatggaggaacagcgccaagcccgagaagcggaccaagatcgcgcaaggcaagaagctgaacgtcgccgactggaggaagagcgacagtgacaggagcgagaacgactacagcgttagcaacaagatcgcgaacgggttgcaaaggaggctaaagatcgacggcaacgcgccttggaatctgggcgccgagcgagagagctcattgggcaacaagacgtcgatggaacagcggtctttcgcaccccccagcagaacgcggttgcagcaatcactctcctcgacaccctcctcaaggaagacacactcaaccaagctgatcatgttgtcaacatcttgaatcagacgaagaccatgatcgctgcctcggttccagccaactccgcaagcacccgtaccccgactagtagccgagtccctcacttccgatctcatgattatcatcagccaagcctcagcatcatcggcacaggatctagtcgcaggagcaggggtcacgacgaacgatcttttcactcgcctcccgaacgtcacagggagcgccgagctaaacggcctcactctccacctcaccagcgtcccgtcgaccttcgcgacatgatcaaccagcgccgtgcagcgcgaggtcaccgccattcaccaaatcgctacgacgacgacgtggatggagtagctgccttcactaatgacctgcgtcgagtggattggccagccagctttaagccgactggaattgagaagtatgacggcaccactaatccggagtcttggctcaccgtctacggactcgcaatccgcgcagcaggaggagacagcaaggccatggcaaactatctacctgtggccctagcggactccgcccaatcctggctcaacggactaccccgtggcacgatcggatcatgggcggaacttcgtgatcacttcattgccaacttccagggcacctttgaacgccccggcacacaatttgatctctacaacgttgttcagaagtctggagaatcccttcgagattacatccggcgcttctccgaacaacgcaacaagatctccgacatcaccgacgacgtcatcatcgccgccttcactaaaggcattcgccacgaggacctagtcggcaagttcggatgtaaaccccccaggacggttaagcagatgtttgaaaaagccaacgagtatgccaaagccgaagatgctattaccgcgtccaaacagtcgggcaccacttggaagccaaagaaggacacgccgaccgcaggagggagtggaagtaacaaccacaaggatcgcaagcgtaagcctgaagaacttgtggcgaccacctctccatcatcctgacaacgttcccgcgtcaacaccttcgacaagataaagaactcccaatgtccgcatcatcccaactccaaccacgtggccaaagattgcttcgtctacaaacagttcgcggagcaatacgtcaagaacgcacgtaaaccttcagacggagatcaaggcacatcaaagaacaaagatgatgaagacgatgccccgactggtttccaagatcatcgcaaagaacttaaccacatcttcggcggacccctggcttatgagtctaagagaaaacagaagctaacagaacgggagatcaatgcggttcagcctaacacgccccaatatcttcggtggtcggagatagcaattaagttcgaccgctcggatcatcccgactgagtggtccaccaggggcggtaccccctggtactagacccagtggttcgcaatgtcaagctccgacgaactctcatcgacggtggcaacgcactcaacatccttttcgtaagaccctggacgatatgcagattcctcgcacggagttaaagccgagtaatgcacccttccacggtgttatcccaggactgtcagctacaccactcggccagatcactcttctagttaccttcggcacgggggaaaattttcgcacaaaaaatgtctgtttcgaagttgctgatttcgagacagcatatcatgctatacttggacgaccagctttagctaaatttatggccgtcccacactacacctacatgatgatgaagatgcctggtcctcgaggagtcatatcactacgaagtgacatcaagcaggccgtcacatgcgacaaagaaagttgcgagatcgcccaaacccacgagactattctcgcccgcgaagagatccgactggctgcgaccacgacaagcgagggagaagtgcctgcaaccaagctgacgaagaccgaagaaagcgatgccaagacgaaaaagattcccttagatccctccgatcctgataagactgctgtaataggcgctgagttagattgtaaataggaaagcgcgctcatcacctttcttcaaaataataaagatatttttgcgtggaaaccatccgatatgcctggtatccccagagaggtgattgagcactctttacatgttaaggaagacgccaaacccatcaagcaacgactccgccgttttgcacaggacagaaaggatgcgatcaaggaggaattaaccaagctgttagcagcaggcttcattaaggaagtccttcatcccgactggctggctaacccagtcctggttcggaaaaagacggggcaatggcgtatgtgtgtcgattataccgacctcaacaaatcttgtcccaaagacccttttgggttacctcgcattgaccaggtggttgactcaacagccggctgcgagttactcagcttcttggactgttacttgggatatcattagatccgactaaaagaatccgactgcttgaagacctcgtttattacgccctttggagcctaatgctacatcaccatgccctttggattgaagaacgcaggagcaacctatcaacgcatgattcattgatgtttttcaactcagatcggtcgcaatgttgaagcttatgttgatgatgtagttgtcaagaccaagcagaaggatgacctgatcgcggatttagaagaaacttttacaagcattcgtgctttcaggatgaaactaaacccggaaaagtgcatcttcagagtaccgtcaggaaagttgctcggatttatggtatctcaaagaggcatataggccaacccggagaaaatcaacgccatcctcaacatgaaaccgccaagcttccaaaaagacgtccaaaagctgactggttgcatggcggcgctcagccggttcgtctcacgactcggcgaacgggggatgcccttcttcaagctgctgaaaaagactgacaattttcagtggggacccgaagcataaaaagcctttgaaaagttcaagagacttctcactactccaccagttttggcctcgccgcatccacaagagccgctactgttatatgtgtcggtgacctctcaggttgtgagcacggtcctggttgttgagcgtgaagaggaaggccatattcaaaaagtccaacgaccaatttattttgtcagtgaggttttagccgactccaagacaaggtatcctcaggttcaaaagttattatatggtgtcttaattaccgtcagaaaattatctcactattttcaaagtcactcggtcacggtagtcacatcgtttccactcggagatatacttcacaatcacgaagcaaatggacggattgcgaagtgggccttagagttgatgtctttgaacatatcattcaagccacgaacttcgatcaagtcacaagctttagctgatttccttgccgagtggaccgagtgccaagaaaacatgccagaggaaaagatggaatattggactatgcatttcgatgggtcgaagaggcttacaggcactggagctggggtcgtcttgatttccccgactggagaaagattgagctacgtattgtggatacatttttctgcgtcccataacgtggcggaatacgaggcgctactccatggattaaggattgcaatctctttaggcattcgccgattaatcgtccgtggagactctcagttagttgttaatcaagtcatgaaagagtggtcatgtctagatgataatatgactgcttatcgacaagaggtacgcaagttggaaaataaattcgatggactcgagctcacccatgtcctccgacataacaatgaggcagccgacagactggccaattttggttcaaaacgggaagcagctccttcagatgtgttcgtcgaacatctttataaaccgaccgtgcccagaaaagagacagtcgaagccatggatgctcaaggcgtaagcatgattgaagctgactggagagaaccgtttataaaatttttgagcaaacaagaactccctcaagacaaaaatgaagccgagaggatttccaggcgcagcaggctttacattattcatgagactgagctgtacaagaaaagtccatcaggaatactgcagcgctgtgtgtctttggaagaagggagacagttgttgaaggatattcattctggtatttgtggtaatcatgctgctgcacggaccattgtcggcaaagcttaccggcaaggttttttctggcctacagctgtgtccgatgcggacaagattgtgcggacatgcgaaggttgtcaattctttgccagacaaactcatttgccagcccaagagttacaaaccatcccgttgtcctagccgtttgcggtctgtgggcttgacatggtcggcccgtttaaaagggcagtcggcggttacacgcatctctttgtggctatcgacaaattctccaagtggattgaggctaaaccagtcatcacgatcacagcagataaagctagagattttttcatcaacattgtgcatcggtttggggtacctaatcggatcatcactgataatggcactcaattcactggcggagcatttcaagacttttgtgaagacttcagtattaaaatttgttacgcctccgtggcacaccctatgagtaacggacaagtcgagcgcgctaacggcatgatacttcaagggatcaaagcacgagtttttgaccggctacgtccctatgctggtaagtgggtagatcagctgtcgtccgtactctggtctttacgcactactcctagtcgggctaccggccagtcgccgttctttttggtttacggtgcagaagcaatgttgccgagtgaagtggaatttgaatcgctacgatttcggaacttcaacgaggagggctatgaagagggccgagtagacgacatcaatcgactagaagaagcccgagaagcagctttaattcagtcgactcgatatttgcaagggttgcgccgttatcataatcggaatgttcgatcgcgagcctttttagtcggtgacctggttatgaggaaaattcaaacaatacaggatcggcataaattatctcccttatgggaaggaccgttcataattgctgaagtcactcggccgggttcctatcgactcaagcgcgaagacggtactcttatcaacaattcttggaatattgaacaccttcgtcgattttacgcttaggcatttcgtttgtatctctcctctttgactgctaacttcaagtttttccttgaagttttcagtcagggggctactataataataatggagtgtgatttttatcaattcaatttgcttacttgatgtatcattgccctgtttgatttcttggcttagtcaatgaggactgaaagttttttaacaacttttgcgggttttaggctcaacaaggtttggcaaaaacttttaagaaatcaggaactaagttaagatatcaagcatagcataaattcatcagtattgtacaaattgtgcctccatcatcattaatcatcaaaatcattggtacagtaatcagtatcagtcttttcatcatcagaattatcaggaccagtcggtcgaagatcggtgtcctgaaatctctcaactacatcagcagcaatcttgtcagcggctttttgtgcattgctgatgaggtcaagagcagcttcttcgctcgtcccgtctgcaaagccatcaatggcatcaacgtcaaccctcgaataaagagatttggtcatcgccaacgccagacttgctcccatacttccagcttctttgatgttcttgaaatatgtatccggagcaactctcagcttgtcgaaaatttcagaagcatcaagtacactcgggccgttgttattgaagaacatcgcttgaacaattggggcagcagcgttagcaacctcatcccgggttccttcgagttttttgatcttgccaaccaggacgtcgaattgagcttgagattgatcttgcggtctgcatcaacagattcacattaataagttagcatatggaggataatggcttttgaggtattcattgttgataccttcaacttcctttaaagccaggtctctttgtcttgccagttctgccttgtcactttccagaatttgaatctggttctccaactgagatatcttggcagcttgcactacattgatcacggttaatcaagattgcaaagataacagtatgagtcagttgagcagagtttgtgcgtaccttttgatgagccactcagttcaaaatttgattcctggagctcagcgatccgatccctcagatcatgttcattcttcctagcaagttctttcacttcgtgcagttgattcctggtggcttcgagggttccgagatgagggactaacctctctaaggttactgttttggcttcgttcctaagatgaatcctctgcaagatagtttaattagcgcgtgaattaaatggcaaacaagatggttgaaatcaggtaccagagggcttacatttacaatgcgggttgcctgaccaagtgccttcttcagtaggcataactcttcgtcctctttttgcttatttatcacgatcccttgaggctgcatgttgtcatcccaccacttgaccagaatcggagggcatgaatcctcagctgcttgtatacgggggatttcttcttcatcaccaatcattggtcctaatgtattcactgacaaaggttagacaatcgatcagagttatttgggtcaacatggtttcagacaaagtgtttacccgtgatgatttctggacgaggacgagcggattcggatgcctttaaaggagatccagatctctggttattgtccgcgttttgtctgcgagggctgtctgcttgggtttcgacttctagaatctcttggcttggccctgcgtccgactggtttccagtcgggggctcctgattaactccggcttcggcttcggccgactggtttccagttgggggttgatcaccgaattctacattatcagttgccggatgattgtcactcgggtgatccccaacagttggcccggtttctttggaagaattcgtgcccatgttagtcgggtcagagtcttttccagacgggtctatatcagatggtttcctgcaaatttgattatcagtattattgccgcaatgggtgcgtatcaatacaagagagatcgttatatgagttgcacctagaagacttcctgatctttggcacatggcgactggatgttttcttccttggagtagcttgttttggtagtttcttggtcgtctctcggtcttcaggcctcctggtggtatcatcggcttcgtcgtcacttagaaccaacttcctctttcgataatctgactggccgactggatcagaagcactaggttgagtttcagaccgaattcttggtcctccgctcccttgcccagtttggtggtggggagatcggcgttgagcgattgggggatccgactgcatcaaagcaaattcctggatgtaatatccttcattgttagctgattcaacaagaaaacaagatcatattttgagaaagattgaagtgtatgaatacgtactggtggaggaggattgaatgcattgaacggtacgactggcagcaagtgtgagtagctgacaacgatggcgtttgagaagagcttatacatcctttccttcatgaccttgaagtcaagagaatctggatcttcacggtttgggtcatgcttgccgtcaaattcgaaggctgtgcgagatctttctttgattggagctaaccgacatttgataaagtgccgggtgatctgttctccttgaaggccctgttcttttagctttatcatcctctccatcagttctactgcttgtgcagcttcgtctcccattagcagtgagttccaagtatcccgataaactggaggaagacaggagtactcgggaagaacaggctcggggttttgaacataaaaccagtttgcgtgccagcctttatttgaggtcttgaagggcatggagaagtatttttggcttagtgttcccctgagttggaaaccagcacccccaacgacgcatggtttgctcttatttggctggggcttgaggaagaaaatgcggcggaataaggcgaaatgaggcctaatgcccagaaaagcttcgcaggcatggataaaattggcaatatgcactatggaatttggattcagatgatgcaagctaatcccgtagaagttcagaataccccggaaaaatcttgaggttggaagagaaaatccgccatagaagaaatgagcaaataccacgatttcgtgtgtatcgggggtcgggaatgcctcaccaaatgccggtcgccacccgatgatctcttttgctggaagaacgtcgtgcgccaccatctccttcagattgtcttccgtcacatcggagggcgcccactgactctcgaagctttctctttcttccgccatgaatgagaactgatgatttgatttagttcgagatacggctggaaagggatggggaatcggagcggtggatgcgggaagagatttcgtgaagttttttaagggtggattggagcggattgatgaaccctagtttgcccggcgcaattttgtactgtagcaggaaatggggaaaatggcgagagtctcagcggggaagacgaaacgacgtttggacttcggtgtttttagggtatcgggagtactaatgggccctggcctgtacagtacttcagcccaattatgttttcagcgtggcccgttgtgatccctagggacttaggcgctttttgctttggcaatatgtgctcacaatgatgcggcccgatgctgttgaaatcctttttaacgcgattcaataattctttggaattattatgatgcacatgaaaaggtgcccaacataaaggtattataccatttttgtaagcttttttaggctacgaaagctgttgggttaatttgagatgactggtttgttagtagtcattctcccagcatgttatatgcttattttggttatggtaagggtcacagcctaggctattagactcattaattaccatgattttctatcatgtttgatgggtcattttatgagattcttactcggattcctatcaaacatgtctatttttggacctttgagtgtttatcactcggcccttttcatattttttgtccttgatatattcaagtgagaagcagtcggctgggtattttattgagtaccatgcatgcttcgatataagatcactcggttcttgactatatgtttaatttttcaactaatcacatagtcgggggttacacctaattaggtgcatctactcgatgcaccatgttttattttcgcccttcacagtcttctagcactcggtaagccggagcaagttgaattgaagcactcagattattgttttttgtttcgagaagactattttggtcaactgcgaaggtctcgggggctactgtggagattatggttaccccatatctacatggcggttatattccagctggatatatggtaccaaatatagatagaatatctttatgaggactcgggttagattctaaacttgtatgtcaagaaaatacccaggattctagtcggttacgattgtattttatctgtaatcccatattccgttaggatatggactgtattttgtattacggatcccttcccctatataaggaggggtccgggttcctctcgggacgatttcttttttctcccaatcatacaatcaataacatactcggcggaatcatccccggacaggagtaaggtattacttcttgaataagaaggcctaaacctgtataaaattctttttctccaaacccattcactttcctagcttgatagccacccccttttattattgccgaaatcttgtttcgacaccgagcgtgcacaaggactagacgacgcgaccgccgaggagcgcgcggcacgggatgcggcggccgcagctaagcgggcggcggctcgcgcggccgatacgtcgcgggcgagcgacgccaccagcgccgccgttgacatgggcgagggataatcgattgaagaggaacggtaaaccctagttctccccacccgtcccggccgactgatccgattggagtatatatatatatatatcattaatatgcagtagtatcggccgagacggaacagtggatatataacaatctttctgctgctccgattttgtttcatggatactactgcttcatcgaagaggaccagtagatgaacaaaattggagcagtggatatatagcaatctttctgcgccgactggtccatgaaacaaaatctctttctgctcttcctcttatgtggtgatgctgcgttcttgactgccagtgtagtagccatgaatttttttccttgggtaagttcagttcgtaggttcacaacacatgctaaaattttctaacaccaaaaaaccgatacacaagtacaaatttaatataaatgcgataaaaatcaacattcaacaaccacaatttacaaagtgcatactcaatcattctcagattcatgaatcacaaatcgatttatgaagcagccgggagcggagagctggagacgggcaccggtagacgccacgccagacgggagacagcgggcggcggctctgcgacaagacggcaaccggccgacgtcccgcagcaaggcggcgactggcgatacaaggagaagttgtaacgtcgtcggcccccagctcggcgccgcgatggcgcggacggcggacccacgggcgtcggcgctgtggtgtggctcggcactgggctgcgccggcgctaacagcggacgcggcgtggcgccggcgcggacagcggtcagtggcggcgtggaagcgggcatcgggcacgaagggaatagatgctggaggtggaagcgctccaggctccctcaactcaaccctagctgtttgtgggctgttagagatgcctctaacggagtggttatttttgactctctaaatatctatattgccaggctgataaaaatttagagagtcaaatttatcttctattccaacatactattcacattccactctattaaccaatggattccgcctgtcattctcctcctctttcttcttcctcccctctctccaatccttagcccgtgctcctgctcgtgccagcgggtttggcggtggcgaaggcgtcgagcatctcaagttagcatttttctaggagtttgactttcatttcaagttagcatttttttaaaagaaatttcttatacgacttcttttgtatttttagaagtataaacgaacttaaaaactgactcaaacacagaactgtatttccaaaagcaaacgaacttaaaaaccgactcaaatacggatcacgtgccaaaataccgacaaaaacatctttattttttataatagttgagataaagataaagatagagaagtagaacttggtccgtctacccgtattaggatagatttggtgattcatggggattgatttggggagtcaatcttccgcggctttgggaagtcgatcttccactgctctacaaattcgtgaatcccgtgaaaatggccaaacttaagcagaaattcagccctctgttgctcatcgaacccatcgcagtatgggccaaaacatagtttctcttcttctggagcatccttgttggatctatgaacaagctctgcagtttccttgaatatcttgaaccggtgagccatctcagcatggtcacgctccttatcgtaagccttgcaccagcgctcatagaaggcccaaatggcttcatcagattcaaaatccttgtccgtcacactgtcaactagatcagtctcaaaatccttgtccgtctcatcgtcagctggctcaggaccatctatcacaacagcacaacattaatactgtcaagaacagcgaattggcttgcaagtttcaatttggttccttaaagttatcctgcctaatatgcccctaacctgattatggcaatcggatcagaaggcccgtaataagatgggggaggattggcttacatgatggcaatgggctgggaggagcaggagttggctcgtagtcgctgtagtcgtcgaggttataagacgggatgcgtgacaccgcgcgcgcggcgcgagatgcggcggcggcggctgagcgtgccgcgcgacgtgctgcgacgacggccgccgagcgtgcgcaaggactggacgacgcgaccgccgaggagcgcgcggcgcgggatgcggcggccgcggccaagcgggcggcgtctcgcgcggccgatacgtcgcgggcgagccgcgccaccagcgccgccgttgacatgggcgaggcgagtgatgatcgatcgaagaggaacagtaaaaccctagttctccccacccgtcccggccgactagctgctccgattggagtatatatagaacaggaataagttcacttgccaagtctaatttaacgcttttgctattctgatcgcgacaccggggggccaagacgcgatgcttacacggccgagtcaattgcgcattgacagtccattcgtggtgccatctgctacggcatacggctcgtcatctcaaggaagcaacaatgtctcacacagcagtcaagaacgcagcaccaccacacaggaggaagagcagaaagagattttgtttcaacgagtcagggatttccaaggagaagtggatgtagagctagctagcttccccttcatgaatggccgctggtacatcggcacgccctcgatcgtcgttgacagccttgaatgaatctgcaacaagatgacaggcgatatgagtaaacaataaaatggtttctaaaatatgcttaaacaatcatatggtttttgatatatgcggctatgaatctgcaacaagatgacgggcgatatgagtaaacaataaaatggtttctatatataatgctgcttaaacaatcaaatggtttctgatatgctgctgccctatcgtgagttttctttgtagtgtacaagttgggacttgggagacagctaaacatcgtttcaatgcttgaaacaattttgccatagcaaattactcccccatcccaaaatacctattttattgtaaaagcctatccaaccaacattgccacgtcaaaattatctctgcctctctacatacatgaatatctattcggctttttcttcatacgtggatttatagtggtacttatcagccatatcgtctcataaaatgtggttgtgaggtgaaatcgggttagagtcaactaacctaaggacgagcttgagtcaaactaacctcatagctagccatataactatccacactgatatggtccgctgcgaatccatgtcagaagaaatgggttgaatcaaatgtttgtgaaggggatggacttggcagtgctgagtgagtgggcttttgcaacaaaataggttatgtggtggaatatcaaaacaagagcgataattaatttggatggtttacataattttttagtgctattgttcttgtaaaatcgataaataattttaaattaaatttgctgaaaatctactgaggccctgtttagatccctccctaaaatttttcaccctgtcacattgaacatttgaacacatgcatgaagtattaaatactttgcgactaatttacgagacgaatcttttaagcctaattactccatgatttgacaatgtggtactaaagtaaacatttgctaataacagattaattaggcttaataaattcgtctcgcggtttaatgacggattctgtaattagttttttttattagtgcccgaacactctatgcgacaccctatataatacctgatgtgacacgccaaaactttacaaccctagatctaaacaccccccgagtaaagcactcttgtaccatcaagcaaactatccatggaaatgcagtgcctctgtgtcatgactcatgagagagagtgactactattttttttctttttaccttttcatgagtgttctttgcttgatccaaaacacgggggcgcatttagggaaggcatcactggaggcaggctgctcaagtaatgcattatccatattcgattcaacccaaccaaacctaacccaaaataaaatgatgcctatatacttctggcagttgaccttccatcctgactagccggcggttcaacttatttttcagaatctgcatcgagacagaacagaggagaaagattcagaaaaaagaaaaagaagaaggatgtaacacatctgtctctgagcaaccattgttcggctctcaagtaccagtcggttggtcagatggaataaggttgctgcagtagcagtccatttctcttgatcttgatttgagtaggtgtgaagcaaaacctcgtgtcaatttggatgactttgtatatatgtagctgtcattgaacttcacttctgaaacctgctaaatttgaagtcggtatctttgcccatgtttacgctgtatctgatcaaaaccatttataagcatctgtggtttcactcaacccggcgaaaaagatgttatttagcgatgaatcagatattcagttgtaaagaagtgctcgctatagtattcataagtaaacaaactattttttggacaatacaagaggtgacttctattcttctagaatgcaaaggaagcaacgatttgcaaacaggtcaagcaagaaaatctcttctttttttttttttctgggccggccaaaggatgattgaccaatttcattaagagaggggaaaaaataaatagccaattacggagtttgttacatcgacgtgaaggatgtcgagggcgatcaaggccaagccttagatcaaagtcgttgtaatgtgaagcaggagtagtaccgttcaccaaaaaaaaaagtgaaaatagtacttcacatgccaccttgagaaattccttgttctcaaggcactgaaaggactactataattgcaactgaaataaaaccttggcttgcaatgcagaaactggactcgaaactcctcaaaatggccggtatgcttcacacgactttggaatataataaaaaccgtaagagaaatacaacctgtcgaagcaaagtcaaatcccaaacacacacatgattgcattgaccattacaaaccaaacaattcgacagatagtaagctacgcaaggacaaacaaagccacagcaaatcacacacaaactcatcttattttaaacatatttgaatctttttttcaaaaataaaaaaaaccatggccatatgcccatatgccattgacctcgaaaccattgcacaacctcatcgtctccttctctctctgtccaagttgtgtgtttgcaacatgcaaaagcgttgacgtcgcactcgcaacctccccctccctcgctttggatccaaacaaaaaccgcaccaaaccatcgagctcagccgcggcgcgcgcgcggcgacaccaccaactcgctggctcggcgtcgat

SEQ ID NO: 9105 - DNA, 49796 bp, Oryza sativa
ccccccctcccccatcatttttcctctcttctcctctatagtgtagagggaagagatgtccaacaatttttttttcacatttagaaacatataagaaccaaccatagaaagaaaaaacttaaatgacgaaatatgtgtgacggagcgtggggctcctcaccgggagaccgcgcaggcccccctttgtcggttcagccgggggccctgggtgagattctaagctcctagtctgtggaaagttcgcgagaatggaaaaagcacaagacacgggcgatgtatacaggttcgggccgctgagaagcgtaataccctgctcctgtgttctggtggatctgtgtatgaagaagctaccaagagctggagagccagagagctcttattctaaaaaccctcttctccttttttttttttctcgtgggatctcctctccagatcatccccccttccagcctctcctcttaagtgggcaaggtcctccttttatatctcaaggggataccacatgcaccacttctccctctctctttttgggtgggggcccatcctatctatagtaaaacttggcttgccttctcttggaagctgaaacactacctgtttttgagtgtggccacgcgtcctcgttcgtctgacctcggggatcaccctgtcatcccttcataaatgggcggagatttgcaacggctgctgcccgagtgacccttctgatgggacggcccatacctacctccactccgccggaagcaggtgcaacgtgggaacacggttgtcttccggcgacataaccagtgtcagaccagtcacagaccggtcacctttgtccaccacgtgtcagtttagcaatctgcatgttcgcccttcttcatacaacgtcttgcttataatggttgggataaagcctagcatatatctgaccaggaccaacgtgccatctccaggagctagcacgctggctccggctagggacgagtgcctagagactctcatcctgacgggacggggcgaggcgtgtgtcagatcgcctgttgcctcctaacccgcaatctgaccgatctgtgaccggtcacagaccggataaatgagcgtgtcatactgcgctacatgtggcgtgacgcgctcgtccaaaccgcaataaatgcggttaggtgagccccgctatgctcacctaccccatatacgcggcgcaaaacccacaaggggtcggggcgcctcggccctcggggccgagacgggagcggtccgacccctcggggagacaaagagaagggcggccgtatcaccctcgggcccgacccccccccccccgagggggttaggccacgtgggtgatcgtgtctgcctcaagtctctaagtcatgatactcccggtcccatgtcaccgacagtagcccccggcgttatgccagggcgatcgccctcctcgagggaagcggtcgggcgtgacgccacttcctaaggcctggtgacaggtggggccggtctaaaaatcgggacaagccggttcatttttcctggagatatggtgatggcgcttcggtcggcgagcgtaattaacgcgcgcacgatatgttccatctcgactgccacagccgcatatccacctcatgcaccgcaaacgggcgaatgggattagtggaagcgtgggcgcgagaaacgagggggcaagatagtgggcgcgagaaacgaggagccgggcacagcgttggcaagggtataaagtcgccgaggaagagatttgcttccttcctctcgccattattccccttgtcttcgccgcttgcgccctaactccttgtttcctgtgccctaccttcgccacacgcgctcgctctcaaacatctcttcttccggcgtcatggcacggggctccgctccgcttgacggtagcgtgctgccgccttcccgcatcgtgagcgagagacaggccgggctgccgcgccgcttcatgccggaatttgccaccggccgggagatagtctcgctgggcgagggatgcccggcaccacgctacccggggcggtccgtcttcttcctcccttttgctatggcagggctggttccgccattttcttctttcttcatggatgttctggagttttacgatctccagatggcgcacctcacccccaacgcggtaatgacattggccatcttcgcgcacctgtgcgagatgttcatcggggtgcgcccatcccttcggctgttccggtggttcttcaccgtacagccggtgtcgccgccatcggtggttggtggttgctacttccagccgcgggggccggtgctgaaccgctacattccctgcgtcctccgcaagaagtgggatgactggaagagcgactggttctacacccccctcgccgacgaagcgcgcctccgacttccgagccagcctccagcgcaggcctccaactggcgggcgccggtagatctgggagatggctacgacgccgtcctcgaccgcctggcgggcctgcgatcccaggggctcacaggggccatggtgttcggtgactatcttcgtcgccggatcgcgccactccagcggcgcgcccggggcgcctgggagtacaccgggtccgaggactgtatgaggacccaccggggggtcaaatgggactgggtccccgaagacttcaaggtaatgatccaacgggtgctgaatctcagctccgcggaggcatccctcatcccccaaggagtcctccccctctgcagcgatccagatcgcgccaacatcctgtccatcatgatggcggtcggggcctcagaggaacgagctcctaagggccatgacagtgcgagcgggagccgcaagggagatcaatctaccccaggagggggttgtgcttccggtccccgtgatgggggctcggggggcagccgccctgccgacgcccgagggaagagaaagcaagagggtacttcctccccatctcctccccgagggggcggggcggcacgtgtcagcagcaggcgcccggagggggccgcgccgacgccgcagcccgagggggagcggaagaagaaacggctccgcaagatggggggacagaaccatcccggggaaacctcatttcccctccaaggtggtcgtttaaccgaccccctcgcaggttcgtcccacgcccattgtggctatattcattcttccaacacaagttttcattcacccatcttgtttgtcttctggcttttcttctgcttcagcgagatcccgtcgcgtccttcttgccaattcaagtccggccaatctgaggccgagaatgcggcgaccacggaggctcggaggcgggaatctgaccggcgagaagccgcggatcgcctacgggaagccgaggaggccgcccaggtggccatccgagctcgccaagctgaagaagccgctcgggaggaggccaaacttcgccaggccgaggcggcgacgacttccgaggcagctcgcgacgaggccgcgggcgcatcgcttgggcccactccctcgggcgacgctcaggacaagccaggtccgggggacatccctgagtccggcacgtccatcggcgggccgagccgcgcggcatcctcaccgaggcggctctcccccacgccttctgctgccccactgagcgcagagcctcttctgcaggccttggccgttgctaacaccacggtgttggacgggttaagtgcccagatggaggccttgcaagcagagcgggtggagctcgacgccgcatgggcacgtgtcgaagaggggcgtcgctcggtggaggccatggtggaggtgggccgcaaggcacaccgccggcacgtctcagagctcgaagcccgtcggaagatgctgggggagatcgccagggaggtggaggaggagaggggggctgccctcatcgctactaccgtgatgaacgaggcgcaggacgacctccgccttcaatacgggagctgggaggcggagctagggaagaagctcaatgccgcccggggggtccttgatgctgccgctgcccgagaacggcgggcggcggagaccgaggtggcatcccggcggcgcgaagaaacccttgaggcccgtgccatggcgctggaagagcgtgcctgcgtcgtggagagggacctggcggaccgcgaggccgccgttgctattcgggaggtcacactggcggtgcacgaagctgcctgtgccgaagaagagtccgcactccgcctccgcgaggatacgctcaccgagcgggagcgagccctcgaggaggccgaggccgcagcacagaggctagcggagagcgcgtccctccgcgaagctgcgcaagaggaacaagcgcgtcgcaatctggaaagtgcccgcgccgagagggccgcattgaaccagcgggccgctgaactcgaggcgcaggcaagggagctggatgcaagggcgcgtagcggcggggcggccacgggcgacagcgacttagccgcccgcctcgcagttgccgaacacaccatcgcggatctgcagggcgcgctggattcgtccaccggggaggtcgaggcccttcacctggcaggcgagatagggcccagcatgcttcgcgacgccgtgtcccgtttagaccgcgccgggcggcaggcgggtctctggggcgggcggactgtgaagtacgccgccaaccaggggggcctcgcccagcgcctctcggagatggccgggactctccagcggctccccgaggagctcgaggggacgattaagtcatcctcgagggacctcgcccgaggagcggtggagctcgtactggcgagttaccaggccagggaccccgatttctccccatggacggcgctggacgagttccctcccgggaccgaggacggcgcgcgcgcgcaggtccgggatgccgccgaccatatcgtccacagcttcgagggttcggcccctcggctcgcgttcgccctcaactccgacgaggagggcgatgacggcggtgtgggcgacagtggcgacgaggctggcgacccgggtgcatcggagtgagcccccaggcccccgccaatcctcagttttttcttcttttctttctttcaaggccttcgggcctcctttttgtatagattaacttaatctgcaatcaaaataaagaaatttctgtgtcaatttcattttgctatgtgtatgagatgaggatgatctgtgccgtggtccttttatgtcttaacttgattaagggctcgtgcccaggtcccagtcctcaaaaggcgcgggtcggggctagtgcctggggagatccacgtgtcgagactggccaggccgggagcgtggtgaccgagggttatgggtgacccgattgtgggtttttgccgatttccccccggagttcaccacgccccggggcacggctcggttctgggccccttttggcgattttagccgacccgagcccccgagggcaggattgagcacaagtgacatatttcaagtcaagattcttcaaaaggaaacaacagcacaaatacagcctttaggaaatcgaaaatgcttttattgaaatacagatagaagaaaaaatatgcatatgtggtagcccccggccaaccctgcacgcctgaagggggtgcgtggttggcccgagcccgaaacctgacacccgaactccattaggggtagaagcgacgaaggtgttcgatgttccacgggttaggcagctctgtgccgtcgcccgtggccagccgaacggagcccggtcgggggacgccgatcactcgatacggaccctcccacattggtgagagcttgctcaatccagcacgtgtttggacgcggcgtaggacgaggtcgtcgacgcagagtgatcgtgcccggacgtggcgctgatggtagcgccgcaggctctgctggtagcgtgcggctcggagggccgcgcgccgccttcgctcttccaagtagtcgaggtcatctctgcgaagctgatcttgatcagcctcgcagtacatggtggcccgaggggacttcagggtgagctcggatgggagaaccgcctccgcgccgtagacgaggaaaaaaggcgtttccccggttgctcggcttggtgtggttcggtttgcccagagcactactggcaactcctcgatccacgaatcgccgtgcttcttgaggatgttgaaggtcttggttttaaggcctttgaggatttccgcattggcgcgctccacttggccattgcttctggggtgggcgggtgaggcgaagcagagtttaatgcccatgtcttcgcagtagtcaccgaaaagctcactagtgaattgggtgccgttatccgtaataatacggttaggcaccccaaaccgggctgtgatgcccttaatgaatttaagtgcggagtgcttatcgatcttgacgaccggataagcctcgggccacttagtgaacttgtcgatcgcgacatacagatactcaaacccgcccggggcccgcctaaacggtcccaggatatcgagtccccagacagcaaacggccatgaaagtggtatgatctgcagtgcctgggccagctgatggatttgcttggcgtggaactgacacgctctgcatcgccggaccaggtcaaccgcatcattgagagctgttggccaatagaaaccttgacgaaaggctttgccaaccaaggcgcgcgaggcggagtgggctccgcattcgccttcatggatatcagcaagaagctcgacgccttgttcccgaggaatgcacttcaggaggattccgttagccgcgcgccgatagagggtcccttctatcagcacgtagcgtttggagatgcgctggacgcgttcacttccttcgcggtcctcgggtagagtcttatctgtgaggtatgcttggatctcaatgatccaagcaatcaatctaagggagctgggagcgctcccctcgggtcccgaggcctggactccgacgggcctcgggggccggtcaggcgcgtccgtctcccctaaggggtcaggtcgcgccgacggctgggcaagcctttcttcaaaggcgcccggtggggtctgggctcgcgaggaagcgagccgtgagagttcgtcggcaatcgtgttatcccgtctgggcacgtgccgaagctctatcccgtcgaaatggcgctccatacgccgtacttggcgtacgtaagcatccatctgtgggtcagagcaccggtattccttacagatctggttaaccactagctgggagtcgcctaacaccaggaggcggcggatccccagtccagctgccaccctgagtcccgcaaggagtccctcgtactctgccatattattggtcgcccgaaagtcaaggcgaaccaggtatctgaggacgtctccgctcggtgaggtcaatatgacccccgcaccggcgccctgaagagtcagggagccgtcgaactgcatcacccagtgggcggtgtgaggcagctgcgaggggcccgagctggcctcggggactgagacgggctcgggagccggggtccattctgccacaaaatcggcgagggcctggctcttgatagcgtgacgtggttcaaagtgcaaatcgaactcagaaagttcaattgtccatttcaccacccgtcctgtaccctctcgattatgcaagatttgggcgagggggtaagacgtaaccaccgtgacccgatgcgcctggaaataatggcgcagtttcctcgaagccatcagaatagcgtaaagcatcttctgggcctgagggtatcgggtcttggcgtcccggagggcctcactaacaaagtagacgggccgctgcacctttcggtggggtcgatcctcttcgccaggggccgcatccctggggcgctcttcgtccaagcggcctcgcggggcgcacttgtcttctgtgctgacgacctcggggtcggaggacgacaggtgcggccttcccacagtggcctcagggccgtcctgggggtcgggggctcctggcgtcgtcggacaagcgggcaaagggtcaaccccggtcatcgggagccttaggccaccgttcggctcgggggcctcttctccctgctctctcccgggtcgagtcggcacagggttaacctcggggtcagagggcgataggtgcggccttcccgcagtggcccccgggccatcctgggggtcgggggcacctggcaccgtctgacaagcgggcagagggccagctccggtcgtcgggggccttgggccaccgttcggctcgggagcctctcctccctgctctctcccgggccaagccaacacagggtggggatgcgcggaatgagggttgtcctcatcgcgctccacaactaacgccgcactaactacctgcggggtcgccgctaagtagagtagcaagggttcacctggctccggggcgaccagaactgggggagagctaagatacgccttcaactgagtgagggcacgttcagcttcctccgtccaggtaaacggcccggagcgtttgaggagcttaaataagggtagcgccttctctcccagcctcgatatgaacagacttagggcggccatgcaaccggtgacgcattgcacatccctaagcttgctggggggggcgcatccgttctatagctcgtatcttctcggggttggcctcaatgcctcgggcagagaccaagaacccgagaagcttgcccgcaggtacaccgaacacgcacttatcggggttcagctttatgcgggtggagcggagactctcgaaagtttccgccagatctgaaagtaaagtttctcggtcgcgggtcttcacaaccaagtcatcgacataagcctcaacattacgtcctatttggctacccaaagaaattcgagtagtacgttgaaaagtaggacctgcattctttaacccgaatggcattgtcgtataacaataagttcctatgggggtaatgaacgcagttttttcctcatcctccctagccatgcgaatctgatggtaaccagagtatgcatctagaaaacacaaaaggtcacaccccgctgtggagtcgacaatctgatctatgcgaggaagggggtaagggtccttaggacatgccttgttaaggtcggtgtagtcgatgcacatccgaagcttgccgttcgccttgggaacgaccaccgggttcgccagccactccggatggatgacctcgcggatgaatccggcctccagaagtcgcgccacctcctcgcggatgaaagcttgacgttccggggcctgccggcgcactttctgccggaccggctttgcgcccggccgcacggcgagacggtgctcaatcacctccctggggaccccgggcatatccgccggtctccatgtgaagacgtcagcgtttgcccgcaggaaggagacgagcgcgtcttcctatttgccatccagaagaccaccgattcgtgtggtcttggacgggccgtcgcccagggcaacctccttgaccgggacctcatcgcacgtgactatccgctgcctcagggcggcggggacggaggtgccaagcctctcgtcgccatcctcgggcttggacgcagcggcgaggtggtccgcgcgctgctccatacaagcgagcgcgactttgaggtcgccatggacagagatggggccaccggggcccggcatcttcatctggaggtaggcgtaatggactgccgccatgaacttcaccaacgcgggcctccctaggaccgcgttgtagggcagactgaggtccgccacatcaaagttcacccgttccgtgcggaagttggcggatccaccgaaggtgaccgggaggtcgatatgacctagcggccaagtgtgccccggcgtcacaccgataatcggctgggacggccggagcaccatccccggggccttgatggcatcaaaggctgcgggggaaaggatgttgagggctgctcccccatcaatgaggacacgccccagcttcacgttgcaaacagtgggggaaaccaccattgcgacctgtcctccccgggcaacgcacgatgggtggtcggtctggtcgaaggtgagggcaacctccgaccaccgcgcccggcgcgtcgcctcatgagtaggggccgcggccagaagctctcgcttcatggccttgaggctccggcgagaaacgtgagcacacgctcccccatcgacagtggcaatggtggccccaggctcttggaaacccaggtcatcatcgccgtcatcgatgtcctcggcgggggccttctgtttggcctctcttcgccgattgccggaaggaaccgccgaggacttgccctctcggcgctcctgcctcctctcctcctcccacttcctcgtccgctcagccaaacttttgactacacggcagtccgcgaggtcgtgaagggaggtgttgtggacggtgcaccacttgccggttgggcgctccctgctgggagcgctggcctcctttttgtcgctcgcaggcctcccctttcgggtggcccgcgaagcaccctcgacggcgaggacatgaccctcgtcgtcggaatgggctgaccttttcttcctcctcctgtcacgccgccctgtccgagcagcggatccgggggcggccgaagctgccacaccggaaccggaggggttccaggtccatgactcctccttacgagccactcggtccgcgagctgaaaaagctctgcggtagtctggggctccttggaggcgatcttttcgagcatgcggttgtgccgcacaccccccctaaacgcgtagatcaccgcgtgtgcagggatgcatggtatggtgttgcggacttgacagaaccgctgaatatatgagcgaagtgactcatcatcccttcgctgtactgcgtgcaagtccgcttcctcacctggacgcggatatgtgccttgaaagttcatggtgaactgttggcacaagtcctcccaagagtggacggacgcgggtggcaagttcattagccaaccccgcgcctgtcccttcagggccatgggaaagaaattcgccatgaccctgtcgtcacccccggcggcctcgatcccggtcgtgtagacctggagaaactcggcggggttgacgctcccgtcatatttttcggcgatggtgggccggaaccttgggggccaacggacgttccgaaggctcgccacaaaggctctacagccgacaccaccaaccgggggcacggagggctgatccccgcgtccgtgttgaggtgacactccggacgaggaggcgccctccgttgcgtgggcagcacgtcggccattatgccggcgctcgatactgatgcgggcatccggccccccacgaagatcttcccgggtcggaggcgctgacgaaggagtgacggccgaatagcgaacagcggccgctgctcgccgcgccctccgtcttgacgacgcggagccggtggtagcagtaccagaggtcttggtggcggaggaccgcccaccagcatctaggcgctgctgcgccgtcatgaccaagttggccatgtcgtccagccaacgttgggctggagactccgggtcagggacaatgggcgggtgacgtaggagcgcgccctggggcgtgctgccgtcgccgtagacgaggaggcgacgctccccatctcgccgcccttccccatcacccgtggatgtcgaagtcgcggatccttcgaccctctcgagcgcctcctcccgcctaggactttggcgtggagggggcggtggagtacgagctcgacggcgtgggttcggctccccgtcgtcaccgctaacactcggagagaggttgtgcgcctttgcttgttcggccattgggctgaacaggaaaagcttggcgcacacgaaagaatgcgagagcttagaaaaacacacgcagagccccctacctggcgcgccagatgacggagcgtggggctcctcaccgggagaccgcgcaggcccccctttgccggttcggccgggggccctgggtgagattctaagctcctagtctgtggaaagttcgcgagaatggaaaaagcacaagacacgggcgatgtatacaggttcgggccgctgagaagcgtaataccctactcctgtgttctggtggatctgtgtatgaagaagctaccaagagctggagagtcagagagctcttattctaaaaaccctcttctccttttcttttttttttctcgtgggatctcctctccagatcatccccccttccagcctctcctcttaagtgggcaaggtcctccttttatatctcaaggggataccacatgcaccacttctccctctctctctttttgggtgggggcccatcctatctatagtaaaacttggcttgccttctcttggaagctgaaacactgcctgtttttgagtgtggccacgcgtcctcgttcgtctgacctcggggatcaccctgtcatcccttcataaatgggcggagatttgcaacggctgctgcccgagtgacccttctgatgggacggcccatacctacgtccactccgccggaagcaggtgcaacgtgggaacacggttgtcttccggcgacataaccagtgtcagaccggtcacctttgtccaccacgtgtcagtttagcaatctgcatgttcgcccttcttcatacaacgtcttgcttataatggttgggataaagcctggcatacatctgaccaggaccaacgtgccatctccaggagctagcacgctggctccggctagggacgagtgcctagagactctcatcctgatgggacggggcgaggcgtgtgtcagatcgcctgttgcctcctaacccgcaatctgaccgatctgtgaccggtcacagaccggataaatgagcgtgccatactgcgctacatgtggcgtgacgcgctcgtccaaaccgcaataaatgcggttaggtgagccccgctatgctcacctaccccatatacgcggcgcaaaacccacaaggggtcggggcgcctcggccctcggggccgagacgggagcggtccgacccctcggggagacaaagagaagggcggccgtatcaccctcgagcccgacccccccccccccgagggggttaggccacgtgggtgatcgtgtctgcctcaagtctctaagtcatgatactcccggtcccatgtcaccgacaatgtgatttgtagaattttctaaatctctaccgaaaataggtgtcatttgtgtgtcatttcttaaaatagacgtaactttctcatacgaactcggaatcaggcaaataatataaccacaaaaatctacagaaaaagttacatccgattctcccccgttttgctgggttcggcgaaattaaaatatccaaatttttcttgcaagattgtgttttcgaggcgataagcttttcgacggagctttggaaaattctacatgccacatatttcgtccgtttgagtttatttttttagggttcgttcttgtgggttcctaactgtgaaaaaaaatatcaaaaaaataaaagaaaaataaaaaaaaaagttgcacatctctctcctctacactagagaggatagaagagaaaaattctgcaggtcacatattttatctatttgagtttggtttgtatatcgttggttcttgtatgctcctaatcgtggaaaaaaaatcaaaaaataaaagaaaaataaaaaaagttgcatctctagactgtttaagtaacttatggctatcattttcatgtggttatattttgagttagattaagcaatttcatctagtggtagagtgcattatgtttaacatgctgaccgaagggttttgctaaaagagttatggtataatttggtgaaggtccaaaatttggtatgttgtttccagacttttagctaagttgaaggatttattacatattccattcgagtttaatttttttttgtggtttgcatgtatgtatcgtgattctaagtgtaaaaaaatatcaaaaaaataaataaataaaaagggtcaagattggaaacgaggtgttgggggggggagccatggtggcgcctccccctgccacctcagcaccaccccgccacgttggcaggaggacggtgccagagtgcctggcgccgttcagttagaggacggtgccagccactctggtgccctaaaagaaaccatttgtaggataaatttttttagaggtctattttgcgaaataatttttttaaaaggacttaaatgtgaaaaatccaggccggcgtgccggtctggggaccggacagtgatgagttaaagccggtgagatccgcgtgatggattcgtacaatcgtactcgggtgaaatggagtaaatcctgtggtggatacaggagttgagtacagggtacaggcctacagggtgagtccgaaaggagaggttaaggagctcactaatgaaagtggccaagtgcgtcggttaggtccatatgccaccggaaccggatcgtatacggatgcacctaactctaaacggggtgttatcgtgttggagaatggagtttttttttttttaagaacttggagaacggagttaatcttttatttctgaggtcaaacaggagccgccatgtgcgttcgcgatgtaattaagacgcactaacagctccctcgagtgcactcgtgcttaatacttgcaggcttgcatgctgccagtcaatgcagagcatagtgcgttcacagatccaaatgttatactccctcccctttcattttaattaacgctgtgacaataacacgctctacaagatatacctttgaccttattttttattataatatatataataaataaatgcatgtttacttttattatagtgttttgaaagacaaatctatatatgtttttctagtttctttaaactatatatttttaaagttattgatggtcaaaattataaaagtttaacatcaaccttatccaaacgtcaattaatatagaaccatagggattatttatcctgtcaggtgtatcaacaggttaggttatgcataatcaaatggcctcccccggaaaatccattcggagacagctatactagcatctcgtgatcttgcattgtgtttacaaaggactaatgatatacagtatcgatcttcctttttcttttctcctttccaaacatatcttcttcttggcatttttatcgtacaacccaattcatgaaaaagaacactatcatggtgagttggatggtgtattgtcccacggtggtatgaccatgactttcggtgttatgctaacatgtagcttcgcagcattgatcgtgatttaatgatagatcgttggatggtcaccgtcgccaaatcgtgcttcaattcgtcaatgagccaacgccctgaaaaaagtaagacgtacagatatcaccgtacggccgcttcattagctttcacacaatcagatatcattgttgctttaatccacttcttgaaatcatcgtttaattaatacgatcagcctccatttttctcatgtggtagtgtcactttgtatcacaaggtattaggagtacatccagcaatcgattatcggtagtcactcacttttggtcgtttcaatcgtcggattttattgtgttaatgtccgggcaataacacgtaaagtgagccgtccaacttctggtggatttggcctgacgcgtcgcctttttttgtatgacgtgggttagtctccacgctaagctaccggacgatctacagttcaaccctgcagtttttttttttaagataatggaataaaccctccagatttatgacaatgttttttccgatttctgattcctccaatagttcgacgctggtgggctcgtttatcacttgggcggctattctccttcccgtcgttaattaagctgcatccggaagcacagcaccggatgtacgcgccagattgacgtgcatgttccctctacctggcactttcaccggtagcctgtaaccctttttacccctttcgtctacaacggtagctcgtgagccatacacgtatacacatacgaatgccgtggtgtcaatcacctttgaagccaagttttctgtgacatctcgtctcccccggccggtcgctgcaccaccggagatccagtcgtagggttcaccaaaccgttttaagtgtgttactatcactttatagtttggtggttatagtaagattgatatactgtgattttaaaaacttaaaaaaaattactatacatgataaaccagccggtccaaagtactgaccccgccacgagcacggcacgggaaggaattcggaataacggaagaaagaaaggcgccgagtcgtttcgttgcgcggatgcgccagctgccgcgttgatttcgcggggggcgtccgcgtgtggtgcggggtcgcgtcgtcctcgcgcgcgcgcgcgagcgagagacgagagagggtggattcgtcggtgactcggtgtcggtcggtggtttcgtccgctgcggttgccgagacgggagcgagcgaacaccgtgcgtgcgtgcgtgcgcacctggttctcgtgagcaataagctggctacggcctacgggcagcgcacacatgacgcattcttggttttgttggtttttgctagcgagaccaccacctgcgctgcgctgcggacgcacatggagtggagttcactgggttgaggttttgatctggggagatcattgtcatgtgaggggctaatctccgcgaaatgcttgatgccaaagttaaagaatcacgaatcacgcatgggacaattctgaggaactctgatcatcatgaaagcgagggcatttggatggcagatttttcttttcagaatgttcacgtgctagtactgttttttgtattgtggactaccccagcttgtagagaccttaaatatttccagggtgttcaacagtaaaaaaaggagaggggaagaaaatgaaacaagcatgtccagcgcagggaaaaggtaggtagatgcagtacaagggatgcacttctgtgtgattactcacaaacttatgtgtgatcactgcgaacttccgtgaaaatttatgtgtctcatacagaaacgtatcacttatatgcttgtgattactgcgaactcctgtgtacatggcaaatttcctcataggccaaatttgcatataagcttgattactcacaagcataggcaaagcacaacaggggtgataagtgacgaactgatgaatgaccgtacccttgatttatagggataccaacaagaatttcacaatcgacattcgttctgttgtgaatgataacgattacaattcgtaacgtcccgtgatctgaacgcaagagcttccaacgacttttgaagcacacaaagatgatgaaggcatgaagcatcgctggatatctcaggtgctccgaacaagcggcttttctctctggacctgacgaaagtgaaattggcggcggttagagaaacttatgaaggctgagtttagttccaaactttttttttcaaactttcaacttttccatcacatcaaaactttcctacacacaaacttctaacttttccgtcacatcatttcaatttcaaccaaacttccaattttagcgtgaactaaacacacccaaaggaaaaatgtttgtttcatcctctacaggatcgaacactcctctaaaaagaattgactggacgccattacatacatcatctacccgtgtagcattttgccccaattcctgtcttcagtcttcacggccaagaactactgtaggataacgcaacaatcccggacctcccctccttacttcaaagctaagaactactgtgggaaaatacctttcattccatcttgtgcgtactcgttgttttagacctggcattctaatgaatgcccataaaatgcatatattcaatgtgaaggtgctttcaggagttggagattacttcgttgaagctgatagctaacaagatctcaacacgtcagagaaaagctacaaatcagatggtcctactgtatctttattacaggtgtagattggttttcagaggtcctgattaaaatcgacatacaacgacagtaaatctcttgaaaggaaaatcatgtaaacatagtaccataggtagtaggaaatagtacctgttcatgttcattgctctatcaccaattcaccacgtagagatggatcggtagctgtgagcctacaatggccatctcttctaccatgatgggaaattgagggtgcgaagttcagcatggtagaagagataatgcgcaagcggccaactgctgtataatgcgctcgccaagttcagcatcatcagctcctacaggtacctgaaatcagaagggaatgcgtcaatagaactgcatggtacaagggctacctccagggtgcaaacaggccactgcacaaagtcgcaaagattatgaaaatatcaaatggtagcaatataatcgccaaatcaccaactgctggatgatgaaaaattatcaggaggtttgaagcggttagcttgcatattcctctctcttgttcagtctcagtagttcttggctgcatacattaaaaaaaaacaaaacaaaacgagaaccacctaaagggtgtgtttggataatgggaaatggagtgtgagattgagattgggaaatgaatgaagggttaggattaaatgaaagaggaagaatgaatggttaggatttaaagatgtcttttggtgagcgggaaatcatttccatttccaattagccaaacattgccaaaaggtacatcagctcactaaggagatgcagaaaaggtacatcatgtattcatgttctcacaccgattcatccggtgtctctaccaagtaatgcaggcaaagacaatcactagtctttagataagaaaaggcaagcatttaccagaatcttcagagaaaaacttacaaggatttgcaaaattattaaatccataaaagatgcacacacaaatgatgaagcttttaacccatgggatgctgcgatctttactcaagattaagattctgtcagaaacagtagcaagaacaacgaacaaaacaaaccctcctatacacagaagattttggtgttcaagtatgattttttttcctgccgtaagacacacctatacacacctgcttatattgcccacctgatttactactcatttttaaacaaaataaaacaaccatatgtggatggccccagcagagtctatcacctctagaccgtgtttcagtatcatgagatcaatctttcctgtctactggcagcgtgtgaattgcgatcgctggccaaggatgccaaccatttggcatgctgcttctagcaatttgcctgcagtattttaaaaggaacaaagtataagaatactatggaatggttaacaaaatgatttaagaatatgagtctagggagtcagaagattattgtcatattacatttaacagacaccctgtcaaaaagaacagcaacgggtgtcaggaaaatcttggcatttttgttgtagtatgagatacgacaatggcttgaggtaacttaaactcaaatgtaaaaccgtacaagcagtaaaagggtaaagcccaaataatttatctatgccacaaaggcacatcctatgtcacaaaattgcagtcacaactgaaaacataggccataaatatccaaagaacttatataagtttgtaatcagcattgttgcaatcctaaaattgattaatcaagaaaaggaatcaccaagggagcaagattcacaatccatggtcagctaacaattgcacaaggaatactatatgcttgctgctcactatcatccaatcttgtaacgagcactcttgttcgttccctatagattggacagctttgatttacccactactgcactttacttggctattcctagtatccaaatccagcttcatcgccactattcgtagcatcaacatgcatggacttaaacaatttcagaaagaacaaaaaaacatcgactaacctcccgaatctaggatgtgaactgtaaatttctgaggaaatttttgtacgattaggaaattcaagttcagatctaaagacattggctgacctctccggtgtttaatcttgctgacgccggtgatagcgggcgccgtcctgatccgggcggtggccggcttcgtcttcgtcttcgtctcagccggcgggaacagcacggcgtcaatgccctgcactgagatcctgccgtcggcgaagatgtccgggtcgaagagatacgccgagccctcgccatggccaaacttgactgagccgtcggcctcgcgcgccaccaccttgtgcggcagccgcagcgtgtcgtagcgcaccttgccgaaccgccgcaccgcgttgtacatgctctcctcggtctggtactccgggatcatgtggtagtacaggatgttctccggcgagccgggctcgctgagctggtcggcggtgagccgcgccatggcctcgtcgttgggcgcgagcacggtgagcgcgtacccttcggagacgagctgggctaactcggtggcgagcgaggtgaggttgacgaagatgtcggcgagctcgttgtagccgccgtacttgagcagggtctgaatgaagtccttcacctggctgtcgccgtcgtagtggtcactgggctccgacgccagcgcgacggagggatcgggaacagtcgcgtcggagatcgggagcacaggagaatcgccgggtggcgccggcttcttgaggcgatccgtcctcggatccacctcgggcgcggccgtcggcggcatggcggagatgtcggcgaggctgcggcggcggttgaattcgtcctggacggagcgcggcacgaggaggcggtcgatcccgtggatgacgccatccgtcctgaccaccgcgtccgggcgcgagacggcggcgtgggcgacgcgcatgccgccgccgccgtcggccgcggcgagctcaacatcctcgccggcgagcgtcgggtgggtggccgcggcgggccaggaaccggaggggaggcgggcggggaggacgtggaagaggagcagcgactggagcgagttgagattccgcggctcgagcaggaagcgcttgaactccgggtcgatgtcccgctccagcgcctcgttccgcggcgcgaggatggtgacgttgtgctcggcgacggcgtcctccagcgcctggagcagcagggccttctccaccagctccgccatctccgtgtagcgcgagtccagcaacgccaccagcaccgagtttgacacgatccctcctcccacggcgccggcgccggcagctttgcccgcaccagcacgagcgccgttgccattaccgtcgatggcgacgtcggctgagggcaatgtgggacgttccaccggcgccgtctccgcggccgcacgggcaacgaggagaacgaagaagcacacgagtgcgccacaaaccggcgcgcccatcgctgcggcctgcggccacttctctcctgcgcgaattgcttgtgctgctgctaccgcgccctcgtcggcgagggatccttctgcggcactactactccggcgatggactcggggaaggagaagggagtagcaaagtaaatggagtagtggaggtggggttgtcgtgccagcgtcgtgcgcccgcgccgccgcgcagtgcgcacacaaggtcggcacgccgtaagcgaggaaaggcaaggcctcgccgcagggatcgcgggaacgccgccggtttcgttttggcccccgccatgcctgcgttgccagcactccagcacagcaccgactcgactcacactgggggcgcctagtttcccgcaggaagaagacgacgcgttgtttggtttcctgcagaaaaccgtgggccgactctagcaaggccctgagagaggcatgcatagctggctccagcccaagaatgtgggcctcatatgcagcccaatgtttagcttgcaggacagcttatgtgcttagaatattgagctcactattgttaaggattaatccctccgtcccatgatataaggaattttgagtggatataacacatcctagtacaataaatctgaacagacgacctgttcagattcattatattaggatgtgtcacatccatccaaaatcccttgtattatgggatggagtatctactaaattctgagaataaatttagtattttaaaaacaaacttaacaaatatcttagaacaattagtctaaacaatacagtagaaatggaattttgagaaaatgtattttttgaagagtggagcaaataactgaaagttttctgatatcagaaattaccccagcaaagttgtatcagataaactaagggtgagattatgagtgtgaagattgagtactcacaagtcaagcgacgaactgatgactcatgacgcccttggtgcactacatttatagggatatcaacaagaatttcacaaccgacattctttatgttgcaatttacagcgattatgatttcataacaaccttgcatatatattacacaaggtaaaaaaatgtaaaggttcatccgcaagcacaagtcttatgtcccgcgatctggatgcaaatgcttcagcgaacttcctgaagcacacagacctaccaaagatcatgaagcatcgctggatctcaggtggctccgaacaaacggcgtttctctctggacctgatccaagtgaatttgacagcggtttcagaaactactaaaggaaaatgtttcttgtgacattttgccaccccaaaaccttaaaaattttaaagctttctcgtgcacaagaagagcatatatacctgtcttcacagtgtatccaattcttcaacgaacatggagtgggctcattgagagccagatcctgacgcacaagtcgtggaagaagtttcatttacaacagcagcatggttgggggataccgtcctttgattatttgcgtctgaaggagagcaagcactagctgcaggaacagcagatggtccagtatcgtcctttgtttctagccgttccatcatgcgagataccgcagcaatcccagcgttgacctccctccttacttcagtgccaagacctgatatagtgttactccgagaaaaccatctttccttccatccacgcgtactctttgttatagaatctttatacctggcattgtaaagaatgcccacaagtaagacactgatgcatacgttcaatgtgtaaggcattttcaggagtttgagatattacttcatcgaagctgactgtaggcgagatctcagcgtgtcagagaatgactgcaaatcagatggtcctgctgtatcttgattgacaggtgcagattgattttcagatgtcctgattaacatcaagatacaaagagagtaaacctcttgaatttggataggaatagcatgcaaatatataccgtaagttgtaggaaatacctgctcattgctctctcatcatgcagagatggatttgaagcaccctggtcagaatgacccacgtatagctgcgaaccaccactcatatgtccttggtctacagcagcaagagcagcaaaaggatgagcagaacctaagtcagaagattgttcatggtcttcatcttggcctgaacttgcatgcagggagccaccaggaatagcctcattccttgaaaacaccacgatttgtgggcggctatgagatccagatcggctacgatgtccatctcttctaccatgtctgtgtgacctacgcattgcagcagcagcagccaagtgttgtataatgcgctcctcaagttcagcatcatcagctcctacagggacctgaaatcagaaaacggtacatcaatatagttgtatgaattaagcctacctccagggtgcaaagaggaatcatcgcaaatatccaaatgatagcaataaaacgtgctgcacctcaaaatcacccaatactggatggtgaaaaacagcggcagtgttcaaacggttagctcgaatgttcctctcttgctcaacagcctcaagtagttcttggctgcacagttcaaatataaaatgagaaccactaaattggttcactagggagatacacaggatgcaagttctacctcataggatccttcatgctgataggctgccaacacatgggacactgagagcttctctggcacctagatatcaaacagtgagaagcacacatcaaaaattaatattgtcgaggacagtacagtattttgacaaattttcactacatatcgattggatattgactttatatacagcattatccttgatcacatgagctcaccctcaaaatcgttcgtattcataaaaagaaagcatgagaatatattatatcctccatttcagattgatcgcacataaattatttttttgtacatctctagtatctgcaagctcgtatagaataaatatttagaatatgtccccatcagtccataatagacaccagaagggcaacgatagttttatgagcatactgcagaagaactgcacgctcacaactactacgacaaagctatcgttctagactgcttgcacagatgaaggaaatcttccagctgggcagctcagaagccttacaacccctgccccacctgatggaggctggtattgctgaaataatgaaagtctgtggatcatatgctccttaatggcttattgagtctcatatgctggagaatttctgtatggttattcactgcttaaagtgcaggtgatcatcattaaccttcatatacaagtcgatcatggttgaagagcattgcgatgcctaacacatgatctgtttctggaatgtaagatcccattttcgtcttataaatcatgtggtagttccactttactgacagcatttcagcacgacaacaagcatagattcaaatagtgtaagcagataatcaccatcaccttaaaaacaaatattttttgcaaccctagcaaattagatgtagttcccacagcacagttaaattgaaccatcgatgtgtagtcacaattgccagacaaacactaacttcctttatcaccttgcagctaaaagcacggccgtttattttactttatctaggtggaaaagaagatacagaaacaaaacaaacaatcagggattgcatcatataaaactgaggtacacaagcaaactagtcatggtgatatcggatagtttgctttgtggaaacaagagcaaccttaaatttagaataaattatgcaatatgcatgattcaattaccgtaatttacatctatatcgattgcaatgcatcaccagctccacaaagaagtacagaaaaagaaaaataccacacaacaatatcgttccaataggccagaaaggaaacattaccattcaagaatgcactgcagatggtactcatgcttgcaactcgtcacctgcaagagaaaacgccaacatccacaccaagaaaacaaatgagcgactcgatcacaatcatatcgaatccaaaattttcgcctcggcggatgcagaccgtggaggggtcgttgtcgcagaaggcctcgaggcagatgctgcaggcgtcgtcgcaggcgtcctgcacacctccctccacgaacgccgccgcggaggacagcttgctctccatcttcaccttctcatccatctccgtacagcccaaccgattcgattagcccttcccgcgcaagattcctacgcctgatgaccaaagaaaaaacgaattctatgagcaaaaaattccacggattaagccaaaccaagccaatcaacgatcgaaacaggagtctcttgctcaataatccccccatccacgatacgaaatccaccgaaatgaccataaacacaccacgaaatcgccccgcccccatgtccccaatccaaccaaaacgatacggataaatcaaaagaaaaacaccaaaaaaaactatccagaaaggaaaggcggatggattgcgaggctaccttatcccgattgctcaaggggaatttcaggattcggccggattaatcagcgaactccccgcggaattgttccgcctcggcggcgaaggcgagacgacgacgacgacgacgacgaggggaggaggagacggagtcgggaaggctttctcttaataaaaaaaaatacagataaaagaaaatcctaaataaaaatcccccctcccgctctctcccttcccctcacgccaatgacgggtggggccggagagcggtgggtcccccttatctagtgaggctattgcgggggtgtgggggcattggcgcgttgctaaaatcgaccggcgcgcgtagggggagggggagtgggtgcgcacgaaacgtcccactgcggcgtgggccccactcgcgatttcgggggcccacctgcgagtgagacgtgcatttcggggcccctcccctcgcctcgggttccgagatattatttttagacccgcatttcggtcaagggtgcgataaatgcgtgtgtaagagcaagttcaataatatagtcaattactagctccaatttatctatagtcaatctaatagcttattcatacaatatttacatactacactattaatatttggtcccacatgtcataaacatattgtgtcttagagtctatgctacagctggctacaaatctgtagcccgctgctcttctctctccttatttatctccttaaaatatgtttacagctggcttatagcctactattgtacctgctctatgggcctccaatggctgatcgtctcgtctcaaagaaagtacggtgtcgtccaaacgtctgaccaagaattggcgttcaagatcaaacaggggttgatgagcagagtggttggaaaactttgcgataagttttacttttccggttcgatccgttcatgtacacaaagtggcccacgtctataattgtattttaaattaataaaaaatagtgagaattgtgagatcattaatatatcattgttgtttttctttcatttaagcgtgtgttaagaaaagtattcaagtgatacatgtgtgatattgtgtacttcttccgtccaaaaaaaatgaatgatatgacattgtaatgcaacgtatctgaacaaaggtacgtccaaattcgtagtattagaatatgtcaaatccagtattatattgattttttatgggactgagagagaaaatatgcccatcttcagtttgataaaagaaaacgatgatggctagagctcttaaaaaatactactaccaaaacatgattgggtacgagtaaatgtggtgagcatgatttaatctatgacatactactaattgttgattaaaatatactctctctttttttagttagtgttacatgtcacatgttatactggatttatttattcgagaatagagagagtgagtgttatttatgacgagaacaatatttgtgttttatttttacggagtagcgtatctactacttcaaagacttagtacagttagtacaattatgtgatacatctactttgcatcaacacttatataaagttacagacaatagtcataaattgtggttagtgcctctaatcacaaaaggttaaatgtagtgcgtatttgtcgacggaagctgaaatcactataaagtgcgaactcatttttacgatgttatgcctaccagacacaaatgccttcgtacaacaaacacatgcttcatccaattgatttggaaagcttgagcgccgggagaatgtaagtcctatacatgactaatcatctagaatagggtcttgaacctcggactgcctgacgacgagagggtggcaaaacaatatacattgtcctctctgacgtaaagaaaacgaaacaaccctctatctcctggtgggaagctatagaaaatgtacaagcttggtggaaaaaccttacaaacatgacatgtgtgccaaagtagggattgcgctccctaatccttctcgtcgtctgggagatacagaagaagtggaaccaacgaatttttgagcacaacgagagcatgacaatcaccctcctagcaaaaattaaggaagaagccaaaatttaaccctaggaggagctaaaccacagttaattcctaagagcgtataatctgtaaagacgggcttttcccttctttttttttttcgttaccaggggtgtatttttttcctctctatctaacgaaagataaagcacaatctcacgctgtctccttttaaaaaacactttctttacgctgttcattggctgtagcgggtagaattcgcaaggaatatgaattaaatttggttataaatgaacgtacttttgtaatcacaacaaagggtccatagctcagtggtagagcaattgactgcagatcaataggtcaccggttcgaacccggttgggcccttatttatttatttttttaaaaaactgaattgggttgctatttaagaccgaatataatttatttgaattggataactgtttttgaagaccgaattattcatttcattttaaaaaaactgaattggattactgtttttgaagactgaattatttatttcatttttaaaactgaaatggattattgtttttgaagaccgaattggattaatactgctacataatttcacatttttaaaatttgttggaaaaacaactgaattggattattgtttttgaagaccgaaatggattagtactcctacattatttcacattttttaaaaacatttgaaaattgaattggatcaatactcctgctttaattttaccaatgcttttgagttgactcctacaatcatttatcggtgacccttttgagtggtcaggaaacatcttttgagttttgatacatgatcctgaaaaggatgcctcttgattttatttttttttgacgtaaaggtaaaaagcctttgagttttcacttttcatacataaaatatgatcctaaaaaataattttgttttttcttccttttgcacaattgcctttatttatctttaaaatagcgagatatgtaacgaaaggaatcacataaccttccaacagaaggagctttcagctacctcccttttatccaagatcaaggaagaggccaaaacttgggccttagcaggaggcgagaagtgttaatagctggctttttttagttagctcggaccaaaggtcctagctattttttttcctttcgctttataaagttctcattctctattcaatgaaattggcgctcgtcgattcattaaaaaaaaatagcgagacaaaactgtaagaaggtatcagcgctacgcaccatccaccaaatccaccactcggtttcaccacacaaatagtctttttggatgcttggttgcttttaacttccctgtcaatgtcgtgaaaaattcagcaccagccggcggcggcggtggcagcaacagtaaacggccggcacgccgccggcacaagacgcagccggcaacatgaaacttcaaacaatcgtcatcatcaagatcaattaatttggtctcttccattcttcttacatacaccaatagaccggacaaaattaacggagaagattcgtttcattggtcagacctatagtacaaagcctattcttacacgcatgacaacagctaaaactgctaaccaattaaacaagaagaataaaatgtaacaaattaactggaattctactcaggaacgctgatgccttcctgtcgctgtggtcttcagacttcaggttgggaaaggagcagcaagaaacgaaccttgcctgctctcatgtgctttccctacttacaaatgcatatacaaagaagatgagctacagcgtattttgccaatgaagatgggctacaaagatggactccatacttaatggaggcaagtcaaaaattgctgcattgttcggtctattgacagttaactgtgagattgaagcctaggaaatgttgatgctcaggcatgtggtagctttgcttgagagatccaaaacttagcttgcggtgcgatggtagtttgacatcgtgatattctgatgttgggttatagccattgtctgaaatggcaacttcacttagcagcacctgtaaagaaaccagaacaaccagtgagtttacactatcttaatgagcgtgttcaatcagttaccctgatgagaatgaccaaagttctaacagaagatcgtggtgatttttctcattcagagcatgcatgatccaaatcaggagttactttaaactgcattacataagtactgcaaatgtttttttttttactagctactacaaatgttttagtttagaagaagcgcaaaagtttgttttcaggcctatttcacaaaatttgaagttttgggctactgcagatggtactctatagaggaaattcttattttaaattcacaattaccgtcataagtagttcgttgcccaatttttatcataagataaatgattatagactgaaacaaataatcctggttccaagtaaggcaaccgaaatcatacacttttgaaagaatatctaatattgtcaaaggataggaaagaaaaggtagagaaaacaacaattaccttttaccgaagttttagcgcttccccgaggccaaagtttccggtactatgctgacccattttacccattgcattatttcccttctgcatcatttcgacaaactcattgtagtcgatccgtccatcctgcacaaatgatagtcaaatgagacaaaattgttgtttgtcaatttatcatgaaatacttagcattttctactcacattgtcctgatcaatgtctccaataatatcctcaatacgggtatcacctataccgaattcctcacatgccttttgaagctcatcttgagtaatgtaaccgctgccatctttatcaaagtatgagaaagctgcaaacagcttatcctccttctctactttgtttatatgcaaagttgcagcaatgaattctccataatcaattgttccgctgttgtcaatatctgcctgacatattcaagaaaaggagcttcatttgagaaacaatccaaaagtccagtggatattcatcataaatgtaaagcgacactgatatccaaacttcccagaatgttccgcatttaggaaacagttaatcctcctcactacaagctattttcactcaacaaaattaccatatattacaaatgctgataaaaattcaacatgaagcaagctcacgtttcaaaaaagaagtgtatgccagtactttcgtggtcaacactttacaaccaagaaaaggagccggtgggtacttgtaaaaattgattaaaaaaacttaataaaatggaaatttgtttgcaagatacaattacagatcagaacaaaatcttgtttactaatttcagtataaatgatgaatagatgcgcagaaaccttcttagaatacttactgcctccattagagcatcaatttccgagtccatcaaattagcaccaactctctgcaagcctgtttttagttcttccagtgtaatatgaccgctgttgtcagtgtctagcattttgaacatctcttttaatcctgcaatttcttcttctgataaactctcagcaataacctgcagtcacataccagttcatattaaaacatcaacatgaaagcagcctatatattactaattagaaaaatatgctgctcaccctaagcgccattttctttagtttgttcattgcagaaaattgttttaaccgactcaagacagcggaatcaagaggcttgtcaggagcaactccatcaacacagacccaaggatgacctagaaaataattggataaatttggttggaagtaaaactagatgactagcaacaaattatttacaaatcattgcatacttccaaactactcacatagggcttcatgggcagtcaatctcttttttggatcacgaataagcatttttctgaccaaatcctttgcgctctctgagatattaggccaaggctcagatgagaagtccagatcacctttcaaaacttgttcaaatatcccttgctcactttctgctccagaagccaatttatcaattgcattagtattgcaaatattacaaggaaaatatatttcactaaaatacatatgatctcaccatcccaaaatggaggaaccccactcaacaaaatgtagattatcacaccagcactccagacgtcaacctcacgaccataatgtttcataagaacctcaggtgcaacatagtacgggcttccaacaacatccgtaaatgtctcacctgtcaaagcatttttttttccaattaatatgacacatgaagaatggtatttataattacatgtgcggcatatacaggattatgtcaaacacatagtacctcccatgcttggttgtctatagctactttaagactgtcattttgggccaacatatagacggttctgtttcatattttatatagctaggagtttgtgtaagcggagctagaaatataaacctgtggggtcaattactaatagcttgtatttaagagatgtcaattttctaacttttttggatttatacatgaaaatcaggggtattttttaaaaagctgtgaggtcagctgtccccacagcttgtacatacatccgccagttcacatatagctgtggagaaaatttgacttaaatatccaggtgtaagctctcaacttcacgtatatatgctcatgagtattagttggcacctaaaaaattaagttctggagcaatttttatgagcaaaccacaatgacatggtctacctacaatcaacgtcaacaatcagtaagatatactctaattggcaccagattgtttaggacttagcatcgagactataacaaatgtgtgcaatgaggtgcacaacaagattaacccatggaaatggaactaatccccacagccatctcaaagtataaatacattttttaaaaaatcttctgattagattaatcatagcaccaatgctaatgctatcatcacatatacagtctcccattttgcagtcaccacaaatgctcacattattattaaagtctgaaactaaagtatatatttttgcagaaaattgcattgttaagagtcccagaagggggagggcgccatacctggcttgaagaagatggagaggccgaaatcgatggccttgagaggcgaatcctccttctggtggatgaagaggaaattctccggcttgagatccctgtgcatcacgccgagggagtggcacgcctcgatgacgccgacgatcacccgcgcgagctgcgccgcggccttctcggagtaatgccccctctggatgatcctgtcgaacagctccccgccggcgcagagctccatgacgagctgcaccgcgacggcgtcctcgtaggccccgacgatggagacgacgttggcgtggcccgcgaggtggtgcatgatctggatctcgcggcgcacgtcctcgacgtcctcctgcgtgagcagcttcctcttggcgatggacttgcaggcgaactcccgacctgtggccttctcgacgcagaggtaggtggtgccgaactgcccctgccctagcttcttcccgatcgtgtatagatccttgaggcgggcggtgttgacgtcgcgcttgaggacggaatcggcgagcagcccggcgctctggacgcgcttgaccttgggcgccgccttgttcgccggctgctccgcggcggaggtgggggtcgacgggtcggtggagcgggaggagtggtgggaggagtgctccgatggggggattgtgacgggctcgggcgcctggtcggacggcgcggaggagggcggcgggagggcggggggagccgcgtcggcgggcctgggtcgccagagggcgacgttggcgaagaacccgttctggccggcggcgctggggccgacgcagttgttgcccatcgccggcgggatgcccctaccctacgcggacgacggcggcggcggctgcggctgcggcggcggtggcattggagacgggcggtggaggggcggcgcgcgacgaggccggcgggcgcttggttggttgggtggatcggaggaagacagagaggagagcgaggaaggaccttcctgggaccaaatgaggtgggccccctggaacggaccctctatcactgacgtgtgggccatcctcccgtgtggggcaacttgtcagtgggtgatgagggatagcggtgaggcgacggcgcgggatgcggatcgggtttctgcgcgccaaatcggacggtctggatcgcccggtttacttgtgcaggcccgaatttggaatgcctttgtgtattactttgggctttggcccatttacataggacttccatagttcccttccattggagcatgagattgtttggtttcaatgcaaaactttatcgattttgttatatctcactcgaaagatttcttcttatctctcacttgattttctcactcaaatttacagtgtgttttcttgtaaattatagtgtaatttatgaaatttacagtgtaacttttgtaagttacagtgtaatttttgaatctttgcatgtaagttttgaaatatatattagatttggtttttttcttgaagatatggtaatttagtgtccattatggtgttttttagttgcttttttgcattttactgtgcccattagattttaatctaaagattaaaaatctgtgtgatatgatcataaaaatctttcgaaagatgcataggtactcccaaactttattactagatttttttattacgcagaaaatatatgcgcacacatatgtttgtgtccaccactccacccccctaacacaaccgaagagtgaagtaccttgatgtcactagattcctatgaagtatcgtgtgtgcacaatatttatgggcttttctgttagaggaacttttgggttgcgttttctcctttgaatccaaagctccataaacttttttttttcagattatgagaagttgtgattgtagaataaaaaataaactaggaaagaaaaattggtttttacaacttctccatattctcaccagttgaattcctacccatgtttctcgtaatctaaagctcctccaaacaaaaatcatgcactcacaactccactctctacattaacattctggatgagattattgggcctgtttggcaattggcacaggagctccagctccacctcttctgtaactgaagctcagccaaacagtttcatctctacctaaaataagagcggagttaggtagagtgctcttacaaaataaactaaagagttgaagctgaatttagactttagacagttccgcaactccactctagactcaactcctgaaactaaatttagaagttggagctctaccacaaacatgctaggagtagtgttgctctaccatgcatgtttcttcacagccgacgagtgtagcaatcctacgcggtacacaaagcctttcacgagaaaccgtagtgacacgcaaaattcttgtgttcaaaacggtggttgcattgcagggtcaaaggctcatgcgtcatggcgaccacgatgcctgcttaaacaaatccgtgaatcgtcaacttagttttaaccccgagtagaattcaactgctttgattttgattttgacggtgcaatcagatcccgagtactgtactactgtatgcatccctcgtttataggggcgccgtatttcatttggccgcgtaatcaatgcgtttcctactctgaaagtctgaatttctcaaggactgaaaacgaacagaggcatttctactcgtcagttgacctgctccttcaacttcaaacaggcctggtaaaatggtactagtagtacatggtgttctcgatcttccagttaattaattaagaaacatcaaaattcatgttacatgatgtcactaattaagaaacttaaacggtcttactggtacatatatatggatatcggatgtcatgatcttctcgacctcccgattaattaagagacgatacgtcgacggtggactcaactgtgccgtggaaatatatgcagtcccatagtcgaattctgctcggattgaagtcgtacgtaattaagcccttgaattttgtcaaattgagtggttagttaggacaagcagctagccaaatcgatcaacaggacgcctttttcagcttcatatcccaagtgggattgcaattggggttctaggttaaatttccaagtaaacgatcaatcaaaggacgtgcagagaattcagagtcttagctagggattcttgtggtcggcttgggttctttctgaagaactgtcagagattgaagataaaattaaaccagagctatatctgaacactcgattaaaagttcattcttgtcccgttcaaacaatggagaaaagttcattcttgtcgctgcaaacttgcaaccccacagcttgagattaccacattacgcatcagacaaaagtgtttgacatcgtagtaaagtatagctaggtaggtttggcgtttgaacgccttgactgatcaactgtggacgcgagctgataatccataccgatttggtcaacgttgggctgcagccgaaagtaatactagttatcatcaagccaataagtgaaaactatcgctaaccacttctaacctaccttggcttgccttccaaatggaagtgtgtaacgcgtctgactttttcgctagctaactaataatcgtaatcgatcgaaaaaaaaagtcagcagtcatgaatctgccgtacttgaccgacgacttttgacattgtattgctactatatccatgtctttgctactagtagcatgtgaaagtgtttgctactctctatctataaaagcattgtgcaaagtgcaatccattatagttgtcaaagcattgcaactttacaagaagctactctttactcgtagcgagttgagcaaggagagctaggtagctgccatgaccatgacagtggccatgccgtcgtcgtcgtcgtcgaggagaggtgggctgcgagggccgaggccgctgccgctgaaggtgtcgtcgtcgtcgtcgagggggtcgtcgccgtcgtcgtcggcgtcaaagggggcatccaagaagtcggcggcggcgccggtgatcgtgtacgagcacacgcccaaggtggtgcacgcgcggccgcaggagttcatgaccgtcgtgcagcggctgacgggcaagccaccggcggcgccgccggtgatgatgccggcgtacgacgcgccggcgatggtcgagcagggcgcggcggcagcatgcggcgccggcggcgacccgctgctcctcaccctcggccagcgccaggccgcggcgtcggcgccggcgcagcctccggcggtgccgtcgccgatgatggccgccggcatgctgctgtcgccgggcttcgtcttctccccgaacaccatgcagtccatccaggagctcagccccttgttctaaatcaaaccgtgagttcacgtagaattcatctagaatgtacgatggtataattgtatagtgcacagctcacagcagattaaactgaagggagagtgtaagccagttaattatccgtgctgttcgtgcaaaattttgcaagcgaaattgaaattttgcacgcacagcggtttgcatggtggtacaaagctttgtaaattttcatcattctgtataagcagtagagcacttgtaaatttctgttaccatgcatgggagcttcctgatacaagttcatatatagggctgtttagatccctgacaaaattttttaccctgtcatataaaatgtttgtacacatgcatggagtattaaatataaacgaaaaaaataactagttacacatattgcgtgtaaattgcgagacggatattttgagcctaattgctccatgatttgacaatgtggtgctacaataaatatttgttaatgacatattaattaggcttaataaattcgtctcacaatttacaggcgaaatctctaatttgttttatttttagtctacgtttaatacttcaaatgtgtatccgtatatccgatgtgacacgccaaaaaatctaaacacaaccatagtatgtagacagtgtataataaatttcatatatgcccctaacatttaccaatttatcattcaccgcctgctgtctaactgacatgtggggccctgcgaaattttcagtggcaaacaagtaaaatacagtgttcttttttttttccgctttatgaaacagactcattttgtttgacctgctcccaaatgctcatggctatttgagatcacaccagtgaatggcgttgccggccctacgaggaaatcttgaaaaaatattgattacaagctttggcaccggctgtaagcatcgttgtcttcctccctggcatttatatatgttttgacttcttgaagcagatttcggaagtattcaatccagttgcacattgctgatagtaatgcgttcatcatgaccaaacaaaactgaaactgaattttttttttgtagaaatgttatcatttgagaaataggcctggctgtgaatttcggtgcaaatttgacaggctatttcaggataacaatggagcagctacgagggaaaacaatgacaaacgaaacataagaagtgcagtctgcagttcagcaacattcctattctgagtgcattgatcatatcacacaatcacaaagcatagagaaaatcccctatgtacccatgaaagttcatctaattccttctatacccctgaattttgctcaatcccttacatacccctgaattttagtttggatcccttccataccctttccgctagttgaccgttagttgaccgttaaattcttttgaaaaagtccattttgccctttgctatgaagaaacataataaattaatgaagtatattgttggaatgtaaaaatttattggatgagactattatatttatgagtatgtgatgcaccatattatttgtgacaaatttacttttacatatgatataaaaagttgatacttatttattagttattaaaagttcttttatgtagcatatgtgttttcatagtaatacaacatatttgtttattacttcagaacacataagctaaaatttttttaataactaataaataagtattaattttttatgtcatatctaaaagtatatttatcgcaaataatatggtgcataactatctcataaacataatagtctcatataacaaatttctatgctccaacaatatactctattaatttatatgcttctttataccaaagggcaaaatggacttttttataagaatttaacggtcaactaacggtcaactagcggaaagggcatagaagggatccaaactaaaattcaggggtatgtaagggattgagcaaaattcaggggtatagaagggattaggtgaactttcaagggtacacaggggattttctccaaagcatatgccactgtattcagactcacaggtagaagttgccattcaaaatacacaccatttagacagagcagacgtgcaaaccagatgcaacactccagcatttcggcaaccgcgcaaacaagatcagattccatagcttactatgatgtacactctacacagagcatgtcagttagctcctgattacaagctattcacgcctaggtttgaataaacacactataagacaagctcaaagcttccaaataaaaacatacagctcaaaaactgtgcttgggcaaaaaagaaaaaaaaaagaagaggaagaacatgtcaaagaatgcaatacacacacttacaatgaagctgtaaacaatgattccaggttctgatttatagacaatatgcccgggaaggtcgtttcattgccgtgggctaggcagacgacgccagggactcaacatggtggatctgtcgagcagcagtaggaagccaaggaacgtagttgacagaccgaaggtatacctgcgaaatatccatgggaacagatttggtctcgattcagaacaaaaaggataatgatatattcataaccaagccatcatatcaaatctacctggctgtggaacttctgtttctccaaaagattatcgagagcacccactgcggcaaagagatacaagactgttagtttctgatagataaacatagccaatgctattggtatggaacacagagagagagaactttagacaaatcgaaaaggatcaattattaactgcacgttacgttggaaagaaacaatctgaaatattttatagatttccttccaattacaacttcacatgttggcaagcacacattatagaattccagatatggaattgaggtagcatgcaacacatgttactgtggtcataactcccatacaaaactggggctcaagtttttagcagttgaccacatatagcacataagcaagtctacaaatgagtccagcgacagtaaatctagatatgccaaaggactaaaatgactgacaattagatctactcaactcaagtgtacaacataaggaaaaactttgataaccacaacttaaatttccattgttgtaccaaaagtaccaactacaaattgttgtgttactgctttaatctataacaatgcagttattctacccaccatataggttgatttcatctacagctaccacaagcaattgtcttacaaatgtaagaatgcaattttatatcccaaccgtcattgatttggtgacatttcatttggttttaggcagtagtagaaatgctccaactaaattcatcaatctaaactaatgaaactacaagttctctggatgtgctactctctaaatttagcataaatgtgtcaaatgtgaacaacttactaacagtgaccaatgtgagcaaacttaattataccttgcaaacccctagcaccgagaagcttcgtggtgaggcagccactttcttggctttctgttcagcaaccacctcccggcacagccgccgcgccatcgccctcgccatcaccagctgagctctctctgctcgcaatgctgcgatttccctccgcattgccgccctgtccgcctccagagcctccaccctggcgtacaatccccctgcagctgcattgccctcccccatgaactccccaacaaccaccgccccggataccttcgtcgtcgagctcgcgcacctcacatccaccgtgtactcgaactccttctccacaggggtgaattgctcttcctcatcatcgtcgaccatggctttcacctgcatgccaccgattgagtcgccgccgctgcttccatctgtctgtagcgcggccgtgtcgatctgttctacctcttcgccatcttcctcgtcgtgctgctcctcctcgccgtcgtcggagaaggaatcagggtcgatcccgtgggactggaggcgggagtggtaggaggcggcgaggtcggagagcgaggcgagctcttcctgtacctcacgctcgcgatcctcgcggccctcggcgtaccgccggaactggcgggcctccatctgcgcggccgccttctcccgctgcagccgctcgatcatgagcatggcctcgctggtcgccgtctccgccgacgcccgctccgcatccaactcggcctgcagctcccgcgccgcctcctccgcggcctccttctcgccccgcagccgcgccgccgcctcctccagctcctccagccgccggatcagctccggcgcctcccctccccacgccttcggcgacagctccggcgatcgcgcgggaggccgccgcttcaccgaccgccgggacgacggcgatgggtcgccgattggatccatggaggcatctatatatccagcgaggttcgatcccccaatccccaaccccaccctcaccgccgccgccgccaccgccgctgccgccggcgaacgaagcaaacgaagcgaagcgaagcggccgctgctgctcggaaggggaaaggcagtggcgtctggttggaagcgagtcgagccaggttggaatttgacgcgaaccggatcaaactaaattttaataaactaatcaaataacaattgaatttgtgtcgtactcgattaatttggcattagattggtgagctttccacgtcgtggttggataaacaaactgtttatgtatgtgtgtgtccttggaagcgaaaggctcggtgagattgaaacagcggctgttacgatccgttttgattaagcttggtgggcccgggattagggggggcgcaaaaggtgtagtaatactagttgggttgtgtgcgtgggtgggggttatgattctacgtgcgcggccactacccgtggaaatcgtggaagggaattttttgcggcgaaaaggtgggggaattagagcgaatttacctatgccgtgacagataacgataaaaagacacacgatttttcagtggaactgtggaagggagtttttctctcttttttttttttttttgaaaaccggaagggagtttttctgaccctacagagaccaaacagatcgctcgtgctcggtgctcccttcgcgttgacacggaaggaaacgacgcgacggctcgtttgtaccgagaaagctaatgaaagcccacggttgctgtttctttttttggcccacggttgcttctattttgggttaagcccatctttttttagcagcccaaatacaagaaagaggagaagccatgcacatgggcctcgcgggtcacatatacgttttcggttgtttttgaaattgtatttaaaatttattctcgaatttatatgtgcaaagtttatgcatacagggtttatacatgtacagttcatacgcacatgctatctatgactctatgtatttcaaagtttagggtctcgtttggtttgcaatatttttaaaacatagtaatagggaaaacatagaaatagaatgggaatacatgtgtaaacttaaggattaataaccatatgaaacttttctacagttgcgtactaaacgatcaaaggattaaaaacattagattggagtggagggatatgaaattttcctttgatttctttgaaacgaatgacaattaaaaaaacgtagatattagggaagtacctaatatcaaatatagaagtgaggctttgaatttagaccggctagtccaccatcttgtgaagctagccggaagacaacgggacgtttctctgaaaagaatgacaatttagtgtccattcctaaaagctgtatatgcctatacttttcctttacaattcctctaaaacgaacgaaccctatacgtataaagttttcaaatacaaatctcctgagctaaaaaacgagttgacccaaactcaaacaagcctaatgcaggcctataaatacggtactgatgcacctatgggctgagtgatgagaggaatatcacatgggtcaatataaacttgttttggatcgaggaacgtagactgcaactctgggtaggctaagagcaagtttaatagtagagcccactactatctccaattcatctatacccgatataatagctaatttatacaatagttgcttactatattattaatatatgatctcacctgttatacacacattgcgtctttaagtccgtgctgcagctggctataaatttgtagtccactgtttttctctctcatcttttatctcattaaaatatgtttatagctggctaatagtctgctattgtacccgctctaaatccacacgttatagccacacgtgggctttggctaatagtctgctattgtacctgctctgaatccacacgttataggcacacgtgggctttctcattgttttccacccgctaggctcacccggcatgaatcgtgtgtttccttatcggaattgtctatccatttgtcaggtgatttttaacaacacaaatcactaagatttttttctattattatatttgcattcaacggactaaaaaaaataacaaatacatatttacttacatattattttttatcaaaattacagtgcacttacatgccatatcaattaaatttacaaatgtaatattagttatattgaactgtaattttatattttaaagaaaataacaaatacatatttacttgcacattatttttatcaaaattacagtgcacttacatgttatataactgaatttataaatgtaattttaattatatatgactgcaattttatattttaaataaaataacaaatatatattacttacagatttttttatcaaaattatagtgcatttacatgtcatatcaactgaatttacaaatacaattttagttatatatgactgtaattttatataaaatgcaattttatattacaacgttaatagtgtcttatatatacagtcaaattctcctcatgctcaattagccaagagctgcacatggtaagcatctgatcgtgagattgaatcctaccgcccgaggtttggtggtaagctgcgttagtttttttggatgttgttagcacgaatctcactatgaattggagggttgaaacaacgagtgatttccaacgaaaaatctgtcaggcgaagatttagcaaaatcgtttccttcatgccatctgacgtgaaaatgcatagcgtttcgtacattattccatgcaaattctcattcttcttggacgttaaacagagttaaatcgaccgccgacgctgtatccgacaagatgcccttttactcctagaaatacatgcatgccagatgcttgaggaaatctatcttctatctatctattatataattaaaggaatagaaaaatgagcctccacgttcgctctcatagcctagaaattctcaaattaatcggagaaaaagaaaaaacagagtccatatagaaatacaatttagaaataaaaagaaaaagcagagtccatatagaaatacaatttagaaatagctgaaattcggaattaaaaaataaggaatattagaagaggggactagagtccatatagaaatacaatttagaaatagctgaaattcgaaattaaaaaataaggaatattagaaggggggaccagagtccatatagaaatacaattaggaaataactgaaattcggaattaaaaataaggaatattagaagtagagtatagagtctatatagaaatacaattaggaaataactgaaaattggaattaaaaataaggaatattagaggtagagtatagagtccatatagaaatacaattagaaaataactgaaattcggaattaaaaataaagaatattagaagtagagtatagagtccatatagaaatacaattaggaaaaaatagaaatttggaattaaaaataaggaatattagaagtagagtatagagtccatatagaaatacaattaagaaaaaaaatagaaattcggaattaaaaaataagaaatattagaagtagagtatagagtccatataggaatttaaaactaactaaaatttggaataaacataataaaattaaaaaaagtggagactagagtccatatagaaatacaattaggaaataactgaaattcggaactaaaaataaatattataagaggagtatagagtccatatagaaatacaattaggaaataactgaaattcgaaattaaaaattaaagaatattgaaagatgagtttagaatccacatagaaatacaattagaaataataaaaatttagaaataaaaataaataatattggaagaagaacatagagtctatatagcaatacaatttacagaaaattcggaatttaaaaaataaatattaaaagacgagtttagagtccatataggaatatatataatttacaaataaataaaatttgatattaaaaataattaataactaacacgtatataaaatgtaatatgaatattacatattagtagttttgtaaagttaatgcaaaatttaaaattatgttgtcattttaatatatttgaataatataatgagaaaacatatatgctattatatgagacaaaatataatgatgctagccgcgcaatctgcgcgggccaccatgctagttgatattatgccattataaaaaggcaaaattggttctatggcatcgaaagtactcgattttggttacatagcactaaaagtttatggttcattttaatagcactcaaaactggaaccgttactatttttagcattccgtcagcagttcgtctcctcaccccatcctacatctgtcttgttcctcctgcactctccctcctatggttgaccactcttcgattcaaggcagcaggtgagctcgaccacgacagtatagcgctgagcgagttggagccttggatggtggctggttctggcaagctagaggcggcggctcttgacttgggtcagcagacaacggatccagggtaaggaggagcaggtcggtactcaggcgagcccgcgacgagcgcgagggtggtgcttcgggggccgatggatgagctcaagagcagcatgtcggagcgagctcaagggtgccgacaataatctggaggacgttgcttcgcttcgggcattcatggatcggatgacgcatctaggggagagaccgagagcagtgcgcgcggacgaactcggaagcggcacagccgcatttgaacaagctctagcatggcggaatggcagatgagatcgatcgacgatggcgctgtccgggcaaagctagagcctagaaagtggatagatcacacctagcaagcgcggacgaatacagtggcttgcggatgatcagcttgtgaggctgggctcacgtacgtattacatgacgagcttgtggagccagcatcgatcctgtgttcgcaccatgactgaccgctctgagctcctgtacgactgctgtttggaggtgacaagcaagaggaagagggccaccattggggtttgatttagttttttgttgaagaataatactaattagaaaataaaactaacggaagtttggacggaatgctaaaaagaagcaacggatgtaacttctgatgctatcaaaatgagatgtgaactttggatgctataaaatcaaaatggacaactttcaatgctccagaaccaattttgtcttataaaaaatagtaaaagattaaagttgtgttctttccgaggggttgggaatgccctcccctccgcacggaaaatggagcaaggttggaaaccattcctctccacacggaaaatggagcgatagattaccatgtgataattaagtatcagctataaaaaattaaaaaatagattaatatgatttttttaaagtacttttctatataaattttttgtaaaacacatacaatttaacagtttgaaaaacgtgtacgtgaaaaacgaaggatatgagttgggaactcaggggaaagaagtcaaagaaccctggttcggaatcggagagatgcaggtgtagcgcatgggaacaattaaaatcgtgcagcataggtgcatacgtacgccaccctctcatccgatcggccggtcaccttttccttttccttttgggcattcatgcatgacgtctgggctgggtggacccgtttggacgcatgcatggaagcatgttggcaacgcggctgcgcgctgcgcctttcaccggaacggcactgcgagcgatagaccgggcggtcgtgtcgtgtgcctgcttctgtctcgctgcacctcgccgactctttcagctgaaacgatcttggcgaatctatttgcagagaagcgactactagtgtaatccaggaatccaaacctcaaacgcgccatatgatcattagtttaggggtgtttagatgttttagtccagtctcattggatgtttagacgctaatttggagtattaaacatagattaataattaaactaattgcatagatgagagctaatttgcgagacgaatttttaagcctaattaatccatagttagcaaaacttttactataaacttttgataattatgaattaattaggcttaaaaaattcgtctcgcaaattagttcttatttatgcaattagttttattattagtttatgttttaatactttaaattagtggaatttagtccatgtcttctaaacacctcattagctatagcgagtgcataaacattaaacatgcgcatgatgcgtgcatgcatgtattggtcattcttgtgcatcagactcttcttttcgttttggcttgctttgcacagagagagagagaggtgcgggattgtgtgcttttgtgaggtgggccgaggggaagcgagcgacggtgtcaggcggaagtgggtgttctgctcatctgctgcttttgtgcaacgtctctatacggtacggtttggtccttctcgaatgcgatcgaggttggagggagcagatatttgcatgccaaaagcaacatgggaaatggttgccttcgatcgacctccattttgcctcgtgtagactgtagacctcgcctcgtttcattttccccagggttatggttgccttcgatcgacctccattttgcctgtgtctggcacgtggcaccatactggagtacagtacatggtaaaaacaggacagggagagtaaaaaaaaaaaggggacattaatttacattgtcaaaacctagacttgagtagcaagtttgattagcttaatcactcttccgtacagacgagcatacagtcaccgagcggtaagatcaccaccccctcctggccttctcgatccttccaccggtttagggttttctcatcgcctcacctctcacttgcatcaccccccctcccctcccttcccttgcattcccataggatcacatcacccactccaccacccttccctcctccctttcaattctagcctcgtcaccaccctcccctctcgttcttgccttcctccacccctatgccatggcggcctactgcgacggaggcggtggccgcggcgaccccagcggtgggggaggcggcggcggcgttggagccccgccgtaccgtcccgctgctggctccgtgtggtcgctgccggggatgacgccgcggccgccagggcctcctccgaagtaccagcaacccgggcaccagccggccgtcgtctacagggcgccgtcggccaaggaggtcgagcagaagctgttcgtgtcggagaccgcgctagcgccacccgcagcggcggcgtccgcgtccgctggcgaggcgccggtgtcgaagaaggggctcgcccaccctacgcggcggccggggttcggaacggccgggaacgaggtgatgatccgcgcgaaccgcttcctcgtcaacgtcgccgacaacaaccactacagcagaacaagctagcagtgacgggctcaaaccctcaactgtgacggatagaccccctcgtcacagatcaatggtcactgatgacttaactcacctttgacgggtgtaggtccgtcagaggtgacagacacctttgacgggttgtgtcatgtggtcacatatgagaaaaatcacccaaagaaaaaaaaggaaaaaagagccacaaccacagctcaacacccgtcactgatgtagatttcgataaaaaaaaacaaaaaaaaagtgcttctgggtagttgccatcgcattcatcacacacaacatttcatcacacagaaaagtcttcacgaacatttcatcacacataaaacagccatggcaagcaagcaattcatcaatcacctgacgagcaacaaaaacgaagggaataaatggttgtgggttttgccgggcagggcttcttcataccacggtgggcttgaactccttggcgcgctagaccttcttgagctcggcctggaggcgaccttgctcctcctccttgcggatgacctcgtccctattactgctcctcgacgccgccctcttcgccttctgcacccggaagcagccgacgggggaatctgcagttctgcactcgtcagttggggacgcagccggcggacggaggagacgacgcccggtggccggatccgcgtcccctgaccttgtggaggacggatctagagccaggcggtcggaggtggcgcccgtcagttgggggatggaggtggcccccggcggtcggggatggaggccgcggcgccgccgttc

SEQ ID NO: 9106 - DNA, 16586 bp, Oryza sativa
aatcttgccatgttctttgcaccagagacaaaaatactactaaatctggactttgacccactaatgctgatatttttgccgatatgtgtacttcacattctttctttatgcgttcgtatagatttgcgcctagcttgtgtagacaaaggtcacctgcagcctatagtgaagaaaacaagttctaaataactaaagtgggatcatcaaatagaatagaagcaatataaaaattacctggtaaagtttttcaacatcgcacgaaagtttctgttttagaaatatagctgtaatagcatctttcaaaatagcccatgtatcctcctcaaagtttgttggcaattttggctgacctgatacatgaaaaacagatgggatataatgaacaaaacagaaaagggatgcaacaagagacgaattccggggtgggagtaaatctttagttcttgttcggcaaatgggttatgagaggtgggatcgggaaagggaaatgagtgaagggctacaatgaaatggagtggttagaatggatggctaggatgcagtgttgcattttttatgggtggatattatttcccaatctcatttgccaatcacgccaaagggttgcaaaaaatacatccagaagatcccaggggtctattatctaagaaagaacatatggccttctgaattttcttatacaggttactagttagttatggtgggtactgattagtgaatagtgactggtgcagggattattattatatatgactcagaaatgaatagatattaaaggttagagccactgcaacatccattgcacagaaacggattttcagctttctcctgaagactagagaaggtcacatactggagatgcgaagcaaagcttccaataaataccgacagttacacccaataaagagacaaaagagtgtcaacttttaagcaatctagctagaagccagctcatatggtgcaatacgaccaaatggggagcaggaagtcagaagaaccatacaactatgcccaagctcacttgtcaactgcattaaaaaaggcagaaatccttgatgcatattcacgcccaacaaagcaagccaagataaacaagcaattacaaggaattgaacatacatatatatctcaagagaaactagacggattgttgctgacgaaatcattagttaccctagcaattatcaatttcccccaaaatagtccaagtgtctagccaaattcctctttacaaatagacacgccaattagtaaatagaaaacagaagtgtgtgacgaagcgatccatttgacgaaagggctaacgaacaccacctcaatccctccctattattggaatttaagttaacgacgcaagcgggcaagtgaacacactgagaggaacaatagaattcccctcaatttacccccgaaacccctcgatgatgtattctcacatggaaaacgtgcaattacagtgaaagagagggacctattttgattcggaggggcttgcgggcggcggatggctgggggagtgtggccttcttccggaagaggttggcggcgacccccgccggggccgatgcgctcggagcggcgagctcctcctggtcggcgagcaccatctccgcatcctcctcgccgttggtgcgcccaccggtccgggcggcggcggccgtgggatcgacgtggagcccgttcttctcggtgaccccgggggcggcggcggaggaggaggaggaggaggagccggggaacttggccttcttcatgtgcggctgcgcgggggaggtcggggaggaggcggcggcggaggaggaggagaagtggccggggcgcttgggggcggtggcgtgggggtgagacatgaatcagatgccgaagcgcatggcgcggccgcaccggcggcggcggcgaggcccggggtaggatgggtggtaggtggcggcgcgccggggttttgggggtgaggccgccgcacgccggcgaggaggaggtgggggagtggagactagagagagagagatcgggttgggggaggaagggtttccccttttcttttcttttttttcttttttttcctttttctttttcttttttttattttttattaggtgggatttgcgaggccgtagcggcccaaattaagagtgagaatgtgggcctggagttccacgcggcccagtttccttttgttctcattagcccaattctgttgccgccgccttgccctcgccgcctctgccttctgtcgagaactcgagatcgagaattcgagatatccacgcgcagtcagatatggagaactataatcttcatccctttgacgggatcttctttcgtttgttcaaaaaattcatccaaacggttataaaaaaattagcaacacttgtactacatgcctactgtacaacctcacaaaatctcacgtacagactcaactcacgcatcgaaatgttaaaaaaaaaactcaactcacgcatcaaaatgttaaaaaaaaaagacaaattcaggtatgactaatagctattgtttacatctgatcgaatttaaacttaatttttatacccatagacaccgttatgtatgttgttaattccttttagaattttttgtaactatctacattaaatttggaagagagaagagaaagatataaattaagttgtgttcagggattagaatccattcacacgcaaataccctacctgtcttcgtcgtctttctgtctgattcgccggattcgcgatcattgcctcagcctttggtacagggaaggaatgcacccacagaagttacaaaaaggttcaggcagaagaataatacaaaatgaaacccgtccaatttaagcgcacaaaaaaaaaacaattgcattgcatcccatagtcttcacccgtttcctcaccatttctcgctcagcaggcacactgaataagcttggccagaagcgcaaaatatgacaacagatttttcgcgatcaaaattcattgctaaaaaccgtttagcaacacagctgatagatatacccatcagtcacaccctcaagaaaagtgaagcattacaaacatggaagaattgagtggtgaaagcgaaacgtgctcaggttcagtgacaattaaggttcggttgccaatccaacatcgccgtttttttggcgctttgttgaaggttcatcctcttcattcgttgcatctcctccggtttctgtcgttggattatttggctcggccaccttttcatcttcggtgctggcagcaccgttgataacacggttgacaacgtctggacctaacagagaagcatgtttacttgtaatcttccgaccagctctgattttgggaccccaatgacgttctgggttcggaaggaaccgcttgaccttctttgcttgagccctgctgagggcagcagccgctctagagaaatttgcctatgaaaacacaaaggaagttagaatgccatctaactgaaaggcataaaaggactgctgcacgttcaagaaatgcatacttcaagcttgggtgattttgaaaggatcgctgtccctacagagtcatgtggttgttcctttacaggatgattcttcacctgtatgcgaatgtcacaatattagtcagaatactaaaaaaaaacagcatttctagtaaactacccacaatttatactagcaaacacaatatgttaggaaagttatggcaaaaggaataaatgaatgtacccagcagcgcatgatgtcccaaataacatcccaaggggcatcagtttttagtccaagtggattcacatgtgtgctagaaatccgataacccgcatttaggactgcagatcggaacaatactgcagatggagatgtgcatttaacattagcacatatgttgtggagactgaagaacaatgggatgtcatgtaactcctgcatcacaataataacaaaatgaagtttaaagaaaattttaaagagttcgtaaactataaataatttctcaagagtaaatgagtgagccatgacaaacaaatgcagaactagatggccaactaatttattacttgtacatggtttaactaaattactgcacatttgggcaataattttcctgttgaagtgctttacatatctatgttctagtgagaaatggattaccaaaaagtcgtattcctttctgccattatttatttccatcagttgcatgccatgattaacaggtccacatatcgaggttgtattgataaaatggattagcaaaagtcgtattcctagccaccattatttattctcttcagttgcatgcaaatcgtgctttaggtcaatattctaaaaagaaaattatttaatgtgatgttaagaataggcaacagtttcacttcatagcaaatgcaccaaaacaggccattttaacttcatcacaaatgcaccaacaatgacaacttgataaaacacagataacagtcatagcaatacctctgatatggtagtcagaactgaagttatcttatcatatgcaggatatctatccttcattgacttaacttctgtcaaagtagacactacccactcttggtcatgtataggagcagaccatattggccctcctatagtaaatttcttcccacaggcactgcactcttgaggaacaacaggcccaatggcaggcgcattcttcacactgttgttcttcagttcggagaggacgcacaaggaaaagggaaagcttcagactcagcacagatagaattgaggttgtgtgtgtttgggggcttgggggggggggggcaagcataccttagttatggtcctaccaagacactgaagatgaaatgaatcgcaaccaacacattgatatacataagaaagcttttgaggagtcttctttacttcgtttgcagaactgcataagatttcattgtgtcaaatttagaaagaatatttcaaccaagtactgcacaaaagaacatagtcctgttgcataaaggaaaagatgaggggaaaaaggaactcacgtaaatactcggacaaaaacacggatgtagaaatccatagacacagagagaacaggcacaatatatcgtttgtatcgatttgcatgactctggtattgagaaatggaaaagataacaagaatcaagatacatgaaggatgaagcaatggaacttcagagtttatgggtcatttagcaaagcaaataattcaaacttaacacagttctcctgcgttttcgagaaaacttctaaaaacagattcttaaataggtattgaaatttgcacatcctttaataggaatatacttcatcttatgcagttttttaaaccaattatccagttatatattgatccaaactaataagttaactgagtgatataggtacctcaatactggcaaggaggattcgcaaagccatttcatggttatacttccctttggttggataggaaccatacctacaagaccgacttgatggttagaacaaaaaactagatttagatttttgcttcaaaccagtagtaatgtccatacttggagtggcaaacttcaccatttggcccacatagaaccgccatatcagtggcagtgcacattaatagcccaccatcagcaacagcctgtacagccgaatcaaggaaaatagaaggtgctccataggggtcaatatcaacctgaaaatgaggcaggtgtaagttgacatagaaagatacaaatggagtaactgtagtattcatcactttctaatgattaaaattcatttctttcaacttaataacatacaattgactgtttggcacaatcaacagtttgtcaataggggaaacaaatcgattaaaagggtaaagcatgaaaatctaccatttttatatagtaaaatgttgctaccaaaaacaatgctataaagatatcctcgtaactaccagaagagaaaggcttaccacatcaaactcttttggatgtgtgagcatataaactcgagcatcagtcaaatgaggctcgatcttactcatagcagaagcaccattaaactttatattccgcttgcaagcttcaatacaagctgaaaaggaagaacccacacagtataatgaatacaagcagagaagcatcattatttagaaaggaaaccagttcagaaaattgggccattacctttatcaatgtccagagcgaccaccttttctaacacgtctatttcacgagcataacggatagatctcaacccagaagcagccaaagcctgcatttagttttgttagccggtaaaaactgaaaaactattacatatcaggtcaggcaacattagtatggaaccgtaaaactgatgtaaacataacacagtaatgatttttttattgtcaaaactgcataacgtattatgacttgcagcacatagaaccaaatattatggtcctcaggttgcaaaatatcccagccctatttaaaattcgaacaatataacattcagagtacatatttaactaaaagtccaaactttcatgtcagagtgttttatgtatttttttaaatattgaattcttgattaagatgattaatttaactcttaattaatttgctaaaattaactgagatttgaacgaagggtggggctctatgaaacccgtagaccataaacctgggattatgtgccacaactcataatatccttgtttttctggaatgtcaaccattaaacctgcatttttttagatttactctatactattcatactatatgtctcacctcaagaacaactggtgccttaagctctctggctactttccgcgaaggtgtctttgttgcttctgttgacagatcttctgtttcatccgcaactttatttgtttccttttcagcatcaacatccatttcatcatgctgtcctgttgacccattctctccatttggaccagatgatttactctggctcactttgttatgcgccttgtccctcttatccatcattgccttatgttcttcctcacgcttggcaatgaaagtccttaaaagagcaactgacatatctctattgtggacctaatcaagcaataaaattgaattacagaaaagcacagtagctgataggagattagacataattttaggccaaatataattactctgcaacttttaaaagcgatagatacaggaaatattaactatgaataaactcatagtaatttgccgatgatatcacattcccataaccaccctttactcaattcctccatagcaaaagttcaggctgttagtgacttgaaaaagttatggctagagatactaattgttgagaatgcagcataaacaagcccgagtggctgttttgaagcttcacatatattctcctagcaactgcaagtctacaaccttaaactgattataacgtgtcgtgatgcgctaacacaaatgaccaacacaatgcaaacaagtcgtaaagaaaagcaaagcaactagtactctagtggctacaccagagaccactcacttgaaacgacccaatcacatacaaatcaaatagccaaaacccaaacttatagtcctacctatgcacgattggtgaagctcgcagctcacaccattcgatcaattcgaaacaaaccaaccactaatgatgcacgtattctaagaagatagaggagccgacaaatccatcatacagcatcaaataacccccaaaaaaatcgcatacagaacatatacacaacaatacctgcacgggattgtagaacacttcatttgctgctattttcttgttgatgatgatctccgcctcgccttccctcacaatctcatagtcctttagcttgttctccacatcctccatctctccgaatccaatccaatccaacaaaaacctcccgattcaagcgacctaacgagagacgcagaccgtaaagcataaggcgtgggcagagatagatgaggaaggaggagcgtgagaacggatgctcaccaccagatagacctctgatgcagcgggaggacgccggcgaagataggcggtgctcggcgcagaaggcggggcgagctcgcgaagaagagacggggaggggagtctatgccgaggcgacggcggcgtcgaactagggtatagggtagagaggaaggaaggagacaggatgggcccaattatgatgtgccgtgatcactatgggctttttgtatgaattaagttcactttaggtcccttcgtttatcgcctagtctaaaattcatcccacatgtcaatggtcagcactttcttcctcctctcttgccacctatcttcctctctctttccatcttcaggacgccgcctagcaagtggcgtggagagcgcgtggtggacgacgtggagaggggctgcgagagcgccacccctgctccaccttcctttctggcttgcacacgactggtgttcgactggtttgctatgataggctctcctagcttgcacttcgccccaatagcacggacatgttgccaaatgctataatcagcataaccagcaccccacacatacatcacacaatcaaagacgcgtactttttgggaataaatcagaaggatcactcggatcacaacgtttcaactagtagtaaacaagaggaggaggagagatataaaaggcacacctttaggacggaggttggccttattccctcgggacttgaacacggggcgatgattttgggaagcaagtctccgtgagcctgctaaagatggctagtccccagggccgctgctcgcgaggtggcggcggtggcggtggagaatgggcgaagcccgatcaaatctattacttgataaatagctatgcaaggacaaagagagagaggagaagcatgacgtgtggcgcctcggaggagaaccccccaccgtcaccgaagtcatcgaggatagtggcaatataatacggctcgtcggagagcttcgaggaacaccatgggggaaaagatcctacaaggtttgggtggtctagggtttttttggaagagtgagaagaaaaatgagctaaagtgggggcagcctgcgcccctatcctggcaatcgccaccaccaccaccgccgtatctactagcctgcgcggtcacctcgctctagctgttcctctccgctcctcctacccctcggacggatgccttggggctcgggcttagggctgtcaacgagccgagctcgagcgagctcgtctgcccaagctcgagctcgaacgagctcgagccgagcttgtctaaaagctcaaaggtagaataggctcagctcgagctcggctcgagctcggctcgagctcgtgtacctgctggaactggtcgccgtggacctggagctgtgccttcagtgagtctatctcactgcataaaccctaaaccctacaacttttagacctattctacctttgagctcgttctacctattctaccataacctagagctcggctcgagccgagcctattctacctttgagcttttagacaagctcggctcgagctcggctaccgagctcggtcataagtagtataatatatattttaatgataattttttgataagtataattattttctagttaatcacactaataaaagagtagaaaatgattaaaataaatatattatgctaacacatgctaatttattgtgtaaatagatactaatatatatatatatttacctattagtttattatatcaataaggtgaacatgcaatatgaactataaatagtcaagctcggccaggctcggcaaaagctcgagctcggctcggtaaagctcgcgagcttttgctcaggctcgggttcggctcgtttgaagctcgagccgagctcgaatcgagcctaggacgagccaagctcgagctgctcgcgagcctcgagcttttttgacagccctcccgggctctcctcgagcgggggtcgctaccagcaccgttgttgagaggggagaaggacgaggaagagagggaagaggtggatgctgatacgtggggctcacaggggtcccacgttgacttagcatagctaattggagtcaaagcgccaagtaggacgaaatcaagaactatattgccttgggacgaaagttgatacggatttgcgagttcgggacggtctatacatgctactgtggtttaagacgaattttagtctgggcgacaaattaggggaccaaaagtgaacttatttctctttagccgtcagaattgactacggcccaatagacccaatagcccaacaggaaacacattctgaacagcccgttaacccctaacccttccacgctgtcttctccactcccaccgccggcctcccaacccgccgccggcgacgattccggcgagatacctggtcggcggacaccggctcccgcgggtacgagccttctctagacgggctgcgtctctgtccatctcttcttcttctccaacatgaggcccctcgcgatacggcggcgggaggcgcggctcctcccacccctcgccgtcctcgtccggtccatggcgtacgtggacgtgaagatgcgatggaagaaggacgcctccttcgacgccgtccccgtgctgtcccaggcgcgggacctccgcccgctcgtgtccctcgccggcctcctctcgccgtcgccgacccccgtctccgcggtctccaagcttcgcatcccgctcgaggtccccgaccgccgcgtcatctccttcctgcggcggttccccgccgccttcgtggagtccgtcgggccggagcacaaccacccctggttccgcctctcgggctccgccgccggcctcctgcaggaggagcgggaggtcttcgccgcgcggcgcgcggacatcacctcccgcctcggccgcctcctcctcatggccccgcgccgccgcctcccgctccgcgccgcgcagggcatgctctggcacctcggcctcccggaggactacttcagatgccgggactatgacatcgcgcaagacggattccggattctcaccattggagacagtgtttgccgtgaggaggaggaggatgatgggagggagcttgtgctcattgataatggggaacaccaagaaatgccaaaatcagtgctccaaatggatgccataaggagatttgggtccatggagacggtgccgatccccctcttccagtcaaaggggctccggctgaagcagaagatcgaggcatggctggaggggtttcagaagctgccttatgtctctccctatgaggatttcagcggcatttatcgcgacagcgatgtttcggagaagcgggtggtcggggtgcttcatgagcttcttagtctgttcgtgacatgctctgccgagaggaggcggttactttgcctcaggcagcacctggggctgccacagaagtttcaccgtgtgtttgagcggcatccgcatgttttctacttgttgttgaaggagaaaacatgctttgttgtcctcaaagaggcatacctggctcggggagacactgcaattgaagaacatcccatgctggtggtgcggaggaagtatgcagggttgatggaggagtcgcgggagatcataaggtgccggcggagtgggaaaccttttccgtcgaagcataaagatcatgagcagattgaggattctgagggtgcaaattctgctccaattttgtcatagaaagctagaactttgcctggtcagaaaaaatgagggcatatgcagtatgattttcgtgataataccaagggggattctactcttggaagtatatggctgcttgttaggaatatttgtgtagaaagacaggagggtgtacaaacaggttggtgactgatgaaattaaattgcattatcattttatctgatctctgcaagtcattttggtttgtgcacagtagtacgcactggcggcactgcaaagccacatttacatcaagcctttgtaaagtccaactatatcatttagccaccacttactcacaatcttttcatcaaatcattgcaaatctcaatcacctttcttaaaagggcatagattgctgaatttgattttgtccatactttttacatataaaattcaccaagtatgctgcaacttgttgctgatttgaattttaattgtcaatggctcctgtatttatgtccatgcttatgcctcatggttggtattgcacttttacagttgtcgtaactcagtatctccctttttatggcatggagataactggatgcactacatttccttaggctgaggtcttcacttcttggctggcaaatgttttatggtgtttgtttggttaatgtggtagagttacaaaacagataacatgatttccattgctggaaactttttgtgtaacattatgcgtgcaattgtcagtttccagaatgagaatcaagctttcgtttgcatgcaccagtggattatttaacttaaatttctctgttgaagtacttgtcctgttttaacatctacacaatcggatgaacattagttgtttatattgcgccttaactaatttagataatcctagcttttttgtttgtttgtttttgttttttttccttggcagggagatcatagtttgttttggtgctgtctgtcttggtagtaagcagtatgacaatcgatcaattgcgagaaattagatagttgtgattggcagatgccatagtcagggcattagctctttgtgctattctgtttgttgtgattgctgaattagatcaagaccacattcagttatgtcaaccagggaagagtgttcgttgttgtcaatgtttctgtaacttgattttcttgtataaattttctccaactactgattagcactctctccactcgcttgcaaaaggtacagtgtgagattttctgatatcacatcttctccttcacattttctaaatttaaagctaacaataatttcttcatttcttgcttttgcagagattagtatatcactattcccaaactggtgtctactctttaccgtctttcctggagaataattgctgcaagctttggaatgtgtagtttttttttcatcgagtaattcatccacattttcaaaagcgcggtgcttctcttctttgaactggattatcgagttagcttgtgaacttgtcagaatcttgtatacgttccaatcatgggacacagatctatgtgaaatcgtaaattctgaatgtacacatttccaagctatctcgacattttcactttgaaatcttaaaccaaatcatttgaccaacttcacaaaattctacagaaaagataggagaatttgcacgccttcatagatgggccgatagcccatctgtattgcagcccactacaccggaaaaaagaaagaaaagaaaaaaaaaagaatggaaaggcaacaccgcctatccctccatttcccaaggcggcaacgcgcgtcgcacgccacgcggcaccatttcgcttcgccttccccggcaaaatctccccaaaaaaattcgaaaccgcgccgacgcctccgcttcacgaaaccccaaccggcgacgcggcgcgctcgctccgacgaccatgtccttccccgacgaggaggaggacgaggccttcctcctcgccgtagcggccacggaggaagcggcgctggcctcctccgactcctccaagcgccgccgcctctccatgacctcgtcgacctcctcgtcaccgacttcggccactcctccccccgccgccgtccccgaggggccctacctggccgcgctcaagggaagccacagctccgcctggaagcagcagcaggagacgctgagccaggcgcgcaagcgtcccggtgggtcccaaaccctagccaccccaggtagcggcagcggcagcggcggcgcgcaggtcgcgaggggcggcgcgtgcttcaagtgcggggactcttgccactgggcaagagaatgcccgcaatccgtgccagctactggcggcggaggaggaggcggggcctttggtggaagcggaggagggggtggtgggtatggggacgcgggtggggcggtggaggagaaggcttgcccctgcggcgccgggagttgcctagtgctcacatccaacacgcccaggaatccgggccgcaagttctacaggtgccccatgcgggtgagcattacgaatcccatcaccctgtactgtaattgggtagtatcgcttcaaatctatgtggtctgataacgatggttcgcaacacattggatcccacttaataaaaacatagagcctagacacacttgcaattatgtagaggggatatgagacctctagggggtttagtttttcatgatgttgtgccaaattgtcaaagtgataaactgattataccgttgccgttagtgaggcttgctggcttattggtcggtgttccccactctagtgatctttatttatcgtggcacatctgtatatgattgaaatcatactttaaaatatcttagcacacctcagacttctaatcagaatggtgatacatatttgcgatatgaaaccataaacatgataactattaaaaaaaccataaacatggtatgtgtctctgccttagtataatttcccattctgttgtcttaaggccagttcagcgtggtactgttgttttgtggagtgtaatctaattagagagaccggtcaaccaattgtactaggactagacaaatttcctgtgcaactgagtggagtttgattgtaatttattgaaagtagaattgtgtttgctatagaacacctgtttatttattctgaaaatacaattgtatatattatacagttaacatctgtagcagtgatctaatatatcatgtcaatctacaccattaatacagacccaccaagattagtagcataggtttttcttattttctatgattagcgtgtaaattctagccgctgagaatgaacgttgtggcttcttttgagttagttttaatagtataataactacctgggtcttatacagccagcttatatccatttactttatgttatatctattacgaattatagtcatacctagactgaatttgacatggactcttattcttagatctgaaaattcaattattttgaaattttatttttggcacgattcattttttttttcaacctaaactgttataatttggactaaccacaaaactaatggtgtatattttattccttttctcctatcaactgataagttttagaccttgagagcaagtgtatattatttgttactatttttatgagacaagcctgttgtgctctaaacaagaggttatgaatttgattgcatatcgaaggcagtaaacaaaaatgttgatctaaagccaccaggccattctaaaatactccctccatactcgtaaaggaagtcgtttaggacaatgtttaagtcaaaccttgggaatataaatcataaataactctcaagttattgagtttgaaaaggcaaaagttatatgaatagatttgtcttgaaaaatactttcataaaagtatacatatatcacttttaaataaatatttttatagaaataagaagtcaaagttgtgttttggagaccgtgtcgctgtcctaaacgacttcctttatgagtacggagggagtattgatttggagaggctatgaagttctgtttcaccaatcactacttgaccacattattactcgatcatctgtcttgatgggggaacttctattcagttggaacatgggatgcacatcagctccacatgcattcatgcataactactttgtatccttaatacgtaatcattgtttaatatttctgatgtgtatgcatgtaccgttgcacctccaaagccttacactgcatgatcatactctggtgttcatgtggctgatgccttgtgtaacctttggtagaatatgccagccaataaaggatttatgtcgtgtcggctgatacagtgtgcttggaattacatgtggttaatctaaaccggtcattttatttcttaggccagataactagttgtctagttactttttctcctttacttttttgcttttcctattttttttgatttatttcttttatgttatttttattgccattaggacaatggaggttgcaactactttgagtggtgtgataacccatctccaggtcctgcaaatgtcagtggcaatactgtttttcagtcagatacatcagttgcgcatatgctttgcccctgtggtgctggagcttgcttaattctcaccacaaagacaggaaagaatgttggaaggcagttttatcgttgcccagctaatcaggttcattcatgaccctgtttatcctcccaccctctctcttcctctcttctttcctcacccaacaaagcagggaaagttgttttactgtacaatattatgctgatatcccctataaaatgagttctggtactgtgttgattatctacagctgtctcattcttgctaaatgagtgcgtcatttgctaggcccagtatgattatcatcaataactatagtacctacagatggaagttactttagtgctttggattgtaccatgggaattttgaactgtttatcttgtgaataggaccaagatactgctcaccttatgttagtctagaagatgtggacagtatgatggttacagttgcacagcgcattcgtgaactaagattttttggatcagtt

SEQ ID NO: 9107 - DNA, 31698 bp, Oryza sativa
cctggcggtggtgagcagcgggcgcgcgatgctggcggcgcccgaccagccgggcgccgggcgcgacgacatgatcgacatgctcaactggaggcgaggctcccacggccccaccgcctccgccgccgccaccacgccctccccggcaagcaccaccaccacgctcaccaccttcgccagcgccgacggcagcaacaacggcgaggagaacgaggagctcgacctcaacttgagcctctagctcccaccaccaccacctcctcctccgccgccgccgccgccgccgcgcaatccaagaaggcaaggtcaatcaatcgccatgttcttcttctccaagctccacctactcctcttccaattcctcctcgtgtgtgattaatccccctcttcttgctgcctgcgtacgtactccttaattaattagctcttagggacgttaattaatctcagttcttggctctcttctcctctcctctcctctcctctcatctcacttgtatgttaatgttagtactccttgtaatcgatcaatcagtcctctttttttgcatccttttttgtcttctttttcattttgccgtcgatttcttggcttctctcttcattttacctttcatgtttgcctctgctgctgtatatatctgtgactgtctctgtagtctgtacttggatggcacttgcaaccaaccgcattgcaatggcctgcagaggctcgatggtcacactgttcatctcatgctcgaatcgccattgacatgtccatctacttctacttcttctcatcgtatcaaagcgttttcttttcttttcttctctgaagccgtgagttttctctggttgcagctgcatctacgtgcctgtcaatccattcaactacgttcatatattctcctcgttgcaatttttttaatacgttttctcatactgttcatggacctggatagattaatatccgtatacatatactgtacatatttggtggtactagtgtatctatctatcgtctgctgcactaattcatcatatccaacggctgtgactgctagtactagctcttgtttgtttgttcgattctgtggctgcagaatagtagcagaaggatattagacaagaagttttcaatttttttttacatacgtcatgcaaggtgaacgtgcatactactacggtgtatggtaaagaaggtgaagtagttgctggtttttactactactgtactattttaatccttgtgtgtcccaaaactgttgctgctgtttggcgtacgtgtgcatgttgcgttttggtgacatgagatgagatgcaggtttgggagcggtgggtgttgaacagtgatgcaatcaatctcgctatgtatatactccttctcgtgctactgacatgtggggacatggcatgagtatacagtagtagtatactccatgtgtgtgaatgttcaggtcggtgtcccatcgcgtcggatcgtgtttcacagttgcgagagctttttctttatttttggctactgcaacgctttctctcttcttcctcttttctgccatgaaagcctactatacgactagtcatctcctgacttgaaaaaaaaaaccagaagaaaaggcgagagagagagagagagagagctcctgtttcgagttatggtgagaggtgacgcgactcacgcaccggacggacaaatccgcgccgtccaatagccagccagccagaccctctttgcgggccccacctgtcagcgccacggtccaatccccgtgccccggcccgagccggatcgtctgcgcgccaaagcccaaaacgacccttgggtggttcgaccggtcgggtcgggtcggcaaactcccacgtgagccgttagatcgggttgtcaggcgatcacgaccgtccatcgcgagggctctctgttctttccggcggttaacagtagccatccgggaaagctacgtcgacgtggaggaggaggaacatgtcgacacttgcatattccgagactcgtactcgcgtactagtaccgagtacagtactaatttttgttcgtacgtacacgtgggcgatacggccagctatacgtacactcgtaccgccgcaccgcgccaatacgtagacgtacggagtgccgggcccaccggtcggcgtgtgtgtgtgactgcggctgtttccggctgggggcaggaagcagcagacagcggcaaccgatctggttcctcgccgtctgcacaactggcggggacgacgacagcgtggacacgacacgcgcatgtgaccgcgccccaccctctggggcggcgggcccacctgtcagtgcctcctgctgttgcgagcgcgcgtataattaacttcggtactcctccgagccaatgctaaaaactcgtccgttaactttttacatcatgtttaaactataaacaaaattttatgaatattatttattttgttgtgatatattttactattgaagaaactagtatggcgtattttaatacacttattctatttatttaaataatataaatgatcaaagttgtttcacaagttaagatttttgtcgtgtactaaaatctggaggtagtactagtaaaattatggcgctgatgaatggtgatgactgccggagccacagctcagagctactgccaccagcagccattttcaactcagccgcagccaaagcgaacagcccgtacattaggaactttaaattaaatcataaagtttaagggcctactatttgtttgggaggaaaaccaagggactcaggggctgtttaggatccctcctatccaaacaccacctcatatttctatggattaatatctactagtgtcatttggttcataggaatgtagatataggaaaaccaaataaaaattttctttcctacaagttgtaaagagaaaacataggaaattttccattcactcaaacctattgaaaaattcctatatattgaagtgtgcatgttttcctattcctatatattaattcctccaaaacagataagtcttaaatgttggctattgctaataataatctactactccctccgtcttagaatatagtagtaatatagtaccgaatatgatgtaccctactactacggatacggatataggccagaatacgtctaatccgatactagattgctatactctgaaaattttatttttgataataatatttcaatccaacaatctatcatcttaatgactttctcggatttaatgtatgactcttcattcttccacataagattggctatacgggcatcgagaaatgtaaatattaatgaatcgcttgttcacgaggaatgactagtagcatgtttaaatggatgataagtagaattgcttatccttggtctgtgtggcaagatgaaatttaaccatgagcttttgttttcgtgtccaactttaatcgtccgtcttatataaattttttacggtttatatttttattgttattagatgataaaatatgaatattactttacacatgacttttttttaacttttaaaaaatcaagatgattaaagtttgacatgaaaactgatgaccacacttaggccccctttgaatcacaggaatgaaaaaacgggggaataggaaaaacataggattctgataggaatacaagtgtaaaacagaggattacaaaatacaggaaaaacatagaaatgaccgtttgattgagccgcatgaaaaacacaggaatttgaggagagagaaagactcaaaggattcttaacatgaggtagaacctcatgttaaatttccttcaaaatttgcatgggaagaggcattccataggaattttataggattccataggattcattcctttgattcaaagggctatataggaaaaattcctataggaattaaatcctttaaaattcctatgaatttactttgaatcaaagggggccttaaaatgggaccggagggagtaaaatgcagacgatgagactgacggtcacaggaccagccgcggcggtcccggctgcggcagccgtgttgtctctatgcgtgcgtagctgtgtgttggaacagccgccctgatgattctctgtggcgcaacatctgtgccacccaactccctcattggccgcctcagttatctcttgtcgcctagcgtcctcgggaaaggacagggatgaacagtcgatccaactaacaactgtttcaaaattatgtatgtacaaataaataaataaatttgttcttttttttaatcaaagaagcagataatttagcccactggatttggtaaaaacaaatatgggaaaataatatatgtatccgttcgtatctgagacgattgcaacagcagctctggtctgatacactgatgtgccatctgtgtgtgtgtgtgtgtttttcttggattgttgcttgactggcacggggcagctacttgctttaacttaattaagcaggaccatttctggataaactcgtaatttagcaaaccggtcttacttctttttgtgattgccgtgcttgtgtgtggtcatcaactcatcacgagtgcacaacaagttacatgagtataaatacaagttgtaacatctgtattaaaaaatgtcattattaatttattggtaggtcaacttacacgcagtgaagaaaatgagagagagagagagagagagagagagagagaggggctgcgtggtcttaaaataatttgtcagtttacggaaataaataaataaatgatgagcatgcagcgttggtcgtatgtactggttaattgcaattatacaaatggtataatcactatagcatggcataagaagaaaacaccatgcatttctctctctctaaataaagtacaaaccctctttaataattcgattgtgaaatacgatagtgaaacagtgattgtacgttagccgttgatgcacagtacccgtaatcctagtggagataatgtgatcatgtgcagagctactgttttgcatatgtatcttttaaatatttgcattatatgcatgaaattacattggtagattaatattaaaaaaatattccatatcatattgttttattaggttttagaaatacaccacaattaaaaaaaatacatggatttacattaattagtccatttgtatgctataaagaggacatacctaggtcatgtttgatagagcttaagacattcggttgtattttcttttggaatctatagctcatcaatctatattctaataataatttgtagatatagaattagaatccagaggatgaaaacttgatttttctatatttttaccatctaggcacctacttctcgaaaactccagctctccaaacacaatgaaaatgtagaggtttttcccacctaagaccttatttgattaattcccataaagctttattcgattaatcccactcacaacagaattaataaaaaattggaaggagataattctgcacctattaaggtatagaattaatctctctgatgagattaaccgaataaggctaaagaaaatggaggggattaagggaaaatagtttcacactaaaatatatgtgaaattatttccattcaaatatccctcaaacctggcgaacaaggtctaaactagatgatgaaatttcctgaatgggaagcgaagtagaggaggacatgcattatttagcaaagcgattggcatgatgccatcggttttaactatttttgtctctatatcgaagcgaattattaaagagatcagtgttgtgttctgctcgtgatcaatgaaactgtttatacacgcctgcatgtggaccgctgcttttatgtcctactcgtatcatctacttgcatggatcttattgcaaggacacataaattcgagacagaatggtttcgtttgtcattttctcccaaccacctctagatcttctccctcacactttctcccaactgcacataggtcccgatttaaatccaacatagctggaggcacaatgtttgaacaatttttccggatcgtaattaatcacgtcaatccatatactacccccacagccttaaatctggaattacaacgatttaggggcttgtttgaaacgcaagagcaacgcctcgctctcttcagcgagctaagtcgatgttaaaatttaaaacttcaatgcttagtatgtgttatagttatcattagactaatcgtggtctcctttaggataaagattgaaaaacacataatagaaaaaaaaaaggaatgtgaaaggaataaggcagggttgcgcatgaaaaaccaaggaataaaaaacagagaaatttttgtaggatatgatgtttgggtcacaagattatcttgaagacatgatttatcctccatcctattccaatgctagctagtaaaaaaaaaggatgaagtgaatgtttgaaatactttggaattcttgcgttttttattgcaatgcaagctacagtattcatccataatttcattgggcagttcctgctacgtacaatggtggacaaaccctttttagtcccggttcacaaccccctatagtctcggttatacaaccagaactacaaatccgggactaaaaatgggcatttttagtccgggttgaaataactggaactaaaaaaggatctttagtcccggttggagttactaaccgggactaaagatctagtcctggttagagttaccaaccgggactaatgttttttttctttttcttttcctgctgctcgcatgattttgagccccacaaatcattcatattatccacagatcattcgaacaccacagatcattcacaaaatccctaaatacatcaagctgcattttctatctccaaatacatcacaaatcattcacaaaatcacaaaatcatctctacaaattcattcacacatcacacatcacacagatcagaaaaagaaatcacatcgcacagatcggccatcagaaaaagaaatccacatcacacagatcggccgcacacatcgcacagatcaggaaaaaaccacatcgcagagatcgggtgccggccgtccaccgcctcgccagcctcccgcccggccgcctcgggctctgccgccgcctggggagcgtcgccgcccgccgcccgccgcctcggcggccggtgcctgcccgctgccgcctcgagctccaccgcccgccaggggagtgtcgccgcctcactggccgtctgctcggccgcccgcctcgggcctcgctggccgcttgcctcgcctgcctcgcgggccgccgcctcggccgcccgcagccggcctcgcaggccgcctgcccggccgcccgccgctccgcgccctccttaccgccgcgcgccgcccggcctcacatggtaggaggaggaggaggaggaagagaagagaagggagaggaatgggagaggagaagggatggaggaggataaggatggagaagggatggatgaggctatttaattaatgagaggggaggggaaaggaagggggagagaccgaggcggccgggcggggcagtggcgccagctcggttgattttttttttgtcctggttggtataaacaatcgggagtcctgttgtttataccaactgggactaaaaaagaattggggtctaactcggtccgataactttttgaaccggaactaaatttagtcccggttggtattaccaaccggggctaaagatcaaaaattttttaaccgggactaaaaataatctttagtcccgattcctattcgaaccgagactattgtgaattttggacgaccgagcaaaataatttctccaccagtggtagtaaattaaaggcacctgaccaatgacaaatcttaaaaggaccataaatcctaaagagaaaaaaaaaatctgtggaaacaatttgtttcaaagtaccccttaatttgcatgattttactcgaaacaatttgtgatgacacaatactttcacggattttaacatattttctcttcgaactcataagaaccacgcacatcaatatattacagagagagaaaatttcgtacaagtgcactctgctgtgacggtcacgagggttttacatggaatgaaaaggatagcaaagactggcttaagagtgaaaattttgtaagacattgcatccgcgcgttcaattccacgacaacggaaacgacgagagcgcaatccaagcatccacaacgatgtctctctcctcgcatttgtacgcgctgcatatgcaatctacacagcccatgatgatcgagagcactgcacaatcgtctgagagagagatccatcccgatcgtacgtacgattcgcacagggagattgtcgctggatcgaagggcacgcagcacgtgtagcacacagtccggtgactctctctctctctctctctgagctgttcatggactgatcgatcatcagctgcaccttctgcaagctagctgcctctctgcatatcgatatactgtagatatataagcagtgttgtgcttgttgcatctgcctggctgatagctggagtgtatctggtctcaggcccaaggcccgaacggattattatcgtggattatcaacatgatagtaatagggaaaagattaatttttgaaaaaaataaacataatgaatagtttaaaacaagctgcttaaacagtgcagcaaaagaacttttttttagaaaacatggtactagtaggattgagcaaataatatgtttcaataatccaattgataagtgaagtgagtgtagctcaacaactgattaggttccttttggtggaactagcctacccggatccaaatcctatatttgacatggtgctcgcatttacgcctaattattcttttagtggtaggtgacgtatatgttgacagcgaggcgcccgtgattattcatcggattagtagtgtggattatctattcgattataaagataaattaaacaatttaatatataaagtaaatataaatagcctaaaataagtggtccaaacaatgcaatagaagatttttttttttacaaaacatattatgttacatacgtggagcagataatctgtggcaatggtttggtgaagtaggttgtaggctatttacgtgcttctgacctacttatattgcatacccatttgttggtctgagttatttcattacaaaaatattacctccttctctaaaaaaaactttcatttaagtaatacaacgaacctgaatactgcatacgaacctagctaaaagaagtactccctccgtgccaaaaaaaaaaaagacaaaccctggtttccgtgtccaacgtttgaccgtccgtcttatttgaaaaaattatgaaaaaaaattaaaaagataagtcacgcataaagtattaatcatgttttatcatctaacaacaatagtaattataaaaaaaatcatataagatggacagtcaaatgttggcacgagaacccacggtttgtctttttctggacggagggagtagatgataaaatagccattgttgggctaacagcaacacatttgtatgtacatagtacgtttgtgctatgcagccacagagaatatgttggatggcaggttgacagtcaatgtctctaatactgtttgcaacaaagcccaacagagcactgacttttcctcacaaacaaacatgataatgtatgaaactgaacatacacatattgcaactacttaattatctatttatgtgcctgcacatatatagcaatacaacatgttgctatacatagcctggtcttttccaaaatccagggatgtactttgggcaaaaacaaaaggcctaaaaaaagcttttttttaagatgggactaaaactttaagtcgcccctatcacatcggatgtttggacactaattataaatattaaacgtaaactattaataaaacccatttataatcttggactaattcgcgagacgaatctattgagtctaattaatccataattagcctatgcgatgctatagtaaacattctctaattatcttaaaaaatttgtctcgcaaattagctttcatttatgtaattagttttataagtaatatattttaatactctaaattattagtgtctaaatatagagactaaagttaagtccctgatacaaacaccactagatagctagggtgtgttcacgttctcgattcccttctttcatgctctaccttacctacatcagtttcatgctacaccaaccagcgttgtaaattcatgaatagtcaagcaatcgatcgcctgtttccatgtgcgaacagggcgtcacatggactcgtgtgccccacggcggtcaacagcgccagcggcacagtctagtccggacgactaatggcgtttgatcaactaattattttttaatatagatgacattcggtattgaaatttgatcgaaatttatttttaattctatcatttcatgtacagccgattgaataagttgtggataaaaatgtcatatatatttctttaatgatttaaagcctaatgctgagaaataaactgcaatggatgaaaaccctaaaatcagctgtaaagttaagttttaaattttagcaaaggcttatatgacgaataatgtaaacaactgtttttttagtgtgaacaatccttggtggcagtagcttattattttaagttctcgtgctaaataaggatatcaaaataagtaagaaaaatattttatacgtacagactatctctgagagcgtgatccaattgggactataaaaaaatacagacaaaagggcaacattgcaggatagagacatgactgatatatatgaatttatatgactcaatctgctggtttgtattttcctggaatacattactatacacacatgcgtgccttgaactgttgaacatataattcctccaagttgcaaaggaacagaacattcatgtcatcctgcaagtgtgagcgtggtccaaactaataaatttattccccttcctgtcaaatgggtctcactggattttcagttagattttgttcaaccacccatcacaccaaactttgatttcgaatccgatccaatcctctctttccccctttttatgccttttttttaactgatggtgccttttctattctcttttcatctctgatggaagtgacgaagtagtagtactatgtataagtagaaaatgttgtaggttggggggtcccactaacaggctgatgaaaagaagaacatcaccaaccaaatagcaggaggtgagggtgacagtataataatctctctagcagcagctattgataagcaaaaaatatggagacaatggggcctagtaatagtgcatactgcacagtaaggctttacttcttttgaatggaggaatttccctttgaaccgttcatttcaatcacaggattgagaaaaaaagaaattgaaaacaatgattttagtaggaatgcaagtcacaaaacacacatgaatgattatttgaatagaccataaaaaacgtagagatcgaataagagaaataggctttaaggaaatttctaagaggttagagctttaactaactttcctccaaaatctatttgcatcaagtcaatccctaagaatttcacagaagttgagaagctccaatcatttatttcaaaggactaaggatttgaatgctaataaattcctccataattcccttgtttcatgggaattttgggaatcttatgaagaaaaaactcctatgtggtgatttgaatgaaagaaatagctatccaaaaatccaatgaaattcatctggattgactcaaaacataggaaattggaggaattctaacatgagcttcaacctctttaaaagaaaccgtttatgtttgtctctctcttatccaattcctacgtttttcctacactacatccaaacggtcattcatgcagttttcctataatttttcagtccataggatatatttcagatgttagggcacttcaatcatgcttttttttttctgttcctgcgtttcaaaggagcccgataatggagctgaaatgtcggagaattgaatgagatttcccactaaaattcaataaacctcttgtgttttgaaggagcccttaactatgactatgaaagcttactctctgaagtaggggctattcggtagtgcttgctgcactgagctacaccaggagagcaaagtttaactatcctggtgtcaaatgaagtaaaagtgacccctaactgttctgatgtcaaacgtagtataaaagtgtatcatatccggattccacagtctcacaaaagcggttatctcgttgggctgagaactacactctaatcgatcaatcacggatagcctagtttgctttcaggcagctggcctggcccattgctaaatatgggctaactgtagggtaaaatagaaataagtccactatatatccccaatctttttgtcaacattaaatgaaattcatgtccttcacaccgagaccacctgaatttctttggtcatttggtcaagccctaaggttgaagtggcatgcgaaatcactggaacagaaggataggccctggacgatggcgactttcaggcctgggaatgatgtggagaccatatttcgctcggcggctgttaacagtgaaatttggtaagctcggagtagtcatcggcttagagtcagcatcggcttcgaagtcctgagattagccgatgagagttgtcaagtcgtcagttgtcggattcttgctatattcggttaaggaaattgatctactaaaggaagcttatccaaaagagaccgagttcaaagagaatgtggcgtggcaagttatctattaattaggaatagtttgttagtttccttttatctttaggaaagtgtgtttagtatcctataaggactttatcttttccttttatctttaggaaagtttctttcttgtccgacaaggaattgtatcaacccgtgggtataaatatatacacctggggtctatgtaatctatcttcacgatcaatacaattcggcgcatcgccaccttttaccttttctactttattttatcgtccggcgggacttgacacttgacgcggggctgcatcggtgttcgatctctggctaaagggtaagtccaatgttccgccggcccgggcaattgtatcgtttacgtcggcgtcgttcaaggctgcatcagtacattcgacctcttggattgctctggtttggatgatatatttgctacctatttatcatgtctctgttaatctagtcttagcatatcaatttagctctatcggctgtctctcgctttagggtttctgccggtatcggctaaatcgccttgctagattagattagcctaggcatctaccaccctgaaaatttaacaagatgctgtttccggacgagctacaggacggattttgacagtgcattcatgctaatttgttggttgatttggaaggatcgtaatgcaagaatttttcaacatgtgcccaagacaccggaataacttgcggaggatattgaagaggaaattgctgtctggagggtggctgtttcgcgagtaatcgccatgactgtctgcggggtttagccctactttcttttctcgttcttggttggctggggtctttccctggcaaccacggtattgtaagtcgttgtaacattttactgtattttccccccaaatcttaatgaaattggtcggctaacttttggccgacccgttaaaacattaaatgaaatccataaacttaaagttcatctattttcactatatgtcctctcaatgcaaacttagacaactatatcagtttaaactcgatccaaagcatagtaaagtgagagagtagcactatttcgttcctgttcacatccatatctttcatgaagtaacttatatatatgttgaactccgttaattaaaaattaaaggagtatataaaccggttccgtaaatatcttaaggcgagatatacagatgccaaataggtgtacagtactcgaaattacaaagattataccagtataattaatcgttgggattaagagcatgaacgacccagttacgaggggtgcacggagtacgtgtgttgcttgcgcgcgtgtggatcgacgagattcttttgcaaaaattacctaattaattaatcggcgtgctctctggcgtcgtcgatattgtttattgtttggctagagttcgccggcggcggcggcggcgaggtcctcacaacctggggaaggggcgggcgaggcggtcggcgtcggtgtagatgtgggcgcgggtgatgtcggcgagcgaggtgcatccgctgagcgccatggtgagctcgaactcctcccgcatcatccgcagcacgttcctcaccccggcctccccctccgccgccagcgcgaacaccaccggcctcccgatctgcaaacgcaattcaatccatcaagacgacgacgacgacgatgacatgtatcacgccatagatcatcggctatcgatcgaaggacttacgaagacgccggcggcgccgagggcgagcgccttgaagacgtcggtgccgcggcggacgccgccgtcgaggtacaccgggatgcgccccgccgccgccgtgaccacctcctccagggcgctgatggtcgccgggacgtagtccagctgccgcgcgccgtggttcgacacgatgatccccgccgcgccggagtgcacggccagcctcgctgcgcacgcgcgcataaacgcatcagtttcctttgtgattttgtggatttcaaatcagtcaaatcagaagaaatgcaagaaacaggaagctatcctaccatcctccgcggtgatgacgcccttgacgaggatcggcagcgacgtgatgctctgcagccacttcacatcctgcatcatcatcaacaacacacaccgtcagaatttctcccgatcttagcatcaagaacagtaatttcgataagttaatttgctggtaagtttgttgtagcatcgatgagcattgatcattaccttccagctgagcgtgcgatcgatctgcccggcgacgtaggaggccagcccggaatcgttgctctgcaaatgccaacgaaatggttcaaattgctgcatagaacagaccattttttcttcagagaaaataactgtttttttttttggctgaattaaccgaccttgtccatctctgcgaggtccaggccttcgaaattcttcagtgtcaagtatggtggcagaacgaacctgcaacaacgcagccattgatcacatcacttaacatttacgacaactcgctgaaattcatttctagatcgtgccaaattcaggtggctagttaagaactcacctgttcttgatgtcagcttccctgcgtcccagtcgcggagtgtccacggtcagtgcgatcgccttgaacccagctctctcggctcttctgacaagctgctcaaccacattcctgtccttgtacacctgtagatgtatgcaagatcatacaagaaaatgagatacgaaaataaaatgtagccaaagtatgctacatgagcagagtgatatgatatggtttacgtatagctggaagaaacggattcctggtccagttgaggcgacctcctcaacacttgaagtagcccaagatgacagtgtctgaaacatgaaggcgataccaaattaacattggcgttcatgcaagtttgaatttctgttttggtttggtttcgttatgcatccaaggaaatgttgtttgctattgaacatgacaacatgtagatagcataccattatagttcctgctgctgaagctgccctggctgttgcatactctcctgaatacatatggtattttagttagcccaattctatgcaaagatcaatgtagatcatgtgcttgcttgttacatgctaacaacttcagtttattttcagtttttgtagtagtaatatgcttttttttaaaacaatataatatgctaatgttgatggatgaaattacttttggttttgagtttgggctaaatgtaaggctgtacaacaattaagcaacataattgaaatggcatatgtaccgtcagggtgagccatcttctgcatggcactgggagcaatcattatgggcattgatatcttgaacccaagaacagttgcggacatgtcgatctttgagacatcgatcaggatgcggggacgaaacctagccagaaaaggttacagtcagattgtgggctgaaaaattaacaaatgttcaacctaaggaatgtgattgaaaaatttaagtcatttgctaaagctttcgtaggagaaagtgataacgttagatgttgtatgatagatattctgggtctgggaataagattatgattagctgagagtttcactgattggcaattttactgaactaatgaaatgcccttaactctattttgaaaagaatacgatgtgctcatgctaaactagtctacctagtaaaaagaccgagtggtcaggattggacaactagtaatgttttgtcgatccatcctacttaactatgagctatcagattgaacttgtacatggtagactcatagggaggcatttacacagatgaaatattttgatgcacaatatggcatagggaggagtagtggtgcaattaatttgtaacatgtcaagcaatcaagtaattaagaattatggcttacaagatcctggagaatgcctccctgttctccttgagagtccactcatcctcagctccagaggcgtagtagtcgtagatcatcttcggaagcttctgcttcgcgatggcctggtactccatgacattggtgatctcccccattttctcctgccttgtgaaccctgcaccgctctacacccaaagaacagcactgtcaaaagaattgagctatagctttcctcctactaaaataacaatcatctacatgcatgatgataacttattcttttttttttctgatagaacacatgcaactatgcaagtctgctaaaagttcatagcaacaaggtaaacaaaaaaaaaaagactttccatcatcagagaaaccaagggactcctttctcttggagtgcatgcagatacccattttttttgtttctgcagaaaatatgtggtattcttttaacagaaatgataaacaaaaaaagaaatcttcatcatctgtaccaacgatcaaacgacgttggaactgaacaaatataaaaaaacctctcatcactcatacaaacaagagaactaaaaaatcaatcagaaacaaagatgacaacatgcaatagatcctaataatttggtcattttgaaactatgcgtgcaacaaattcttggccacgccagaagaactattacgactgaagaaatcacgaaagaaaagatgactcaaatcaaaccgatagaaaagcaaattctgtacactgatatgcatgtagcttatcttaccttgagagacactgggaggaaggagcaagaacaggaggagggagtggtcagtggtgttggtgcaggtaatataggtgagggagagagatctttgagtttctgcacatgaagacaaagatagggggggagacgtggagatttgttaggggagaagcgagagaaagggaagggaggaggttatggatgagcttttggaggttgagatgaaggatggctcctcctacactacttcctcatccacttgacatcaccactcccctcctcctgccatccaacatttctttctccttttctttatttaattttcaggagatgaacacacaaagaagtcattttttttctccagctgaattggagtggattatctccttccctagtcagggaagaaaaatgtatatataaattgttctccccttgtttagcaggataggggtgagtagaagccagaagagaacagtaggccagcaggggggtttctgttattaggtggggataagatggcaattttggtaattttgttggcatagcataggctgtactgcagatatgatgacttttaaagaccagacagatcatcgtccaacagagatggggattcagacagttatacaagattatcataacaagaccatgccatatataaatcgacacggcaaaaatacacaagagctctgagatatttaggctttgcaaccattttcaaagggcaaacacaacgcaaaagaaatgcacctgggacgaaccacgctcaataaggagagacaggtaaatctgatagatgaagtcaccggaaaatgtgtttattcagtaaggttttgaccaagcctcccaactttagctcacttcataccaggcaccacacaggctttacaattgccaagagtaccttctacaagaactgaaacaattgcaagggggtgcatgcagcgaactcttgatcggttcgcctgttgcaaaacaattagttaacccaacttggtaccaccattgcaaagcccgtgttagaactttcagttaaaaaaaaagaaagtctctttacttttcagtttaaaggaatacattatatttctgtctaccttttttaagacggtgatatttactacacagatattgctatattactagcactctggcatttccagggaggtgctttaacagcttgtttttacagagctacagatgttactagggaagagcattacatacaaaaagcattagtgattacttcttttttttctctctcattcaaatgcaaatagcatatgaacagatgtcaacagattatttctcccccataaacaaactcatcatgattctctcacaaaacactcactctgcacaaacattgccttacttcccactaccatcatcagtccagacactgtcccaggagttgttagcttttggtgcctcagcaaaatgatgccctggaccttcaaacgaagaagtttctgcgccctgaaccccacccttctttgcttttgttttgatcccaagcaagcgtagaacgaacctcgcaagttcaccataaagcattccagtccgatcacatagctacgatgaagacaacggtggatcaggaaggttataagtataaacttggatcaaattcaaatcaaattcagaagatacctgcaaaagagctgagataaacatgtggaatgcctgtgtgttctggctaaaaaggaaagcaactcgcccacaaaaattcacaacaccatgcatctgcaatcaatgagaaaaggttaggaaactgtgttctccactcccagcataccaatcacagggtaaagttcactttttactacaaccgatctttttttacttgccatttggaatgtcaacaagatcaacacatttgaccactgttttttttatatgctcgtcaacattaataaaaatataatgatataaagtgttgccaatgtttttgaaatggctacggcattctaaaatgacatttttttgagaacagagttagtaatgtatatgaggcaataaattaactacaagttagacaagaattgctacatggactttgaattccatctactaggcttcctacaatagaaataaaaaaaaatcatgaacttcatatgtaacaataacatggtgatagcaaatacatgttatggctgcaaattaagttccacagaaatttaaacgtggcaatcatgctctagtttgttaaagatcaattaaaaacaataatcggtatcaaatccaggagtgacttggtagaaaatgtgtattaccactcgcaggaaggacatccaaaaaccagggggtggtgctggtggcccaaatgaatttggaccttggttgtaagcacccatgcccataccatagccaccatagggacctcccatcccgctattatacatggacccaccgtacattccagaacttccatacatacccccataacctcctccataacttgaatacatgttatttccgtaaagtccgccgctactataaggtccaccaaacccaccaagcgaactatacatactggagccataacctgcattttgatcgagaggttaagattctgagccactaagtgtatctgattatgcgattacagaattaatgattacctccataagaatttccgtatccttgctgctgccaaggccgtgggggcacaggcctagagatggtgctgttcacattggaagcaacattgctctctgcggcagaaacaacttccccaggttttgctgtgccagaagcttcgacgatatcactagtgctacccccggatgggggcttgaaaggcgctggaccagatgaagttccagcacgttcccatggtttgggtggtggattacttcctgcaaacacattccctagtgaattaaggaattggcccaaggcctaccaggagaacaattactcttcttgtaaatctcaaaaggcaaaacagatggacacttatctatactaaaacactgatatttcaacttgacgtaaaatataccataagtttccctacaagaagtgtgcactcagacaaaacaacgtctcggaagcattaacagagaaatgatagtggataacttgcaagactaggggagaaactcataaagttatcttgcaaagataaatctactgcaagaacctggagtcacggatgctattacaatgttgattgtaagcaattgggaccagcaggcaggcaggaaataattcaatcccgataaaaactttgcaacaaatacttctagtaggatataattcgtaatcatggaagcgtacattgcaattactaagtccataactagtacacacaagaatatcacaaatgcagaatttgtgagctctgaatgattaagatcaacaaatccgattataggtcaactgaacaaatttaaacatagactgcatatttccgtatgagcataaacataataagccttcattccgcaccgtccgaatttctgataacactgcatttgcattccttacaactgagccacgatagttaggtttctcacaaattactccatttttaaaaaattagttcataaataaatccgactggaatcagttaacacctggatcatgggcccaattggatttgttccccgtcctacaaatacctattcattaccttataccctcccctgcacccaattgagtgcccaaccaatcatgcaaatgctgtcattaggatccccaaaattactgaggtgatctagcatgtagtcattgtgagaaaggaagcagtttcgttggcactacctcagcatatgctcacatctgcatgaaatcttggaataatttagaaattgaacgcatattgctcacaaacacatccaatagccaattctacggttcacaattgattagtccctaaaggacaattctacgtttcatgatcgtttagctgattagctcctagcctcctaccctaaccacagtcacaaaatccccaacataaatcaggaactcgaggaaccaaaatccccctccagaaacgaaccgagcagacgtaacccctcatgaatcgatcgatccctccctccttccttcccttctcccccggatcgagtcagcctaaccacccacccaaccggttccagaggggagaaacagcgcgaagagtcgcagaagcaagcgacgaacctgccatgggcgcggggttgcggaatccctcctccccacccccacccccttcccgccgccccctcagccgcgcgtcgccggcggcaaaatccggcgccgcttctcgatcgcgtcgccggaggaggagaggagacgaagccgcttgctattattgcaggtggcgctacacgcgtgggccttttcttcttctttttttttcttttttttttccgtttcctagttgggctcgagtcaggtcttggcgcgttgggggcggtcaagcgttgaccgttgactagccttcctgtgggtcattaatcttgtgttaatgggctgtgtatttggtccaaggccttcggtttaacgaggaataagaagaggcccataggagtactaaggtgggcttggggagaaaaaaccatgaaatttgtcaaccgcctaaatatttttttaaaaaaaataaatcagccatctaaaattacgatactatgtgatgaaccaaaatctaacttttttattttattgacttatcttttgtatctgaatgtttccttctttattagttttattgaattttaaagttatatgtctgggctataattctcaaaaaaaaaaggggcgaaaaagaggggacatttttatatagtaaatcaagcgatataacaagagtgattcaatcttttccccaaggatccccgcaacaaaaggacaacctttatccgaaggataagatagtcactagttcacctaacgaatagggaggtccaaaaggctaaaatgagatatactctactcattttctcattaaaagatatggaagtttaaccaggaaaaggggctggccatatgggtacccatattcatatccgttaggtgaagcctttttttttttccatactcatattcagttcatttcgtttaataaccatagtggtttatggtttaacaagcatccacccctagatttaactttatgatggaatgttgctcactatctagcattactcaataataatgatttacaaagagaaagaaatatttctaacatgcaccgtcatgtcattccagtggtggagtcaccgccgcccgtcaagcccgaatgactaaaagcgtttttttatgatcgactaattttaatatctattacatcggtggagcctggtcgatcgtccgatatgtttgggaggtggcttcgtcactatgtcattcatatccagttttctttcttagggtgcactcgttcccgcgggcaaccgctcccgccacctcgtttttcgcgcgcacgcttcctaaactgttaaacggtgtgtgtgtttttttaaaaaaagtttatatataaaagttgcttaaaaaattcatattgatctatttttgcaaaaaaaaatatttaatacttaattaatcatgtactaatggtcggcttcgttttccgtaccggaggaattatttcccgtctctcactctcgatcggggccttagcctatttcagtctatagcactgatagcgcgcgatagcgcattctggtagtatcgtaattcgtaagtgttttcttttgttgttaagttaccgtgtgattttgtaccagcctacatgtactaacatacacgaaaacactgagggcgatatcattaaagataagaacaagagaaggaggtgattgggttagcgtagcctatggagtgcattattttttttttacgccagccagtcactgccacggaatcgcacgaaaacggtcacgtgtgaaactgatcaccaccaactactgacctactgttgcgttgtgaaggtagttcgagacgtatccatgtgatgcacgtcgattcctgcaaaatccagtatatctagatccgagaaacaggcaaaaaaaaattgtatggtatacggagcaacatactccatacaaaaattgcacaattaattggcttaattacatcgcgatctttcttgcttcttcggcgtacaggagcggcagcgcgggcggccgccgccgccgcggcgtcatcccgtacgtatgtcgcacacttccgccccgcgaaatccccaatccgcgtgccgccgtgcgccggttgttattagcatcgcatccacgacgcccccaccacccgccgtcccgtccacctccctcgcagtcgcaggcccgcacgatgttgagagttagtacactttgttttagtgcattcgacttactgtctccctgcattttataacaagtttgttcttgccactatcgtttatctttacctatttatcgtttatctttacctattataaaaattgaagatgtttttgccacaaattttcgtacgtctttctaatccgattctgtttctgttttgcggcttcgtttattctgtttagccgtttcgtttattagcgagaagaaaaaaagggattagaccggtattgcaggtgagacggacagcgaaggggctgacgtcctcaatgcctacctaggcctcagcccaagtaacgtatcagcccataagagcacccgcaatggtaaagtaaggtgctatctataaaacatgtacatctcagcaatagactcgattaatagtaaaccaccttaatagtatgtctacattggtatctatagctctctcatgcattgcctcgtttttctctatagactatctctaagttagtagatagctttgctctctctcttcatttaatacattccaagtagaaaaatatgctgacatagatctcttgtagagagcctatagataaccattgtgggtgccctaatcttctaattgtgattggctatagagtatgctatttggtattttctccgtctcaaaatttaataattttagcctttagaatttattcccatttaatttcacaaattttattattaatacttgtgtccaactataaaactttttatgttttgattagtacggatgtagcaataaataaattaaactgaatttaaatttggtttctgtagaatttttcgtccatcgtcgcacacgctcacgctgtccgattccatcacctggcatcgaacgcgcgtcttccgcatcctgtgtaaaacacgcaaggccgacaaccgcaagcaatcaaacccacaagccaaatatgaaacccccgtttcaaaagttcccaaattagaactctaaattttcaaattaagatgatgaaaaacaccaaatcaacatgaaaggaagttggataaaatatatattcaaacgatttctcacagtaaatttcacctaaagtaaaacgtataataataataagattaaaataaccttcacccgttgcaacgcacgggcatttttctagtacaaaaaataaatttatcttttcagtaatcatttcgtattagagttttgtaaaataattgatataaatatactatgagtagataaagagaaaaataattatatcttgatctaataatatatatgtattaaatgggttgtttgattgatgccattttcaaccacactatttttggtaaaattgcaaaaagatataccaaaaagatatacctatatttagtttgttaccgaactttagtaaatatataagaaatcctatcattttttataatattgctaatttagtactattgataaattttgataaggtttattttgattataatttgaacgcccctgtcttttgacacgaaggaaaaataaacttgagtatactaataaacatgacggcgcccgtcttcactgacgcaagcagtgacacacgaattcgccggccggtgagctgctgcactgggcatgggttagtgtttcagttgttttgctccctaccctcgcaccatttgtgagctcatcacatacggcaacaacacacaccatcaaacctaccgagcacctgtcaggctgtcaccacccgaccattcccgaactcacgctcaacttctaacaccgtgtttagatccaaattttttctttaaacttctaacttttttattacattaaaacttttctacacacataaggtatatttggttgggtatttcaacttaccacacctcaagttagcacataccaaaagtgtggcgaacgaaattcttaacatagctttggctcaaaaatatgtggcaaagcagcaagaagctacctaactttctttggcaggctaaactatagaagcaaaacaaacaaaggataagcagttgtagctgactaacatgaggtgcggcattctatgggatggatccaaacagcctcataaactttaaacttttccgtcacatcattctaattttaaccaaacttctaattttagcgtgaactaaacacaacataaggaggtcgagtttagttccaaattttttcttcaaactttcaaatttttcatcacatcaaaactttcctacacacaaacttgcgactttttcatcacatcgtttcaatttcaaccaaatttttaattttaacgtgaactaaacacatcataaacggattgagatccttcgctgtcactgtatcatgtcctaaatgagtcccaagtgataaaggcgcgatgcagtcgaatgctgaggaatccatccattgctacctataaaagcgaccaacccactgatcgccctccactaccaaagaacaacacacaactcggtctctagttgaaaagctatagccatggcggaggagaaggagctggtgctgctcgatttctgggtgagcccgttcgggcagcggtgccggatcgccatggcggagaaggggctggagttcgagtaccgcgaggaggacctcggcaacaagagcgacctcctcctccgctccaaccccgtccacaggaagatccccgtcctcctccacgccggccgccccgtctccgagtccctcgtcatcctccagtacctcgacgacgcgttccccggcaccccccacctcctccctccggcgaactccggcgacgccgacgccgcgtacgcgcgcgccacggcgaggttctgggcggactacgtcgacaggaagctctacgactgcgggtccaggctgtggaggctcaagggtgagccgcaggcggcggcggggcgcgagatggcggagatcctccgcacgctggaggcggagctcggcgaccgggagttcttcggcggcggcggcggcggcaggctcgggttcgtcgacgtcgcgctcgtgccgttcacggcgtggttctacagctacgagaggtgcggcgggttcagcgtggaggaggtggcgccgaggctggcggcgtgggcgcggcggtgcggccggatcgactccgtcgtcaagcacctcccctcgccggagaaggtctacgacttcgtcggcgtcctcaagaagaagtacggcgtcgagtagatcggtggatgcgaagttgcagggatcgattggcggttgcgttcgctacgtgaacgattcgtccgttgtttcagtggccaagtgtgtgtgagtttgttgttaccgttgagtgcttgtgtgtgggatggttggtggcagcagagagttgcctccgattctctgagattgtcactaaataaagtttgtcctttgaaactaaaaaaagttggctttggttatgcggattgctgagtactcttatgcattatagaaatttaagttagtacgagtacttgtttagttgtttagccactaattcgggaattttctctccgtgtttctcaaggtgtcacgtgcaagaggacacacactccaaacgcctatatgggccgtgaggcccatgctatattgttgctgcctagcaggccatcacttagatttggccccatgtccacacggtgcaaggctaaaagggaaaaagctttgggaaaaaacacggtacaaacttagagtcacagcgtgatgtgcgcacactcatcttctgccacttaccgactatccttataaacacatactccctctgtttcataaaaaaacgaatctagcaccggatgagatatattataatacgatgaatctagacatatatatgttcagattcgtagtactatgatgtgtcatatccggtactagattgattttttagggagattttttagggacagagggagtatgaaaaaatacatattacttgtaaatgcaaacacccctgtctagtacatgaatgatgaatcctagttccactacaaagaacctatccataagctaatcagtcaccatactcataaaagaatctaattctaaagatgaaatatgaatatagtgtatgtcaagattcatctcctagattaggtctttttgcgggacggagaaagtacattttactatgtcctaacacacctctaacaatattggagaccaggcatcacgcaaaatgtctactccctcgcaaagtatattttaaagagagggactgctctctccgtcttaaaaaaaaataatcaaacttggactacatccttacctaggttggattttcttttgacaaatgtagtatgtagccatgtatgtatggaatttaaattcaatcctgaggaaataaacgggacgaaccacgagatgatcagatttatctcaactttatagcgcaaaccgcgagacagagagaacacaataatgccactccaataaccagaggcacatatgaatttcaattcactcgaaaaatatttctggaagggaaaggtttaacgctggctacgggacacgcttattcttgttcgaaactcacgtctcccacaaaaatttgtacagcagcttcatctaggaaaaagaaggaaattcacaagattgtctgagtgatggcaatggcaggtagcagcagcggcagggtgttcatgatggccaaaaaacagcatagcagaacgatgacccagctaaaagaacacgggcagtcatcgcaataaacttgtagcagctccccacggtgagctcttgctggaaaggtgacaacaattaatctgatgatgatatcttcagttcctgcaggttgacagacatggtgatgagatgcaaaattctgtagtaattaattactgtagtttgtactgcaaatgctactggtaagaaaattgtattgtaagatgtttcttgtagatgtcaacttgtgtagtgatatgaggacacctcaggcattatgtgaacagaaattaggatgccattgggggatactagtataataagatgagaatatttaacagaattatctaaaaaaaagaatattgaacagatgatgtagagtgacttgccggcagcttttactgcacacaacgaacggggggaaaagaacaactcgtgtctgaagaaaaatgaactcattttcaatttttgaaaacgttcttcatgtttggaagttggttgcagtgagaaccatgccagcatacagttaggaacggaacatccatcaagacctgaaactgtactacctccctgactgtttgtctctcagactacttcaatttactccctgttgatgagcatagcagtcacgccagaaaaatgtactactagtacttctactaaatagagtattaccttaatctagatgcccagcaagaaggtgtccatgcatacactgaatcaaaacatgctcctaattaattggctagcaaattaggaggtcagctgtctaggattttctaaacaatactactagtactggttaagatttgagtatgatgttttaatacttaacaatggtcaggtttgcacatgtaatcgtgtacactacctggttaggtcccccaccaggaacactacccatcagccaacatttttccaaatggacctgcactagatagtgcgaagttggaagtttgcaacatttgaaggaaaacaacgttctatccataagatgcaaggtgcctagctcactttggaagcttgcaaagcccaattaaaggaaaagcacaagagatacataagtcctacccttttcaggattttttttaattgattttcatttctaacactggtttgacaggctctaatgccaaagcaaaattgagctgaactttggttcatatatatcaagctttagttgagaaaatttgtatagaacaagtgtgaattgtgatgatggaataaataagatcaccaaacaattataacatatcaatagaagactatctaatactaccaaggttcataaagttgatcattcagagctgtactaactctatcttttcttcagataggagaacaagtactactaactaatcatgcacaggtagaaatgctttatggtactgtcaacactttcaaatatctaatgtcttttatactccaggtttccattatcatattcagagcaggcatacctctgttagtactaggaaaaatcttttattatggcatccttcttaaaaactaaggctgtgtttagttcacactgaagtttggaggtttggttgaaattggtacgatgtgatagaaaagttgtgtgtgtatgaaaggtttgatgtgatggaaagttggaagtttggaaaaaaactttgaaactaaacagggcctaaagtgggtctcactttactaaaatttattgtttgatccacaacccaccttgagatgttatatgctatatatgaccataaagtttttcacttctttaatttggcttttatgtggttgtaccaaagtgtcatttcaacatttcacttcagaaaaaaaaatatcataaagcactgttcctttagacatatagagcatttcttcaatttctaacttcctaattaaaccaattactacttggctaagtactgttcatcatgctttaataatctactagaactggtaagttctagtaatgagtacgcattgcaatgcaaataataaatgaaacaccttttcttactgtataaagatctcacttattttccataattttcttagaaggaactcttgtgatttgaacagtaacttgcttcattcaaggcttgctgcatatattgtcatacgaacagtatatacagcttgccagttcatgttgatgcaattcatactattaacttcgatcctttttccgtgtataatgcgacgtagagtagatatggcttcctacagtttattgcattaaaaatgcaaatccgtgcaactcagaacccatgtgattggcctgattcctacgaaatccttcccccagcgatgagcaatcgacacctgtttggcctgaatccatgcaaagcaaaatgcaggtatcccgcctcgaaagtttttggggacacacgtcgaatgcaacaaaagagtttttagtgggatttttcagggaacgaggccacctcgagcggcttccaagaagattgcaatcgaatcaagatgacgaaattgcgcgaacattagtcttagattacgaaatctagtctcttacctttggaggatgcgttgctgggatcgatcagttcttgctcttctccttcatgccggagtggcggaatccatcccacagctgcaacgcggcggtgctggtgatctggccctcggacgccgccgggtgcgccgccgcggcggcgtggccaagcaggaaggaaatggtggagccgtccagcctctggagctgctgctgatggtggtggtggtggtggccggacatgttcgacggcgaattggactgaagggtccccctattggcacccaagaaacccgaggacatggagaagttgaggttgtagtcgcctccggcaggaggcggaggcgccgccagctggtcctgggcgagcgagtagtgcgccgccatgtcggcgccgggggcggagaagttgaacggcggcgccggcaccatgccgatcggtggcgcgtcgccgaagctcgaggcggcggagaagccgtacgtggacgccccctccgcgcctcctttcccggggtgcgcgatgcccacgcagtcggcgccgttgccaatggcgccaccccccgccgacgacgccgccaccccagcaatgagcagctcagtgaacgacgcggcctgcgccggggcgctcgccacggtgacctccttgtccgaccccttgctggtctccgacgtgctactgcatccggacttgttgctgagctgctgctgctgctgctgcgaacgccgccgcgtgggcgcggcgtcggcggcggcgtggggaatggcggcgaaggcggcggggtcgagggacgggagggtgtcgatggcgggggaggcggcgttgatgagccactcgatggccttgctcggctggtcgaagccgaggcggtcctggaggtcgtagaactggatggcggtggcgacggagaggcggacgcggcggtcgcggattcccttcgccgtgtacaccttgctgtgcctgtccttccccc

SEQ ID NO: 9108 - DNA, 59666 bp, Oryza sativa
cgatctggtcctccgggttcgaattctgggggatcggtgctggtgttggtgttgccgttgcggttgagggatatcgagtagctcgttgtccggtttttgtttttgcgagagcggaggctgtcttatccgtgtgggctctgggaaaattctggggatttggatggatctggtaatccgatggatgatatactgttacaatcattcggagacgttaagggatttatgtgaaaaatgtagcattatgttcatggagagataattgaagatcgttactgttatatcttatgaagggtttgttatcgaagaattcgagtgaaatgttagagagtttctacttggtttcgtgcaacgttaggacagtgcgttattcctgtatgacaatgctgatatggtttgtgcagctgaaaaatggggaggataccgtctctgaaaaatttcaatgccttcccccatgcggaagaccacttactaaagaagacttactctggtgctatcggtatgggagatcctatttcttcatgattttgtcctgtgggtactgatgtttcatttggagatgtttggttgatttgtgcaactatggatatgtttgcagtcacgattttcggactaattataatggttacgttatttgccacgagctcaaattttatcttaccacctatactgttcatcaggtatggttggttgtttccttttcttctatgtctagcatgtgcaactttactgtaattttgcatataagttggttattttgccactcaataacagcttttaatgatatttcattagtaatgggaatatgtatgtaggtgatagctatcctgttttggtctatttaacaaaattgaccagagaatctgtatgatgacagaagggtatcttggagaacttaaccatgattttcattgaattacattattctaattgttttaaatatctactgattgctatttggatatgatgatttttcattccttgcttcggtccttaccaatgccaatttcatgggcctctcatatactccctccatccacaaaagttagacatatttcacatttgagtttttccaagtaagttgttcctatttgtagtctttatatgcattcaagacttgaatcaagagataaattaaatgtttgattagaacccaaagagtcatttaaatactcattggttgcatgcttgcatttactccttgattttgtaacatctaagatgatttaatttctccttggtcttagtgacaaaagtaataggtataacttttgtggatggagggagtatcttactaagaaatcatgacatgagccatcactatctaattgatgctgtctgcagatgtctgtagatctgaaacgaggagaaactctgccaattcatataaatatgtcatttccctctctaccatgtgaaggtcagttattgattaaatgcatccttatcagttcgatatgaggtttcttttcaacgttggtttgcaaggagattatggtttgacctttttcccctggctcttttgtttagtcttgagtgtggatgcaattgacatgtctggcaagcatgaagtggacttgcatacaaatatttggaaggtaccacctgacatgaacactttgttactctgtgacttagtgtatgttctataatagacaaattcagtagttgcactaattatcctcattgcttatgacgcggtaataataaatcccttaattatggataataacacatactcgctatccatggtgcagtcatagtattcatgcacctagaagggaacattttcttttagccgttgactggcagtgcatgccttgctctagtgcaagcagtattcttcatttttacaaaacaaatatattttttcccaacaaaagttgtaccatagtatttttctcaattcagtatctggcactcatataatgtttctaaccttacctcttctgctgaatgcagcttcgcttggataagtatggccatatcattggtacggagtatttaaatgatctagttgagaaggagcatgggactcacaatcatggtatactctgctgcttccataaagataaaactaatgtacactgaactgccatatgaattattgttgtttcagtccctagtgtgtacattgtttccttcttttgctcactgtaaattgcagctcgctagtaatagttgtttgcagttataattgtggtccaattatccaaacaatactttaagtaatatattaaggacacagatctagggaaacccttgagacaacaaattaactaaatctattgacaatatgttatagtcagaatgtcccatttgatgcgccaacatgctttatactgatttagttaaaatgtctgatgtgatggagaaatatgctttatttagaatgttccattaagtacgtagcctggaatgggttcaagcatggaaacagtgtttcttagtaatataatgtttgcctttcttagtatataagttcaagcaaaaaagaaaattgattgcaacaatgtgctatcgagcttgctttggtactttctggaaagatgtaccagccacccaaaaaaaatggttccaataattagctatttagcttgctgtcatggtcaaacattgtctttgctgaaaaattatcattggaaagaattaattctcgtttcgagtaacatatggattgtcatttgggaaggtgggaggagggatggtgatgtagaacttaccatcactgtcattaactcgaatacttttagtagagataaaaaacaatcaaatctagttattttattgggattatctacttaagtaaaaaaaaaccctaccttatcgcttcttaatgtgaaactttccccttgaaaacacagtttagttgacaatctcttggcgcttatttttctatacataataagctagtggtttaacagatcatgaccatgagcatgaagatgaacaaaagaagcaagagcacacctttaatgaagatgcagaaaaaatggttaagagtgtgaaacaagcaatggaaaatggtgaagggtgccgagtaagatatttctctaccagtatcctttaatttatggaatggtattattaaggctattatcatcaggcataccatgtacttgttaaaacattttgctttcaattttcacaggtttatggtgttctagatgtgcagagggttgctggtaacttccatatctcggttcatggtttgaacatttttgttgctgagaaggttattcatctaaaactgcatattttttttacttctgtgcttccatctgtatgctttttgctgtgaaatatgttaatttctttttgtatgaagttgccaggattattgtataagcttctaggttttcagtttatgacagatcatgttcacaagggtttaaaattattcaactaaaaatcccttcagaaactattgaaaccagccagctcctacttcctggtaatgccatattggacaagtgctttgtgcatcttgtacaagacttcctaaaactgtccacaattaggataatgttttaatggtaaacagatgctagtgattacgagagaaggaaaataacacaacctaatgataataataataataagttagccagtaaacaactcaatactcaccagtttggtgcacaccagatcaagctgggattggaacaaaaaaaaggacgtgggaagtatcttcttttggccatcacattatataattgtcagcttatatgaaccacaatattttctttacattggatgtgcttatgtctcttcgatttttatgaaaaatatgcattaaaaagcaaccacctaggtagctaggcggtgcactactgcctaaggcgcctaattgatttattatgccgcataggtggcttgctagccccgtcttatggtgtactacactctggtatgccgcctaactagcacataaaggcctcagtgatttcaacctctttttgtgctacctataaataagtgttttatgcttttatttgtattgttattactctctatgtaaattttcattttcatctgttgtatgtagatttttgatgggtcaagccatgtgaacgtcagtcatatcatccatgatctatcctttggtccaaaatatcctggaattcataatccactggatgagactacaaggatactccatgatacaagtgggaccttcaaatactatatcaaggtgagtttgagtagtcattcatttagtagttcatgtccagacagcaatttgcaagttccaacatggacaaggcttgcgaaagaggatgcaatcatgaaaatagaagttcacatatatgcataattcaaaatcatctatggatccttgtggaaaagaactccatccctcctccaacttttttgtccttttgctacaaacctatgtaaatcgttctttggagctgtttcaccatcagatcagatggaaatccatcacattatttgtttgagaagaagtgtcctcatctgttgtaattgatatgcagattgttccaaccgagtacagatacctctcaaagcaggtgttgccaacaaatcagttttctgtcaccgagtattttgttcctaaacgcgctactgataggtccgcgtggccaggtaactctcccttcactacaagcgtggtatattcatctgtttccaggactaatatgttttccttctgcagctgtgtacttcttgtatgatctctcaccaattacagtcacaatcaaagaagaaagaaggaacttcctgcatttcctcacccgactatgtgcagttcttggcggtacctttgcaatgacaggtatgcctccacagcctacaagaatgtgtgttttaaaagcatgctggtgttagggattggcgtcagtagcaatagttcattggtaatctcatatgcatgattttagagtgttattttttttaaaaaaaaagggagtaataataacaatttcactctaaaactgataccaattctgtcatcctacgatacaggaatgcttgaccgatggatgtaccggcttattgagtctgtcacaaaatcaaagaccagaagcgtactacggtaattgcgcatcacatgataagtggaggcaaactgtgacaaccctgtgtgttgtcactggtcatacaaatcagtcagagcatatcgtctcagatacggtcaaccccagtgggttttcatgttttgatatgctctatggctcgattgcttaaaatacttatgttgttagctttgtcattaatcactcatgttagactggcacggactcataacagttttgtaatcaatgattcccacaaatcggaggtgccaacgtcgtgtgatcatggagaaacaaatcccagtatagcctgataattccaaaaaagcagaaaaaaaatcaacatataaaactttgatactcttgcatcacggaccaactgaacgtttgtttcgtagacaaattgttagtcaagtatatttttaattccggtttatagaattaggttaatgatatttcagaatgttacgttacaaccttgaactcctgagtttataaaccttgttgggcaaacaaaaatacacaagcacgacatgcaactaaaacttgcaacatccaacatggaccaaagtttctcgttatacaggtaatctagctatacagttagttggcaatatgagttttgaaagatgaaaacagttacatagtggatgattacaaaacgtgtatctggctaaacaaagatgcgcctatcccgtctacccaaagacctgaacagtgtaatctgtacattaccaggccactggctgataattattctctacagaatgtcgttctgagtttctggcttgtacgtataactgcatgacctacaaacactacatggagctattttctgaacgtgtatatatatagctgcatatcagaaggtgagtgctacttcagctggttcgaaatacgcatcaacaatcaacatcctatgatatcgataattcagtctgagaatcctccacttgatctacaactggagcttcacatggctaattggttatgcacatgagcggatgagccaggatatcagtgtgtcagttgtaccctcctggcagtaggtcctcatgagtctactcttgagcatgcctgcactatttgtattcatcattcaatacccaacactggaaaattcaccacaattcatacataactataatatgaatataaacctatacggaaaatcatattgaaaatttgaagtcgatgatgattgcaaggatgacaggtgctgcaaagatttcttttaaagaaatgctattaatcaaaggctgcagttcacagttgagaaactcaaactactaattaaaaacatatttcttgttgtctcacctagttgccctttttatgctgtcgtatcatctttgttctgattacttctcaaacctgcaacaagcttgcatgtcttcaagaaagcatctagcaactgcatacagagcactcatattattactcagttgttgccactattaaactggtcattgcaggatacatcaatccaagcatgcaaactctttgcaaactaggagtactggagatcgaatgctctaagcagcatttatatcaggatataaaacacttaccccaggatattgctgtaatgtaggggagtagcgatcaagagttacatatatcttctgaagaaggtttaaatgtgaattaaccttgtcgcccaaaatgacaacctgaatcacatcggaaatatttcaacgttgtctctttgaatttatagcgatatatcacagttgtagtcaaacaaagcttaattaatcaatgaagtattccgtgtgaagaacagtctgaggtttacgcccaaaaaaggaaaaactgaggtgcgacttaagttgagattaggagttgttggatcatgataggatatgaggtgtttgtcgttagtccttaccagtactaaataagcctatgggctgtatttatgtatcagtttgtcaagaagaaactcactagaggaagcccctttaatggtatttccacaaatcttcaagttctcaaaggggagttagaatatacccttgatttgtgctttaaatttggtgtaatttccaaagggaaattggacaggcaaaaacaaagaattaccttggcttcagccttctggagctcagaacgccttgtttctagcatttgtttgtaccaaaggcctatttttgttagtacaacggcttgtctgaccatgtggttgcaatgatcactcaaatcctctgacctgaaagcaacaataatcgcatcgagttataatggagcatattcttaaaaaaaaaaggacagcagaagttgcaggtcaggttttggtaagagccaggctgcagttttcacaagcaacaagcgacaacatatacacttctaaatcaatcctatatgatgtattaaagatactaacaaaaccttgtgtttgatatgctgtagatgatatttgatatgccaaattggatttatatttttcaagtagtaagtcgatgcaattacagaaaaaacaagtggaaaggaagatagacaaacctgcttgcacttctttctactgataatttttgctcgatctccacaaattcctttgacaacttcataatagatattaaaatgcactccagttgcttttcttgctcatttttggtgaaaataccattataatcgatatttttattttcaacttccttcaatgcagctgaagcaatttctaaacttgagttaagtttgacaagttcatcatattgcatatcttgcttgggagtctcatgtgatcttcttggtgatatgtgaggcgccacctctatatcacgcaaaatgatctctgtactctcttgcttgatgacttctggatcttcctgtttatcttggatcaaacattgctctaactctgctattttttcttttaacattcggttttcttcatttgacaaacacaaagccttctccttttcagatatcatagcttcaagagaagacagttctgtactaaaattcgttgcagcatcatgcatgctgttcatagaatcatcaagcaactttcttgtaatagtttgatacactccatccctaacaccggcttcgatttggagatcctcatattcttctttaattttggcaatttgtctcaggagatcgtcttctgatgacaactgaatagacatttctttactggcttcagatagctgagatgataattccttgacatccttcatattatctgcaagcaaacctctaagatgctgattttcgtaatataaagaatcgattctttttgctgatatgcatctttcatccagtccatcattagtcatgcaaagtgaaggcatctttatgttcttcgaaatgatttggtccattctagaaataatctgtggaattttctttcttaacggctcaaattccacatcattcttgagagtaagcaatcccttctcccgtttgaatttgaagagctcctcggtcttctcctgcaaatccaattcatgcatcctcttcaatttgctcatttcggacttaaaataagttatgatctcctctttactcataccattcaggtgacggaagtcagatttttccaagacaaccatggacttctgtttcctgaaactcttattttcctccgcgcgagatgaatgatcctccttgtttttctttccaaagatgttgtacttccacctattgctcctgttgcttgaagtttcatgcttgctgtgagaaatatgtgattcttgtagtgagggcaacaatagcttagaaagagcacccagatcatcgcgcatgctggcaaattgagctatggcatcctgccaatttttactcatggagtttgtcatagaaatttgctcatacagcttcctctccatctcctcttgcaagccactgatgaattctcctattgtaatgttgatgacctccaattgcaactcatgctcccactgcagatcagacaccgacgagctgtccatctccctagccttccgaaacactgtggccagcagtaacttcaaggcattgaacctctcatcaatctcaatcagcatcacatcaagagacatgcccaggtgtgtaccaattatatacccattatccggcaacgcaaagttttccagcccagttacatcccccttgagcctatcaagttgggtatcaagctcctgttccatcaaatccatgaattctgcatagttgacctgcccatttggattgaaaacatgccggtctgaccacgataccgctcttttcgatccttcaaagcagttgtcagagctggagttggacttgatggacaaccatctcggcgtcagtgccggtgaatcttcagatgtcattgatccactgctaagcctgcccctggtgtcaataaaagatccactgccagcccggaacgctgtcaccatgatcttgaggctgcacaacactggctggaaaagctgatctgtggtggatcaacgggttcaatctgtcactcaacacctgcacccattttcacactcagtttgatcatgcaagcagataccgaattcaatcttgagattaaagtagataaaagatgacagaattgaaaccttgagcatcggaatgatgcgggtcaacttcttttgaaattgaattaaatgaatataaatatactgcgatctcacatgagtactgaattgtgaagagctagcaaataactgatcatcgaacacgtcagaaagcacacaggcgaaacccggaatatttctaaagaaatctcgatatagcgggatgatacaacagtacgaactacgaagtcactgcagagaatttaaccccgaaaaaaaaaacccaacccataaaaaggcaagccgacgaacccagttcccatcctcatgatcaagcataagaacaacaacaaaaattaaaaataaataaataagcacgaggcgcacgtatcagccgcgatcacatcacagcactcacaggagaggagaagagagagacggaatcgggccggatcgcttaccggcggctggacggcctccatggcgtccgacgactccggccgccgccgccacaacgctggcccagcaacttcccctcctccttcccgccactccctcctcccaactgacgagcctcgctattattagggcttgttggtgtacttacagctggtaacctccaactaatcactctcatggatgagagacacccaaaaaggccaagaaggggtcagtggaagagaagcggaggcggataaaacggacaagtcagtgctggcctgggcggagacgacggcgaccggggatggatggaagggagtgaagcggagcagcgcacgccgccgcggagggtgacggcgagattattacggtggtagtaattgcgatttcgagagtgattagtactaggcgaaagcaaatggagacgcgacgcgggtggatggtcacggcctgctgacgtggccgcggttggattaatcgggttgacgtcggcggggtggtggggccccccgcaggttgtgggccccacctgtgccaaaggccaaagaggaatggtggcaaactgacaatgactgacaatacgtaggccactgcgagagcatcagaacatgaccattaaattagcgttttcaacttccaaattctcacggagaaaagagagagggtacggaaattcagtttggctcttgtacataatttgtgatgaaaaatcttacatggtattccatccctccctaaaaaactaacatagtaatgaatgtgacgtattataaacaaatctggacgtacatttgtctaaatttatagtattaaaatgtgtcacatctagttttagatttactttttataggagtactatgatagtcatttatgatataaatatatatataaatgactaaaagaattatttaccatgctttctagttttgcgtaacactgttcttttagtttttttacggctcctttggaatgcaagaatttaacaggttttggatcaatttccgtgaaatctctgtaaattccattcacttgaaaagagaccttagtgctgtatagcgtcagatttcagatcttgttgggattgtgctgaggcacgttaacgtttgtggtggcgttaggtgattaaacagaaaaacagctcatgtaatctactagatacaagacaaagcatgtgggtgtcataaaatcgcaagggtagttcagagtttgtatattttgtatcaggaggatttagatttgcttcagcttgatctgaataacgtcattcaccaaacacaacgtggctggctgctgctggtgaattttgatcaccaatggtcggaaactctgaatgggccaaagcatagctcagcaacaaatgcaggtatttcatgactctcagacatttttctctgaagatttagtgagatcagataagagtgccatttccttcattctaaaatatagcaagctagcacttgattagacaccatctaatactgcaaaaatctggatagacagctgaaattcaagtttgacaataaaaaggttgtgctttgaggacgaaatttgctatagaacacttgaaatgataaacataaacagctcacaagccacaagatggctactccagcctccaagagcacgttttagtgattttttcggcggattatattttaatgatttgaatcaacgatatcccatcacttttatatgcatagacaatgacagattgacaggtacctgaaaatcagcttcagacaaaacaccttacagtatggtagatagcaaaggtaccagctgcaatagtgacaggcaaaagttacatgcttcctttcgttcatcatgtgatgcagaagcttatgaattacatgggtgattttatgattcatattcagaaaaaaaatgatgattttacaccaccctacaagaatcatcagatcatgcgttttgttttctctttttcactgcgcaacaatcataatccttggacacttagatcctagtagacctcaacgtgccattgcttgttcttcttgagctgggatagcttctgctcccagctctcccctctctgctccgccactttcttgagggtgtcttgaatcccaggcatcatccccttcaaaccacagaagtagatgtgcgcgccgccatccaagagcttgaagatctcgtcgctgtactcctcgatcttgtcctggacatacatcttgccagcgttcttgtttttctgctccctgcttagcgctttgtcatacctacaaattcaacacaattcaattatagcaatatgcacgaatatacttaacaaaaacagctcatttatgtggtactctcaaagtcaaagctcaataattctatgatggcatcagttgacagaggcatctatgttcattatgtggcgctgtttcagccaagtatgcatgtagtactaataattaatacgaagagtcaagacagatgatgtctagcaacctgaaattgtctggatactgcttaaggtagcttgtgaactcttcatcatagagaaggctgtcagtgttagccacaccaaggaagagccaggccaagccaccaaatctgtactttgggacatcttccatgaacatacggcgtaggtagccacggaatggagcaacaccagtgccagtagctatcatgatgtgagttgcatttggatcttcctcaggcaggagcattattttgcctgacggacctggtgttcagaaggaaatcactgtgagatacttggcatccatcatgtgccacaaaggacatgatgactaacaaagaaaagggtaaactaagatgcgattgcaaactttagtaagaaaggaaaagagcaagataagataatcatattgtagaaggggcataatcatattagaggagaggctattggaacctttgttgcagagaaccgtttatttgttgttggtatgtatgaactcagaaataggttgtctaccaaaggtgggtttcaggaaaaacgcaactaaaacaactaattttgctccgcttggaattagaagttaaacaacctcataggaaactcacaaagcctttgcattcatctgaagctgaaagaaatcaactaacctgtcactttaaccttgtcccctggttttgaattacataggaagttactgcagacaccattttttgaggggtcctccttgccagtttcaggatcataataaacggcacggcgcacacataaactagtggtccttccatcgaatgaatctccataccttgtagatgcaattgaataaagacggacattatgtggtgcaccaggcttcttcgggttctccccctaacaagcaaaaatgcacagggtttagagaacagtgaagagggtgatgcccatggagataccactggaactgtattaatagtgtgtgcacatactcaagtctcctatcaagagcaggttttctcacctaggtttacaattttaagccattgaatagaacattggaaacagtgtctacagaaataatcctaatatactaccgactatatctttgtaagttcttaattaatagtgtcaacgagacaatcgttcaatatccaatcagataaatagactatgaacgaaaccgacaaagcataagcataatgttctattttaaacaaggaaaatgattgaaagcaggaattacttactggaggaataatgccatagctttgcccctcccagtaaggcacattgccaccatgatcaataacaatgtggcatgtctctcctggagccttggggcctacgatcctctcaaccgagacaattgtggcggtgtaaggctcctttggtttgtatgtgttgagcggcggctcgttagcactctccaaatcaagaggcttgacagcaaccttgctttcgctcgcttgctgaactgacatgcagagcaccttgttcgcatgcctcggtcgcgtggccttgctctcccacgccaatgtggtgccaacccatgatttgttgctaaagctaatattgttgctaccctgaggaatcacacagaatgaaatccagcacatagtttagcaccaccattcaagaacgctgtgaattcaggataaacagcctactaaaccaaaaccctgaaccctgataattgatctgcacatcgaattaacaagcagcagcaatatctggcgttgcctagctctcaatagcgctcaatactgaaccaatctgagatatatcccatagatttgtatccacctactacacattgaccaatccaagcccgcggaatcctcacaggattccacccaaaaggaagcaagttctaccatcaggggcaccaaaccacgcacctggatcccagaactcctcaagccgcgatccgagccagccggagcagagacagcaacctgtgtcagaaacagccacaagaacccccatgaactcagcaccatcgcgcgcagcgcgacaaccaggggatccaaaaaaccgcgaggacggcgcgtacctgggacgcaacggcggtcgccatggccgatcctgagggaaagcaagggtcttttgatctggagaagggagatgagatgagttgagatgagatgggaggggaggaggcggggtttatagacagaatcagagaagggggaggagtgaggtgagctcttgaggtgctggaaggggcgacttaagctattagctgcttaattgcgtgattaacccggccgctcttggggttgatttaagctttagctgcttagtaatttcgttttagagtttgggtttggggtttgataatttaaaaaaaaagattttgtttttttcgtttttgatgttgattagattagggggtttgggttaggtggaggtagcagcagagggttgggttgcctggctgcttgactagcagaaatggtggctgcagcttgagtgctccagatggctgctgataaaaatggctttgtggtggcatcaagggtcacctttggcctgaagagatgcatgtatcccatggagctagccagatgcacatacaacttgtatattattagctttttagttttttggaacagtacatgagttggcagcgtgtgcatgtagtgcacaagccggtgtgtatctgttggacattttactgccaaaatgtgtcaaatcttggcgaaaaaaaaaacttttttaaggatagagggggaaaaaaaactttgtgatcaaagggctagatgtttgcccttgcaccaatgagccatcatgtgactgatcacattgcaaatttacccaaaaaaaattaaaaaaaagcaagaacaaaaggtagcaaatttatggcctactatgctcatcaaatgtaatcgggtcatgcaacaccacagaagagaaccatgtaagtctgatgtttttacctttgtttctccatttcggactgttcaccaaaagctgagaactacttgtgcagagagctgcgcaattctgttgcatttttacagcatcacaggatagcaagcagtaccttttaactacaaccaacacatttcttatccttcaatggcacacgccatttctttttaaaggtaaaactaaaagtataatccttttggtaggctaactacagatggactagtcctgagtcctgacttcaggcatatgatgagttgcaaacagccagcttcgtttcagatgatcacatccccatgatgtgatcaaggcctccatgaggagctcctcccatgccggccatagtcatgttgtgcagcagctgctggagccaacgccttgtgacatgatcatcctgcgcaagtaagatgaaggtggaatcaggaatcaattgaaacttttctgtgtaaattataatgtaaatattttgcggtaaagcgatggtaactggcaatgtcgtgagttgagagttgagacacacacctggaggaagttgttgagggttccatctttcagcgcgttggggaggcagctgttcagcgcggtacatgccctgcatgagatgaaaaaacgaattataggaggccccaggtctattttgaatttacgcattgaccagttttctgcattttgtaatctgtacagatgatggaatgaacctggaattttctgacagcctgaggtagcagcgaattatgtgcttcagcagtcttggagaaggttgatcagcaagtgcctgaaccatctgtgatagaacactggctacggcaaagaaacgttcagcagtagcacatatgtagcgaagcccaacatcatcaagcagaatcttttgaacaataaaggtggcaacctgcaaaaatacgttgattggattagcaaaaatgaagcaccaaatccatctaatacagtactacagcctattgctaccaggtacaagtgcatcattattcccgaacaaatatttgttttccctcttttaactcacacatatagcagcttagaaaattgtcaaaagaaactacgacttccttataagatcaaaccaaacaaaaaggaagcaaactacaaagccaactatgatgcataatctaagcggttcatgaccattgtaatattaggttccaacatgacttggttacataaagtgtaagataatctgacttaacagggatagagaaagaagagttttgctctatgtaaatttcagtctagaataattaaacataccaaagaacatgtgaagtgttgtcaagagctgaaaacagtggaagaactacaagagagaaaggaggcaggtagctacacaccgttttcgaaagttcactgcccatctccatagtacggagacacagaggaattatttcagtttgcagcagaaacccaatgacttcagaatcatcaacctgcatatattgcaaaacaaaaccgaattaacttattgagtatgctcattgacaaaatcaaagtctggtaaaagcaacttgatcattaataaatcatcgaattgtttggctcaaactctgtaaaactgttgatggttttaccatcttattttataaaattaactacagggcttaaacctggtagtatgcccataaaaaaaacatcatcgagttgtttggctcaaactttgcagttcacatagggatatttggggatccaaacccaaatcaggccatttgatcagcatgactagataagtatccagtgtccacaagaactgtcatgaagaaagggaaagttctacccatagtccataccatttgcaccatcttttcttttttctttcaccccctccctctcaacatagtttgagaactggaccaaaccaccattcaagaacagagaaaaaattgaacaagcagcttgtccagaagtaaacccagaaggaaaataacaggcaaagaatataatatactagatataccaaataagtagttcaaactcacagcttctcttatacaagagggcttgccacccgaagtgtatcaattgtgaagttgttggaataaggaaagttatagactcatattagatatacgtgaacacaatgatactcttataaattcaggccaaaatatttcccaaaaagtcatgtagaagggagtcaaaagaggaacatgtagaagctgaagtgcccaccccaccagcataggtaaggttaaattgaaccacatgtcaatcacctgaacagctgaatagggatcttagtagatcagaaaatggtctagctttaaaaatctacgcttccactcaagaaacacacccatatccctcataattttcataaagttctggcttgcaattaccttcacaagtgcgccaatgacacccaagctggtaagcctcaagtactcaaaaggccttgtcttgctagtagtattcaagaaagggtacagatacagtgggatgtgagctgaaaagaagaagggaaaaatcaagagaggaaacaggtcactcacaatagccaactggaagcataaagccacatacagatgaacattcctatgcgcaaaactaactagatgtgattagtattatctgaaattttcagcattgggactgccatagtccataagtaggtcatattgctcacagctgaaactaaatagatgcaatcagcattatctgttacatggttttttttaataaatacaataatagtgtgaacatagtatattgggcaagaggggaaatattcttgaacaatgagtatcatcatggaaatatttaatacttggaataaaaatggcagcacttattaccattcaagaaaggaatccttgtgtcactgtgtgaggcaacacactgcaataaaaatacaatgaagtttagaaagcaacatgttgtattaaatcagtttagggatcctaagctgatactacctccatcctcaaatataaggattttgcctatgtaattacataggcaaagtcccttatatttggggatagaggtagtagcattttatcaatcccccttttatgcattgcaacatgctgaaaaaatagccttctctcatcccatcatgaggcaccagtgtcataagtagagatttctcactgtcgtaaggtttctttctttctcatgtaaaggtgtacctgaagaagtgcaagtgcattgcagacacggtttgaagcccctggagataatgttgggggtgaaagtgatggatagattgacacaatctcctgcattatccaaaccacaaataaactgaatgagaaaaccatgaaagactcaaatgaatttcttttcggaagaactaacattcgtactcaaccacactgacttaaacaacatgaagaattgtaacctacctggagtagtgcagcaattgttccataagagtgccacaggagtggagcaagatcctgaaaaatctctcgcttctggaaaaagaagtccatgaaaatcgttaggcaacaaaatctctattcccaaaatggtcaggcgtgacgagaaaccaacaatgatttatgaatttctttgctgaacagcaaaacggaaaaactaatcaactaccaaataggagaatcttcaagaagctatatgccataaagcactgaattggtaagattccactccatagatagaaacagtccccaatacacttgcacacaaaagcacaatcacacatttaactcttgtatcagaccattcagggtgtgtaaccacaggatgccaaacagtacatttaggagtactatgaaagcatcaaaataaggaaagttacgcctaaattcataaacgaaaaatgagttgtgagttactgttttcattgtctcgtctagggtggagcagattgcaaatttcattcaccgctcctatgcccaagcaaatcttcgtactcataggctgcatggattcaattcagcaaagtgtacctacagtcctagacaaggataagtttgtcggggtctgactcagatttgggtgttcacacttgtgaggtacttactagtcagaatcagacaggtgttgccatgtcggaatccgactcagacacgatgtccgatttggcaaaatagttttgggcctgggtttccaggcgcagcctggacctcaccattttacttgggccacggcccctttacatctacgtggatcatgtcggaaacagtgggcacctggatcaatttgtccaatccactatacctgcaggccgacccttttcgtttttatggaaggcaaacccatgaactaaagaggactagggaacactgcaagtggggcttgggcttcaaaggagatctgctaacaccatgcatctggaggctggcccaggatttgaatgcaaacccaagctattggaactcccaaggtcccacgccaccaagaacacaatttggcgggaagttgacttgatggagaaaaatttcaacaagtcatatatttttaactgcttagcaactctggattcataggtattcaatttttcattgttacagttgtcaaattaaaattttaaaaaagaatgatgtattctatatttgttgcctatgacttcaaacattaaaaagcaaaataagcaatttcacatattaaaatccaatttgggctactattaatgttctgttaagcaaaaagtagttgtttatgttagtggttacgattggtttgctctttacactcatgctatagcgacaaagaaaatatctagtgaatatgtaacttatcaagattaaatgaaaaaaagtacagagcatggtgattctgacttaatatatatatatatatatatatatatatatatgtatatcttctagttcttagattaattggtactcttaataaatcatgggctgtgccttctgctgtccaatcctaacagaacgtagaatacaaccacagcactatccattttaataagaacaaccctaagtagaacaaactaagtgacctaacacagacacagacacagaaacagaaatcccaagtgacctaacacagacacagaaacagaaatcgcaagctgaggatgccctctggagataattaactcttttgcaaccaggagatatgaacatgtatagcagataaacagaacaaatattctgaatatgcatcatcacagcatagacatcaaaacaaaacgcaaattcccactcacaaataaagcttatatgattcacctaactaaaattaattgaaggattgcacaaaatctctagattctcgtcattgccggatatggggaaggcagaatgtaatgaaactaataagctaccacatctgcataccacgaactcccagagaagaaccctccgtacaaaaaaaaaggactggtttttcccataccaaacactgatcaaacagtagatggagcaagctatttacccctggatgagtagcatgtgagccgatctgcgttcagaacagactactagcatcagatgatcaagtcccaacctacttttgcctagacagagcattacatcacaaaggctgcaactttcgtaggcaccacatggcacgtacagattcccccccccccccccccccgaatccaaccataaaatccccctcgccggagcccacagcgatcgatcgagagagaggaggataaaaaaaatgaaaattgaggaagaggagagaaaacgcatagcttctcgcgacaaggggagaccttggagaggtcgaggagggcgttctcccgcagctcggggtcgcagaggtcgagcacgagctgctccgcggacgccatcttccggtccttggcggcccccggagccgccgccgccgccgccgacgacgacgaggaggcgccaggcgagggcggcgggggcgagggcgcggcgaaggaggcggcgccgatggagagcgacggcggcagattcgccatttcgcggaggcggcggcggcggtggagtggagaggggagacaggacaggaggaaccgagcaaggccgagagagtgtatatacgaggagacaaagccggcttttttactaactacaccctccactaaagtagttttgttgtttttagaggtacgttttagacaaaataatatggagtattttgtagtaaggattgtaaaaatattgttacactaagtgtttggcttagggtgtcaacaatggcatgatgttagggtatacgagtaggtgacacaagtaagaacttttacgtaaagggaagttttgttgtttagagggtacattttagacaaaataatatggagtattttgtagtaaggattgtaaaatattattactaagtgtttggcttagggcatcaataatggcatgatgttagggggtttgcgaacttttatgtagagggaagagcgagagagaaaaaagagtaccttcaaacagcctagtagatagcttaatactctctccatctacttttgatagtcatattttcaaatctggaaattttatttttgataggcatatttcaattcaacaatctatcatcttaatgactttctcggatttaatgcatgactctccattctttcacacatgattggctacatgggcattgagaaatgtaaatattaatgaatcgtttatttacaaagaatgactagtagcatgtttaaatggatgataagtagaattacttattcttggtctgtgtgccaagatgaaatatgactatcaaaagtagatggagatggagggagtaccatctatactcgtctataaaaataaggttattaattatttaattttatttgaaatagttcaattgattatttgtcgtctgagtcgtatgtagtcccttcatccgcgattggtcatcatattgctaaaaacaataaaaaaaagatccatgtttgatcgtcgcaagacgttgggagctggcagaaatcaagtggaagacgctaatgatgcttttgtatggtgtgttgcggaaatcaatttgggagtagttcgtatgcatggattttatgcgatcacaataaattggcgcgacgcgcgggcgaggccaatgcgccatgcagatcatgatggcgtgcatggatacgaaacgtcaacacacgttgatcaatactgattaagtgtcatggggggttgtattggtaccgggcacaaagcaaatatgacaaccaatcaaaaaatggaaggtgtatatgttttttatatataacgcacaatggtcatttaaaccatttatgctagttttttttttaagaaaaccgatcatactttttaaagcgacatgcttggtaggtacttttttcctggcttataaattgaaaaataggcatagctgtacttctactggtaatcttagcaacataacgcccaatgcttaaaaggagaaaaagaaaaccttaaataaatttaaaagtaagttataatactaaaatttggccttaactgataagccaacgaggagctctacgggtagactttacctcttgagttatatggttctagattttcacaatactcaatctaatttaatctcaaacaactacaaaaacacatatttactcgactttgctaccataaaaaaacttgtcgaccattgaagattattgcatcattttgatataatatgtttgctgttttgggcaaatacaatttcataggactgtaaaattttacatggaagggttcttttgtcaaaccttaaaatccaagaaatatggggggccataagccagacttgaatcaacaaaaattagggttttctaaacctatactagtatagtgtttaatttcatttcagttactattgttatttttccttttttttttatcttcccaaatacatccctaaaactcagcccatccatgtatacgagcccgtaagttttctactcatgaatgggccacaatttagtagaaaagggccaaaaattcaggcccacaatattctcagatgcggatatgcggcccagctgagcaaccagcctccgcccccctaaaccccaggaggcggcaccgccgcggcggcggcggcggcgctgagctctgctcccctcatcggcgcatccccatccgctctcagatcactgcgcgctcgaagcctgagattttctttagctccttagccgcgtgttgctgctggtgccacgcgtcttgatgtttctgtatgtagccgtagaatcttgatgcgggttgtgtaatgttcgaagatggatctaggagtatggccggatatgatgcgattgtttcgttgtgctttagtttagagaaatggtgtatttgtagacggttgctagtatcagtatgattgagaatgtaaacctttgatatcaagcaacgttatacctactgtggcaatgttcttgcttgtattgccatgtttaatcgcgtagtttctttgtgtcaaattatatgtagcataatttgtggaggttgggtaaagtgatctttgcgaacgttttgtactgatgaattttctgggttgaaagatgggcatggtcttacccaaaatacctgagcaaagggctacaggtgttcgcggagattggttgtgcttgctttgaaatcaattgaactgtaacctgttgaatgtcgattgcggtcttgcagatcatatgcatggatggtgcatttgcatcctgtgcttttagcatgaattctaggaaggtaactgctgtgattaggatgttgtaatttcaacattctctcccagttttcacttttcagtgaactgacatttcattttcgcctaatcagggaggatatcccagccccagttcaggtagctgctccagttcttggagacaatggagagcccagcttgtgatgaagaagacgggtgctaaactgctcatgatgaccttgtcaagggtctccgtgaggcttgctaaagctgttttttcgaacggtcaagccattgccaacgttttatatacttcctccgtcccataaaaattacatttatagctaatttaggataaaacagtaggattggaaaatgatcacaatggccttatttaatgaacccattgcatgcacacattccatatatacaaatgattaaaaggaagtttgagagaattaaccatattattagcatgcttaattacatgcattagcagcccaaattacatgctttagcgccaaatggatttggcaccaaaaatttgctgcttgcattaggaatcttatctagatcaatcaatttgctggctctgaaagtgcattaatcctcctagtgggttttggtgattaatgacaaatgtggttaagggactaatgagctcattgagtagctttcaggtgcattagtccaaggtgtggaagatagatgcttggagaccccccaaaaagtacaaaatcaaagcggactggaactcgaaagtgcataggatagtttatcttttgaaatcgagtttttaggaaaaaccgtactattaagagggattccaagtgatgctctgagatatatcaagtgctcttagtgtgaaccaagtgtcaagtttccctaggagtcctttttttgcaaattctccatctgtccaaaattgcaagtccggaacttcctgtcttccaggtccagaagttccggtcttatgaaaaagattttcctaagtgtagtctggaagttccggtcttccaggtccggaacttcctatctagtttccagttcaaatttgtgagtaacgtctagatgacgtcacctagccgttatacatatacagctcgtttccagctcgttccttggccattccactttcacttttcgaacctagagctattgctagcctctcccaagtgtttcttgtcttttccactgaatctagagcctaattcttgtgtgaaagagagattgagagggagagaagaagatttggagaggtgtgaagactaggatcttgggtgagcatttggaatatcttgtgggctgtcatctcggtgcttattactcttggagatgatctcctagacggttaggtgtcacccacgagaatccgttgcatattgtggatgtcccgggtaagtttgtgaaggatttcctctcctccaaaagggaacgaggtaagttagtgaagttcttgtgctgagattctagaggctttccaagtagagcaacccacacttgtggtggatttctagaagtaggttgagttggatcttggtggtcactcaattctagaaatttgcctaggggtgtttggggttgaaggctgtggatttcctctggggtttttgcacaagtgaggcaaggagttaatcgagacccagctcttggagctcctcaacggagagtaggatcacaagatccgaacttcgggaaaaaatcgctcttgtgatgtttctgtggatgattctgtgatatatcctctgcttagaatacctgtgcaccatcttgtgaagattggcttagtctcttgtttcgaaatttaaatttcatctctgttctgttacccggaagtttctgtcttagaacaccggaagttccggagttccttaccaggaagttccgggtctgtttgaattttaccgccgcgatttgtttttaagttttcaggaacagcctattcacccccctccccgcctctagtcttcatcagcgctgttcaggctccacatggctacaaatacaatttttgtgggacaaaaccttggagctagaaatacgatttttttaggatggaggtagtaaaaaagaagacgttccattttaaggagaaaacaagaccaaccagttaataggcttgctaaagccacttggtcactgttcctagtacaagaactcttggcgaatgggctgggtttagtacctgcttctcttcttattcccaatattttaggtcctaaatatcagcatgagtgagaatttggttacatctacattagcaaagttctctgttgtgtcagttaatccagcgtgcatatcagtgtagtaatgtgtacatcttattgtaaaggtgcaatatcttgattctcaaaaatttccacttgctatatttgatgcagctttgcaaaattgattcatgtgtaaggctagagaggtggtcggctgctcatgtgtcgtcgtgaaggtaaagtatcgattccgttattgtacaaaggagaatctcattccgattatataaaatctaacattttcgttttgctttcctctaaccaggactatggtgaaggaatcagaatgctttaacatcggaatatgtcaagtcacactagggacagctctcaagtatctggagttttcaagatgctttttgtccctcatttaaatttgtatgaagtcttggaaatgattagattatgaaaaattttcatctctgaggatgccaactgaagatcttgtttctggtgttcttggcatcatggtctaattaccagaaatgaagatcaatataatttttctcggtgttatgcaagcataatccctttctaccggcaaaagttactacaacgaatcattaaaattgactttgcacgatcattaaaatttcatgcttgagcttgcatgatctattgtgctaaattgtgttctgatattgtgagcactacaatgttgacaaatccgtgttgatcactacaatgttaacaatatctgatgtactgatatctgatcactatgtgtgttttcccacatgttcagtttcagttggtttggtgtgtaaaactgattgcatatggtccgactataattgactgaaagatacattgatttggaaatcacaacgagatctgtagtgaatcatttcacatgaagcagcaaactgctggaaattttgcatcggttggctaatacctaccagccatctcaaattctctatgatatttgatatcttccctctgtcatattttgggacggaggatcccttatattctgggacgaaggaaatattatgggacggaggaaggacatatgcaaatagaatttcagttgtttcaaactgcattatgtgctaacaacgaattcttaatttctcattcacctgttaaaaaaacagcatccagaacagcacagcaggtcaatcactgagctgattcgcatagactgaagcttatttaacaggtcgaaaccagatacaactgattgtagtcatagctcaaagcacaccatcatattggatcagtacatacaaagcgtgcgtattgacaccgtctaattggattagtacattcgaagtggataagtaggctttggttcaccagtccatgcctaaattccttgaggtaaacagatcttcaacgtagagaattactggtccagatgctctgatgaaagtctgcatttgaacctttgccgaattttctgcagggggcaaaacgaaacagaggagcaaaatctcccaaggtcagaataatgtcataacatggttagaaaaactaatatatcttgttaatttgataactcatctattacattttctactcttttctggcacttgattagttcatatacacagatacactggataccaatatgtgtatttacgtattactagctctcttgtagcaaacagttatgcaaaaataacaaactatgtactttctaagatatcccaaaaacgatgtgatgcaatcatgtcaaccaaaaaatatatatgagttgcttgctgtcagcatggaagtttagagaaatcagacccgtcactcaccatcttcattcaatttcttcaggagctgcgattttgagggaagggcgtacattccagcagcaacggctttccttatggcccacccatggtgaggagcaaaaacctgagcataagccttagatgctgcatcccttaaggagttgcccctgaaattagtatgcaaacgttttggtcacatttactgaacatgcatccaagagtaccaactttagaataactgagaaggaaccaacaccaaaattcagtttatgactttaacttactctgtaaccagtatttgctcaaacagaattttaaccatatcaatcccacgcttaaccctcagcatattcctagtatggctcccagcttgcctgacggtgcccttctgaatgtccaactcaaccatctcaggcaattttgagattgacttggatgcctccagcaaatcatcaacctgcactcaattgagaggaactaaatcagacaacacacaacaaaagctcagaaaagcaagttatagttaaacaggttactcaagggatgcctagtgggggaaccaaggcggcattatcatcaattttgcagaagtacaaggtcctgataaacagaaaaactggtttgctaaatagtaaacttacgagtaactgctatactggataggattctaacacaaactactaagcatccaccaagtcaaagtcatcgcaacacggattaggtgatctgatcctgatgcgtgcagacattcctacctgacacttgatctagccatctaggtgataatttcagatcatttcgacataatcacctagcattaagcagctcagattcaggtgatcccctcaatctagccacaaccatgcagactacttcctccgtttcatattataagactttctagcattgtccacattcatatatatatatatatatatatatatgtgtgtgtgtgtgtgtgtgtgtgtgtgtgtgttaatgaatcatacatgtgtgcctagattcaatctatatgaatgtgggcaatgctagaaagtcttataacctgaaacggaggtagtagcaaacaattaatagccgacctaactcctaagcagcaaaaaaaactcatgtcaatattcagaatttggattgagtcatgtcaattcagatatatctgagttgcttgctctcagcatggaactgtactagatatgattctaacaccaactactaagcatccactaagtcaaagtcatcacaatttgggaggtgatctgatcctgatgcgtgctcacattcctacccttacagttgatctagccacccatctaggtgagaatttcagatcattttgacacaatctcctagcattaaagcagctcaagttgagataatcaatcccctcgaggtctcaacctaaccaaatccacacagactagccaacaattaagccgaggtaagcagcaaaaagaggtcaatctagtcaagcaattccgacgaaacctcgaggacaagggagagcgaagactagagagcgggggtggcggcgggggcttgccttggcgacgtagtccatctcggcgaacttgaaggcgatgccgaggcagccgaagaggacggagacgttggagcaggcgcgggcgaaggagcccacctccatggccgggccgggggcctgctgcttggccaccgcctcgagctcctcgaacgacgccgcgatccgccgcagcggcttgtccccgtcgctcgaccccatccccacctcccgctcccgcttgctccgccgctgcggctcgtcggcggcggcgtcaagctctccgcctccgggatggttggggtgggtgggtctctctctcgtgtgctttgcttttggttgtggttttacgcgtagaggtgaaggggaggaatcgagttcgctctgcagtgggccggaggaatatttgtatcgtctcggcccatcgaatgagaccgacgtgtcggctcgtcgatcctttctattcctaaacctgaacttttgcctcctctagaagaagctgaattttgctttgtccagaagaagctgaaaaccccgtattttacttcctctgaatgaagaaaaaacgaatctttgctgcattggactgaaatacctcgtgtagatcagagcgagtctgaactccaaaaaaaaaaaaaagtagagatcaaggagtctgaaactcttcggtagaacatactaggggactgtagagtgtaaacatggggctgttttggattaaaaccaaaacataccctaccaaaattttagtaactcaaatagtaaacatgaattttggtaacttaaatagtaaacatgctagtttggattggacccaaataattgatattactcatgtttaatttggtcacattcaaaaatttctcaccatactaccataactagctgggtggcccgcgcaattgcacggttagcacccaaacaaaatcatatattttttagtatgattttacttaaaatttattaaatagctatctcattgtttttaagactttgaaagactaaaccttatcatcctcgtgttttcaattatatagtttttagaagtcacaccagctgccccttatgtcatctccttctttatttgcttgcttgcttgatctaccattattcctattcattcttcttcgaacctttaaaaattggattttacagttttagagcttattgtcacgttgggtttcatttttataatttctagatgtcccgttaaacgttgccattatactcctctacggcctgtccactgtctcttctctttattgtcattgagattttaaaaatcgaacataattatcgtttgggttcatttttactttctaaaagtcctgccaaaccgtcagtagctttgccattatactcctctacagctcgcccgctgcctcccttctttattgtgattgaaattttaaaattgaacatgattattattggtgtttttttactttttagaagttccgaaactttaaatattggacttgtaatttcattttttataacttttagaagtcatatcaaacgatgccactatgcccctctacagcccgtccgccgcttactctctattgtcattgtgattctaaaaatcgaacataactatcgttgaaattcattttttgtattctagaagtcccgtcaaccgtcggtggctctgcaactatactcttatacaccccgcccactgcttatcctttttattgtcattgagattttaaaaatcgaatagaagtcccggcaaccgccttactcgtttgcttcacaacctgcctgacgtctttccttttaattgtcattaggattctatttggtgtttcattaataatttttatatgtcgtatcaaccaccaccactctactcctttataggcatgttacttaatttatctcgtcatttgttttagatggtcttttctttcaataatatttatttttatcacaaattttagttatttataaattgtatttctaactgaaatcttatttttctttttctaatttcagattttttttaaaaaatagttaatacagtattgtgttcttttatttattttttattttttttaattttcaatttcagttgtttcaaaattatattcctacttgaactctcttttaatttttctaattttggatattattttatttttttaattctaaattttaattaatctcatattgggttattatatggattcttctttcagtattgcttatttttaattcctaattttaactaattttaaattgtattcctacttgaactcttcttttactttatttttctaattttggatttatttatttttattctgaattttaattaatctcatattgggttcttatatggactcttttttttaatattccttatttttaattcttaatttcagctattttaaaattgtatttctacttgaactctcctttcctttttaattttggatttattgggttcctatatagactcctctttccatattgcttttggactctcctttccttttctaattttggattttattttatttttattttgaattttgattaatgtcgtattggcttcctatatggactcctctttccatattgcttatttttaattctgaattttagctatttttagattgtacttatacttggactctccttttcttttttctttttctccgattaatgtgggaatttctagcccccacagcgaacgtgtacctcctttcaaagttgttttaataatataatagatttggcttcatattggtatcaaaccaaacattaattttgctctatcaaaaaaattggtagcgtcgaaatttatctaggttatggcactaccaatgaattggtagggtaaagagcactaccaataaattggtagggtaaagaaccaggcgcatcttgcaaatcataatcggttcatctcatcaaatctactagcgtagcgtagcagtttgactcttgaggaagctgcatcctttaggcctctcatagtgcaagctatggggcccgtacccccagcccaaaaaattggtcctaagacacccatcccacagtgcaagcacccatggcttaatcggatagaggcactggtaaagggtaccaagcccacagtgggcgtgaccctagcttccggaccggtggagcgaacgaaaatttatttcctccacctaccccttccaccccttcctctctcgcgtgagacttctcctctcctcgagtactactcttctcctctcacgccgggaggcgacggcgctagcagttgccgcctcgttgtcgtggtggcggcgccgccgccttgcctccttcccctccctctctatccctcgccgcacctccttctcctccctcaccgcgacgccgacgggaagccgcggcgaggaggcgtccccggcggcggcggctggcgcggtggcggaggctcgaccgggggacgcctccaccgcggcgacctcgccgagggagacctcgagcagccgccgttgccgcgaggaggagcgagtgggctgggccggcggcggatctggcggacgcggcgctcgtcggcgtgaggagcggcgagtgattcgagacagcggcgaggaggagtccccgagaaggcaccggcgcaacggttcccctccctaagaagaggcatggcggaagcggtgtggtagaagaggcggcgcggcctcctcctcccacgccgcggcggcacggcctcctccccgtcgaccgtgccgctgatcctgaccccaccggcgccgccgcggtcagctccgtcatcgatcgacgcggcggcggacggatccgcctttcccgacggcgggggcggcgagggcggcgggaacagacggcagcgagggcgaagcgggtacgggaacagtggactcttgtgtgattcctctctgtgttcttgtgtgattcctctcctctttgtgttcttgggtgattcatcttgtgtgatttctcttgtgttcttgtgtgattcctctcgtgttcttgtgtgattggcaacgaaatcggtggcgggaagaggagatttgggcgtgacttcttactgatttttcgagggcgaataggggatttcgtcaggggaatctcgcacaagagcatcgggcagcgagggaacaactcccacagcgcacgcgcctcacatcgattcctccgcgcgtcctcttttccaggcgaggttttgcgcccccagtttaggcacaagcgccctagctgagacgcgggtctaagcaatacggcagcaaaaatccgacatggcgcgactaaggcacagtccaggtcgacacactgtgaggccttacaacgtcgtcgccaatttcaccaccgacatgagcaagagcagaggcattcggttccagttccatgggaaatcttggtttcgttttgatcacatgatcccaccacaacgttaactcgtaaagctacacatttttacgtcttaatggattgatttccttgtgctatctcacgaattacagcactcttcctgtcccaatgttcctcacatttacgcgaattacagcattcttctttctagagtacagtcgatggaatcatggaaatttgatacaacaaattttcaaccggtcagggctcccagcgcattgagccacccacacaagcattcgcacgcatcaaacaaaaagcttgatgcataaaaagcgaataggtaaaacctctagtcaagatggaaagattcatagtttatctatgaagtatttttaggagaaagagtaagatttacatgtcaatcaacacacaccggattttggagttatacgagagagtcagatttacatgtcaatcaccacacatccgcgattacagcggatcataagactggggcgacaaatatcacatcatcatcctcaacatagaaccaatggaccaatccaatcagatgaaaaaagccacaacaaaacaacaaatcaagaactgcaaagcgaagaacatcgaagagcgcgaacgcattggctattgagtcagatctgataacatgtcaatcagcacaggcccggaatccggatcctaagactggggcgacaaatatcatatcatcacgctcctaataacgcatccgtgcatcagaaaattggaagtcgataagccaacaaaaagcagttgaaatatggaggaaatcttctgagaaaagaaggaaatgaagaggcgagaaagaatcaacagattcgcatcagagaagaacaacggcgtcggcaaagcacttcggcgaggagttggccgccgcggctgcatttatgggagggcaagagagagctagggtttcgttggatgggctgaaattttgtttgggcctcttgaccacgtaaggctggaactgggctttcgttagccttttagctagtacggagttgatgatagcttagtaaatataaatattcaccatccaaccaaaagacacacacatcaaactatccctataaaaattcggctaaattatttaagaaaaaaatatgtattttaatgtagggctataactttgtagacaaacggtacacgttatagggcttgttcgcttgagctacattgcacccagttaagactgtggctagcggtagtacaactttttctgtagatgttgtagttgtacagccacaactatgtccaccgaacacacccatagtgtttgatcggttgagttattgctataagccatataaaaattgaacaaagcgtctaatttgatttatggataataaattttatatatgtgttattagggatttaataggcaaggttggaaaatagaatacgatgaaaaataactcaaaataaacttcaaaatttagctgaaaaattcaaatttccgtttcggctaataagccaatcagatgatgagagctgattaatccatattgctagatggcaattgattcaataataatctctagcaatatcatctttgaatctttgatgatcattctgttttacacttcttggaacatactacagttgcagtcttgcggatcaccttgtttttcactagactctacttcatcttcattcacaagttcaacatacattgcaaaatcatatatacatttcatatacaactactttacaaattacaactaaattgacgaaagaagggggagaaaatggtaccatattttagtacgagtcaccaacggtgacaccaaataataatgtcaatagttatgtacaaatcatgcaactaatccagcttaattctaccatgatcaaatgcatgtacactcgccgctaattaaaactctggctaattaagctgcctgcttctgcagctcgatctccttgtcgagcatctccatgaactcttcgtcggtggccttgagcatgtccggcagcggcagcgagacgccggcgtcggcggcggcgcggtggcgcggcgcgatccgcttgtcgaggctgaaggtgaagtactgcgggaacgccttgatgtcgtggacgccgccgcccatctcggcgacgaggtactcgaacttgggcttgtagttgcgctcgatgctgaaggtgaagagcgccgggcagcggagcaccatggcgacggcgtcgtcgcggtgcatgccgagccccgcgaggaagtccagcttggggatcatggtgcgctcgacgctggagacgaggaggatggggtcctggaaggcgagggcgcgggcgtcgcggaagccgaggcggcggaggtagaggagcgccgggcggagctggtcgcggacgctgcaggcgaggacgcgggggcacttgacgacgacgcggcggtaggcggtgtccgggatgccgaggtcgtcggtgaggaaggcgaagaccgggcggaggtcggcgcggacgctggcggtgagcagcgacgggcacatgccgaacacgcggccgaggtccttgaagtggagcccccgcgactggaggaacgtcaccacggcgtggatggactccggcgccgcgtcgcggagcgccgggttcagcgccagcgcgcgcccgtagtccacccccatcagctcaaggctcaggatcttgtccttcacccgcgacggcagctcgggcaggtgcagcgacagcgccgccgccggcgccgacgccgacgccgccgtcggcgccggcgccggcgtggcggtgtagggcttggaggaggaggaggaggggagggagtggggcttggcgacggggagggaggtggaggcgtagaagctgcagagcggcattgctgcgcgggcgacctcgtcgtcgtcttccctccgattcgagcagagaagaagagagtgtgaagtggcatgtctcatccgcttctttatctggaggttggtgctgacgtggcactctgggcggcgctcattggatggtcggattcgggcaagaggaaaagatcacacaatgcatggaagcagaggccctcaggcccacaagccaggaaccgagcctgtttgcagtaataatcctgtaggaattcaaacatgttcatgcgttcaaattttacatacaagcaaaaaaaatagtaagaaataaaatcaatcgtaataaactttaatggattggtaagcttaacttgcacatgcgacatgttcatgtcaatctggggacaacttcattgaatcgactctttcagaataaatacagtactatgatattatcgtttggacaccacatcaaattgccggtttctgagcaacaactatataggtcacacggtgtaactaacatggattattaattagccggtttatcctgtctgatcatgggcagcgcaacatactggggatgatgtccaacccaacataattcagaaagaattacatgtaaatacgctcctcgatgtgccaaattggatctctggcgaatgttacttatgattgagaagctgtgtctttatttttttttctttttgattcggataagctgtgaaattactggtatagtattgctgcaaacttgggtgattagtaaaggctagcatgcgtggaagggcctcaaatcagcatttcccatggcttctgctcactgatgcccttctggcgagcttgtggttaggagttacatgatcatcctgcggtacacagatgatgagtttcgtcagtaaatttcagggccaaccaaatatggcatagacatgcatcaatataaactctaaattattattttgcgtcacaactcataagccagtatgactatctgttgccacaaacttccaaattttcatggtgaatttaaaagagggatgagcacgatcgaattttaccatatataacgaggctgcggaatcagatcgcatagcatgattttgagcttgaccaagagattggaatgtgtcaagtgcatcaactgttaattgccagccagaaagtggtgaactacttgagcttgattcagtgttgctacagcaagctgctgccacagttccatttacccatgggcagtaactgttgtgatgcttaacaggatcaaattctggaagtcctgattcaaaatcattttctccatttgttgctcctgagaaacaaataacaagattgagaagaatagaacctggatagaagaaaacagagatctaactaaagagaaaaagatcaatcgatgtagaatctcatccattccattggataaaaaaaaaattgtccagggagcaatcagtataaaagccatccatcctatttgaaacaaggacgcaatgcaaaactaccaatataacgaggatcaatacaactgtgctggaaatgaaatctagtcttcatcaagtatttgaatcttctgtgaaatgtataaaatatttgaatctggattacaaaaccagtcacgttgcaaaatccacagaacagaatatcacaagtcaagaataagtaccaacttcaaagaaagcatagctagcaagcagcaagtatctatgacaaatactgcattgtactagggaaaagaacatagcacgagacccacagaaaatggtgcaaaggacacattgcaaatatacacttagtttatatgtaacaaggaaaaaggttgatcataagtacctaatccattctgagggtcataatctaaccccattggcacatcaccagcgatcaatagtttgccagcctgtgtcacttcctctttagatacatccaaaccggtctgcatccctgcattgcaagaaagagaaggatgcatcctgcttgcatgaccaacagcatgccctcctatcttttctccactctcaacagaatcagctttagtggaaccataaatttttgagccactgtcagcttggccgactgactgagacaccatatcttggctatctccatgaggttcttgccgatcaacttcgtcaggtacaaactcatccattagtccaggtccaggaactgattcaccagtatgacccatcgtctctgttagctcagtattaggttctgcatcacctacaacactttcagccctttgcaaagaaacatcaattccatgaatttcagcttcatggctagcacccatgccaacactaccaccgctaattcctacactaagttgatcccttgcaaaagcaggggctgttactgcatcaaggacttcctccccttcatttgtactgcttcctcctatttcccttccatcacttccagaagcaggctgtacacatgcactttgctgtgcttggttactatagttcaggcccaagacatcatccatttcaatatttctgtgtgcactagatgagggcatgtcaatatcattaccatcacctggatagtattcaacgctctccatggagtcttcatcagcactatgaacagtatccattgcagctacagaagattccctcatagaatctctgtcaacagcggctagacctgcagctctagcatgactgaatttaccagcatccgcatcaggatcaaagcaaaagtttctactgggaccagctccagaagaagatggaagataggaaccaaatagatcaaacccacgtgaccttttattcgggatgtccgaatcttgcgcagcatcatcaacttcctcaccatcacgatctatcacacttccttctatgctatcagcatgctgaagcctgtcctgtggcttgtcaactgtgctcccaccttcctcatggttgcgcttccttgagcttggacctcgggactcgtatgaagttgcatgatcaccaacttcacttccagtaggttgtccaatcatcagatctcttcccaatcctccgttgaaacgctcagatgcaattggtatagaagattgaattgatggtaatcctccagccattgttagattcaggtccactccagcatttgataatgatttaccctcatttgttgcttcttcatcacgcccttcagcaggatctctttccatcccatcagtaacccattcattgatcccactggcagcgctaattccacgtgtcagagcaagcttcttgcctgtttcaggtgcatcaatgttatttggactaaaacgacaaggacgtgacacagatctaaagtcccagatcttgactgtagagccacaaaagctacaatctaacaaaggtgatctcatgctacatccagagtctttgagtggccttttgccttttcctttatcttttttggctgacccagagaatgaatttttttgatgttcagcaaaacggggaaaaaatggttccaccgaatctgcatttttagctgagtgggttgaattttcttcacagtcttgaacatttggaagccacctaggctcccatccacaaaggcttataagcttcctagcctagaaagcaaaagcaaatcagaagttatatcaacgaaagctaaagtctccaaagtcattgtaaactaataatgccaaaaccaagacatcacatgagaacatggaagaaaagtaaacatacttttgagtagctacaagaggaatcttgctggatatcaattcctgttgtgctctctgctttgtaactaagctctccagataaaaaggtaattgattgggataataagcggtcaatctgggaactcctggtcagcctcatgtgctcaattgctgatgaagcaatcactggaagggaagtaaactgcagaagtccatcacatcgatctttaaaacccccaataagggctgattgtgttaggtggagctgcaccaagctgtcagcacagctattgcctctccagggacagctattatggtgtgatgcatcaagctgctcggcaaaggcttctccagcatttgaaactaatacagaacatagaaagaaaggtttcatagctgagcaaaattcagtttgcaaagggagaggtaccaatttattttccagcctagcacaatggtgagatataagtaacatcagtcagacttgttatgcagtagaatactaagcatagagttttattgatgatgcgtaatgacattttacttcctttgttgacataatgttgggtgttaattcaagatatgacttagttgtaaagatgagattcatgcaacaaaagaaaagatgaatccttgttttccgctgtaaccccccaagttccttatgtcatctgaaacttgttattttcttttatgccaatagatcagattttctcaccctccctttggcactccagttacgtgagcaagccatttagagagcatggaaaagactagaatgcccttgatctcttctccctgtctgatgattggcttgagggcaaatcgacgaagaacgtagtgttgtcctttgaactccacaagatataccgacttctccacagtatggctcgacagcaaagaacccacaaaccagttttcccaccatgagctagtgctcagtgagtaacgctacttggggacacatccactaatatggagacacatacaaactgagatggggagaaattacgaccaaacaattcgtcaataaggagacatcaatttatcttgggacatgaacagatgcgtcaaataggagacactaatttacagagaatcacctcgtaataaagtaaatgcagccactgaatgcatgtaatcaaattacaatcaatgaaattatagcaagggtagtggcatggccaaggagagaaaatgctgcatcagccatgagctcagggccaagcagatcgacaacaaccacgtgaaaccaaagaagatgagatcgagatactcgagctgtactctacgctcttgaaatggacctgatgcacagcaggagacaagttgaaccatgtgcccaccttaatttgctaaccatacgcctcaagctcctcccctgctccccgctggaatagcaccaactggcgatccacatggagaagggccagcagagtgatgcgggttgaggcagcggtcagcggagaaaagcagaggaggaagaggaagaataataagagagaggaatagaagttgacacttgacaggtaggccaggggtagatcggggattttatcaaaatactgacaagccttccacccctaacagtagctttcgacctgaggtgacggcagtggcacatagaagatgtaaaattccataccatggcacataaaggaacagtcaaatttggtaggcaaataaggaagcccataaactatgaacggcaaataaataattctcaaaaaaaattcacaaaggcaatccgattttttatgaccatcacaattcacaagttttcaactattgttgattagttctgcacaaagaattttataatggtattatttgactacagtgaatggcattcacatcagcaaatgcacaaaccagaaagcataaatgtgttgctagtcacggcatggttaaggcattacatcataactaaaccatgtgaattgtaataagacatacaacttattttcagaagtttatgctctctaattaggtatgggcatttaaaataaaaatgttgtatgatttgttttccaccattaaaagatgccgaagcctgaagaaacttggtaaaccacacataatatcccccagaaacttttcaaactaacatattgtctacaaaagcttagttactgaaaacataccttcagctggagaccaggatgtcaatgtactgaatatgagatgtgcaccacatgactcgcattcaattttgtccatgtcaacgttaacccaacctctccgagcacaagccaaagaactagcagcctgcaatacatgtttttcttaaagtgtggtcaaatgagtatagaatattcctcaaaaataaatactgcagatggaaaccggaatttcttttgaacctaatatatacaataaaaaaaactgcatttccaacaagcacaagagacatgaaccagagtcaaatttcaatatatccaagagcctcaacgttccgcttatacttattataagcaaacagcttattagtgattaaaaaataatttatgggtaaaacttttatatgtgtaatcttagcgctttaaaagcagatgctggaaaataaactaagatgaaaaaaacccaatatgaactctaaaattatgttttaaaattcaaattttcgcttatgcttataagctgaagggctaaagatggggttgcaagcaacaaaattattattataaatgacacgaatgaagaaaagtctatgcatataagttgatttaccatgatcataatttcactataatacacaataacaaaaaaaaaagaaagcaaaaacatcaccctcaaagtatcggccatctgtgtcttcctaccattaacaacagaagtaagttatactaatagctctggtgagggaataaataaccttaggcctagaagcccaagttgtaggcttatatgttgccagtcgacgaagtaagtctccgcgttcccatggcctacatgacggtgcagaatccaaagcagttccagtggcatcgaaactatgagaaggctgatgggcatgcggagcaacatgtgatgaggaatcaactctggaagcttgtctgctacccgaccaatctatgctggcaacattagcttgcatagcaggtgacgagggtcctgcagaactgagaaacataacaaaaacatgagtttaagtgtgcccatgcaaggctcaagagctcccggagttgcagttctctagtcatccaatacccgcccaccatttccagttcataagttttccagctatatatttggaattagaattcaagcaactctgtcatcctactttccatgaatgagacagtgtgttaaatcaactcaccaaaaatcgcataaaaatatctcgtcggatagcaaaaccacgatataataaatcgcctgatctgcagctcgcttccgtcctagggtttaaccaaacatccacactctaccgcacctccttacgctcaccgtacacaagatcaaaattttccaactatacatttggaattggcattcaagcaactcctacttaccatgaatgagacagcgcgctaaatcaactcaccaaatatcgcccggtttccacctagagggatatatatctcgcccgagagcaaaaccgtgatggatgcaggccagtagctcgctcccgccctagggtttaaccaaacatctacactcaccgcctcactacgctcgccgtacacaagaccaaaatcccttcgagcaatcgccgccccagtaacaaatccaacgaacacctcgagaacccaaccacgacacaatcgatccaagcaccgagagcccgattcaccgaccacgcccaccgcgacccctgcgaatctaccgccaaaaatgagcgcccccccgcgatcgtaccttgcaaccggcgtaggaggcggctcggccgccgcccccgacgagctcctcacctcctcccgcatctcccctcccctctcctctcctcacctctccccctcgccgcgccgcgtcgccgcccctctcctcctcgccgcggcgtaattgggagagaaaaaaaaaattccccgaccgcgacgcgcagaggcagagttgggttccccggccgttacagccgttagccctcgccgtcaatcgcaaaccctcacacctcacgccgtcacttagatgggccgggctttaatcgagatcacatgggcccaaacgttgaggaggcccagattccgcggctcgcttcgtcgtctcgtctagctccgtctcctctcgcgaagtctcctcgggccattctctcgccggattcggatcccgcggcggcgagccgactcggcggggggatttgccggcgggatgatggaggaggcgagcacgtcggcgtccggtggtgggggggccgccgcgaacggcgggcagcggggcttcccgccggcgagatcgggaggtgagtccgtacacgtagcttagctctgacgacgggctcgcttcgatctggcgtcgttgaggtcataggctggaagtgttcatgatacttacatatgaattttggcgagcgtcatttagcatggtgttaatcggcggaggggaaatgaatagctatctctatcgttcctcctaaaccatgtaaatatggataattgaagcattttaggcagtattttgtatttatttgcgcttgctgaacttcgcatagatgatgaactatattagatgatgagagaatgatttgttttacagactacagatttaattttatttgcttctttattatatatgcaaatcctactttattacatggtcatacagttaatcgtgttggttttgcagtgttctataggttcactcagcagaacctcccagcttggaagccggcaatgacaccaggatgtgtaagttggcattgactcaactacatgctttctacagaatttaatttgttgtttaatgtatataatatggtattaccttcgttgtttcaggtgataactattttcttgatgatcggagttacttttgttcctgttgggcttgtttgccttcatgcttcaaatcatgtaaattgtttttcatttctgtccggtggatgttgaactaccatcagttggtggatcatactaatacacactaagttctccatattctgcgtgtgcaggttgcagaaattgctcaccgttatgatattgattgtgtacctaatgcttacaaaagaaataggcaggcgtatattaaagatagctcgatttcaaagaactgcactcaagaagtgaaggtattcctgtgagatctaacatcccttttttccataatgatttttctctccagttttatttgtattataattatctagggtttttttggcgcacagattacatcatgttgctgtttcttcctgtccatatcatgtgtaattgggccagaaattcatagtgtgtatctttgcaggttaaataccttatgagagcaccaatttatgtgtattatgaactcgacaacttctaccagaatcatcgcaggtgatgaactgatgatacaactttattcaatttcctgtcattgtatcgatgtatctggctctctctttctgaaaaagaatctctgtgtattattaacgaacaatggaatttgttgatgctgacaggtatgtcaaaagtagaagtgataagcaactacgctatgggcagaagtacacacatagttcatgtgatcctattgaaaggaatgatggccttccaattgttccatgtggcttgattgcctggagcttgttcaatgacacttatggatttacctgtggatccacggaaataaaggtcaacaggaagaatatttcatggaaaagtgaccgggagcataagtttggcaaggatgtatatccttttaactttcagaatggatccttaattgggggaggaaaacttgaccctgctttaccagtgagtacttgtatatctcaattattgtttataacttaatcatgcacagatttttttttttggtttgtcattagcaaaacacttgtttctctgccagctgaaccagcaggaagatcttatagtgtggatgcgtacggctgctcttccccaatttcgaaagctctatggtgtcattgaagaggatctacaggctgatgaaatcattacgatgcacatagcaaacaattacaatacctacagttttggcggcaagaaaagcctaattcttacaacatcaacctggctaggtggcaagaatgactttcttggatacgcatatcttatcactggctccttgagccttttcttaaccattctctttgctctgattcacgtgaaaaatccaaggtaattattaaggtttactttttaagtttatcctgtatgaatttatggtgttaccatctttctttcggagccaggcaataaatattcctcttgatctttttttttatttttcattaataacttaacttcctctgcacatacgtctggagtgttctgtaatctgtacatgcgcacatcaataaacaaaaatctccaattgattgctgtataattctacgtgtgttgctgtaaactttagtttgtctattaactagacttggtcctcatgttttgaataatgtgcaggccacacggtgatgccaattacctatcatggaataggccaaacagcaatagctaagctgcctacataactgtacgatatgtaaggtaaacatttgacaaatacagtgtagttgtttccctgtaaaaccaagactattcttctttcatatgataacatagagttcagactgaatttcgtggcagtgcaaatagaacaaccaattttgtcattgccttttcttttaagaatgcacacaatttgtgcatttgaaaagaactggtataattggcagtttttagttcatccaaacatttggtatgttgggataataaagtgctgatgaggattgactggcttcttcatgcattttaattggctctctacatgctcatgaagaaaacaaactaacaagaattgtatgtgcgtgtgccatactatttgagtgaccatgtatagtataaatgcgtttgtcataaggtttctgccactactgcccatatcttatttccatcgtccagtctaaccattgtgaagataaaagctgacttggatttcaagagatggacaagttcaatttaacagttgtgcaggtccgagaatttcctcagttcatgagcttcactatgcaagaagaaaggtccatcttatcccaatctctctcatcaacttttctgtttttcttctgggagatgtgtgagctttctcacgtcatacttgcctgaactatggaagttggcgattctaccaaggtgaaggttacattttgcaggtgcataagcatcaatgggcgacaccaatgcctcgactggttcattcattgacgacatgatgtcatacttttgaactgacttgctgctcatatgacgagctgttataatctcctttgttcatatgacctttacgtgtgaacaaatatgctgtgctggtttatagctgatttgacagacaactttgctttagtataagtagaaacctctcatgctcgagcatcattttcaacaaagctatttcattgtcttcccttattcctaatggtctatgacttgtctatatttatagcatcgttttttttttcatcgaagaaaccatcaaattttccgctgctctttttttttaaatttttttccttatctttgcttcttgtttgtactataaaatcaccaggcttgtttcttaaccagctaaaaatgttgtgttttcacctaaaacattttttcattgaaaaaaccatcaaattttctgctgctcattttttattttttttccttatctttgcttcttgttttgtactataaaatcaccagtcttgtttcttaaccagctaaaatgttgtgttttcacctaaaacaaggtagaacatatttataatccattcaaggactataattgtttagaatctgttgcagtctgtcgatgtttcgacatatatacataggataaatttgctgttcgatcatgactattaggctgtgttcattcctcgtggttcccagttaatctgcagtgcacgtaaaatgaagctatccattagcacgtgattaattaagtactagtttttttaaaaaaatgaatcaatatggtttttttaaaaaaaaaaacaactttcgtatagaaaattttcgcaaaaagcacaccattcaccccggacctcccctgtgaaaccaagtgatcttgggattcgacgacaacatgttcggcgatcacattgacaccaaatcgttgatgtgtcacgtcaagctccgagcgcttgtcaccgacgcgccaaatctatccttcctcacgctgaagctgggaggaggagacgagaggatcaaggcgtcgtctccggcatcgccaccatggacaggaatttgatcgtgttctacctcaacttcaccaagaggatcgttggcgtcaacctcatctacgacaccatcgacgagtccctctccatgatcccgatgttatcgagccacaaagcgacgatccataccactcaaatgctcgtcacgcgccgccgtaccaccaccgccattgatgatgatgaaggggactacgctctaacgtatctgggcaaaatggcagtggaagaaaaacccgcggacaagccgggggacatgccggtgatcagctggccagatgttgtctaccaatggcggccattgtcgtcgctcccgtcgtggaagatgatcaagagggccaaaccttcccggcgagtggatggtcgataagtggttctacgttgacacggccttcatgtctgatgatggccacgccttctgggtggatctcatgtggggtatcctgtttgaggacttttacggaagtatatatttgtagtatatgaaagggtagatttggtattgttaaaaatctgaaaggggttgtttagtcatttttaattgagattttttccaacaggatttattttccatcggtggtatttttcggatctcgtcatccgttcgtgatatcaatccagtctaccccctccgtcccaaaaaaaacccaatcctgagtttgaacttggagttcaaacccaggattgggtttttttttatggagggagtacgcggtacgccgggtagtcggcagctgccttcacgttgtctcgcgtgtggctcctcgtacgcaacgacgtcgtcgccgccgccggagccggaagcgacagtcttcgccaggagcaaagccaccgtactgccattgttgtgcgtagaactatcgccgccgtcgggcccagcagcagctgtccgcttccaggaacttgcttccgtcagtctctagcgatataagttctcttgagtgttaagcctgagcccgtgacaagatataactactgtatatgtgcattagacttgtttgatgattcaggcttcatccgcttcaatgaaaatggatacacaagcaataattaaacctatctagctctatctaattagttcaactcgaagtaattaagttaacaagtctaattctctacaaacacttgtgaattggtttacttgtgaacttttatggtggtcaaggtcagacaagagtccttgtctagtagaactattaatttgtgatttgtgcattacttatagtctatcgccgccgccaggcttccctgccctgctgctgccgcaatgccgcatgccgccctgctgcttccacctaccaccgccccgctgcccttgctgctgcgagctatcgcagctgcgcgcctatggcacggtcccccagtggcggctttgactgggcgcctatcgatcagatctgactaagtgaggaaatacgaatttataaaattacccccacgcaaatagatgaaaagacaaatatactctatttaatttatactgcagaataattttgagaaagatcagattaatttacaccgttagatcaaatatactggtagtatatacttgcagtacaatataccgtaaaatttctcatcatgttttgccgctgcgacgacctcctctcctcctccaacgacgtcgaaccggtacacttggactccatagatctaccgccagagccaccaagtgtcatggcttgcgatttcacaagctatctccctcctactcttgccgctgtccctcacgccagttgattgctatataattctaggtgtgttattgtatttgtatatgttatagactttagtttgtctattaatatgcagaccgcgatttagagttaagaaagagggtttcgaggccgacaattttgtctttgccttttcatttttttttaaagaaaatgcacacagtttgtgcgtatgcaaagaactagtataagtagcagtgttgagttcatccaaacatttggtggaagtgctgatgaagattgactggcttcttcgtgcattctaacaagaattgtacatgtgcgagtgccatactattttagtgatcgcgtatgaatgtgtgttcttcattgcgaagatgatagttgacttggatttcaagagaaggacacgaacaatttgacaattgtgcgggtccgagaattcatgaacttcactggtcattactaagcgagaagaaagctccgtatatacttactacctccgtcccaaaatatttgacgccgttgaattttttaaaaatgtttgacagttcgtcttattcaaaaaatttaagtaattgttaattctttttctatcatttgatttattgttaaatatacttttatgtatacatatagttttacacatatcacaaaagtttttgaataaaacgaacggtcaaaaatgtttaaaaaagtcaacggtgtcaaacatttagggaaggagggagtatcctaacctttctcatcaagttattatctgttttctactcgtatttgaaaaagtgtgtgagcttgctcacttcaaactactaatacttgattggattgttgtataattccatgtgtggaagcgtgaagatcacatatcgcaggtgcagagtaagcatcaatcggtgacaccaacgcctcaactggttcattcaatattgtcgacatgatgctatgatgccatacttttgaactgacttgctgctcatatgacgagctcttacgatctcctttaattgttcaaatgaccttcacatgtgaacaataattatgttgtacaccctccgtactatgaaaaacaaatttctatctataaatctatatttatattcagattcataattagaatttttttagacgagagagtactgatttatagctgatttgacagacaaccttgctttagtcatgataagtagaaacctcttatgctcgagcatcccttacaattgttggagtatttagttgtcttctcttatttctaatggtatgtgacacatttttcattaaaaaaaactatcaaatcatccgccgttaaatatgtgatccgaattttaggcccacaatatattcggattagtttcctatcaggacttcgagtctttgtctattaggactcctagatttctcctatatatatatcccttgtaagccgcatgcatgaggagggtgggacagcccaatatatctcttgcgtttgtatccaactcctcaatagtgatcattgccaatcagcgtccgtggttttttccgcaagggtttttcacgtaaaattcgtctccattgtgtatctattttcatattatctgctgctttttattattattattttccccttttctgtgcttcttgttttgtataaaatcgctatatttgtttcttcaccaactaatatgtttgtgttttcacctcggacaaggtagtagtacaatttatttatactatccagccaaggagtctaattacctgatacaaaacggagttttgtttagagcctgttgcaacctctcgatgtttaggcatctacagtatgcacataggccaaacttgccactgtaacttcatcttactgtatcatatgcatgccatgcatacagtgggaacttgtgctgaatcactggtacgttgttcaaaggtcagttgtccgtgctattcatacagtgcttgctttgagccgtacgactgtccctctgaagaatctactcctacgtactactcctacaactagggtacagtactctgttatgtcacggactcgcaggacgtgcaggatgtagggggtgtttaaaggtgggatgtcttttagttcacgctaaaattaaaaatttggttgaaattgaaataatgtgacggaaaaattgaaagtttgtgtgtgtatgaaacttttgatgtgatggaaaagttggaagtttgaagaaaaattttgcaactaaacacggcctttgtaaagttttggtgtgtcacatccaatattatatagggtatcgtatagagtgttcggacactaaaaaactaattacagaatctgtcagtaaaccgtgagacaaatttattaagcctaattaatccatcattagcaaatgtttactgtagcaccacattgtcaaatcatggagcaattaggcttaaaagattcatctcgcaaattagtcgcaatatgtgcaattagttattattttaatctatattaaatactttatatatgtgttcaaacattcgatgtgatatggtgtaaaattttgaggtaggatctaaacaaggtgtaattatggttttttgacatactcctaccgcagatcatatagttttcttcctttgtttttttgatggcaataggccggatcgggcacaggtagagcgaaaccatgtgaacaatgtgatggatgcgcaagcgcagcgcggagccaactccacataagttgtgtggccaccagagctccatcgcaacatcttttctacataattaccatccatgtatggaataattagtactaataaggagtatttatttcctatgaagatcaattttaaccatccccgctttctaacaggagaagggaaacgatatgcgtactaaactatttttataaactttttacacatatgaggtgtcacattgtgattgaatctttaaccttttattataacttctagttaactcaatcaaatgaattagatttctattagtaaaaagtttgtaagaaattttagtacatgtagcactaaaaaaagaagaagaattacacataaagtattgctactactagttattgctccctccgtcctagaatgtaagaagttttagaattagacacggttattaagaaagtatgtagaaatgagtggtggagggttgtaattggataagttttaaaagtgaatgtatgtgggagaagtgaatggtgaaaagctgtgattggttgtgaagagaatgtagatggaaaatttgttatattttatgataaattttacttcatccgtttcacaatgtaagactttatagcattgcccacattcatctagatgttaatgaatctagacatgcatatttgtttagattcattaacatatatatatatatatatatatatatatatatatatatatatatatatatatatatatatatatatatatatacacacacacacacacacacatatatatatacaaatttgaacttgttttttttagattttgattctaggtatatagcatccatacatataattagttaggtatgcaatcatggattgtgaaataaagttaattttgagttgttttgttgataggtataggtatgaatcgaattattataactaggtatatactcacaatttaaaaattatgaaaaatttaagtgattttatgcattagatatcatggtgccccatatgagtgtcatatatatatatgtgtgtgtgagcaatttaaaaaatcttatattatgaaacagatataataaaaaataaaagttattatattttaggacgtatgaagtaccatctataagcaaccagggttgtgttggttagccgcgaagtagtaggctcatagaaattgctcgaaaaagaaaagtccactctatcgtaaaaaaaggtcttaaaaaaaaggaaaaggtgcgcaataactgcaggcggcaggctctgtctaactgaattctgaaacgacatgtgcggtgtgcccttttcccagagattgtcagccgcgccgtcgtcaatgatggtgtcaattactagtcctactccgtctttttttttctttcttcattcagctcaagccacgccgttagttaaaaagcaccgaaaaggagaggttcgctactgatcgagcagctatttgacgtagcaggaacatgaaatgtcagggtcctagtggctcatggctttttttaattttttattttcaaataaattcttccaaaactcacatttaaggctgcgttcgtttgtgtgagataaggtgagaaaacacctcgttttccacatgcacgcttcccaaactactaaacggtgtgttttttgcaaaaaatttctataggaaagttgctttaaaaaatcatattaatcaatttttgaaatttaaaatagtttatactcaattaatcatgcgctaatgactcatctcgttttacgtatctttctaattttctcaatcccctatctctccaactcaccctaaatctgaacctcgtagcgaaacaatacagcacaaaacatggtagaggtttattattatgtaatggtagcgcacaacgatacaagcaatgtacctttgctcatgtaaagtcataagagcaaggttaatagtatagctaactactaacttcaatttatctatagctaatctaatagctaattcatacaatagttgcttactatactattagtatatggtcccactgtcatacacacattgtatcttggagtccgtgttgtagctggctacagatctgtagcccgctgttcttctctctcatcttttatcttattaaaatatgtttgtagctggctaatagtctgctattataactgctctaaggtcattcccaacccaatgactaggatgatgtccataacattaaataagctgccacataggatgaaaaatgatatggcaagtgaataaatgaggaaagagaaggaaaccatgtcttgcatgagacatggtttctacacaacatccaagacatcatgtgagataggtagcattaaatttaagtatggaatagtggtgtttgcattggaagagtagtgtctagtactagtttcttgatgatgtggagtttatgaaaactatgtctagtgtcttaggttgggaatggcctaagagaggcagaagtagacacaattaacctgatccggtaaaagtgtagtgcattttcgagtgacacacaactacggctacattgtgacaatgacacaaaacgatagtttgcgggacaattgggacagtaggtataacaattaaccaatatatatactccctccgtctcaatatgtagcaacctagctaggatgggattagacttgtagttctaggatgggtctaattccatcctaaattgctacatattgggacggatggagtaattacttactactattattatgtaaaaaaaatacttactactattgctatagctagtatatctagttagtatttgtacatatgtgtgtaggcgtgggagtgtgtataacggtgtatgtgtgtgcgtgtatgtgagcacatatatcatgccatgagaatcatatacattcatatgtatatctaggaagatgtaaaaccaatcgaattattcctaccatattcatatgtgtaatatcaatccatgtaaccaggaattgaacacaatcgaagatgactttgatgtcactcaaattgaacacaatgatagcttgactgtgtgttggtgtagggagattgaaagaggatgaaaatgaagaaggacgagggaatcaacaccttagatagaagagagcgatgagggatgtcaaggaagaaggagacgtcagcagcatgagagtgtctaaactcctaatggcatggtagcaactggcttgggcaatactacctctcatgtaagagattttgtccatatagttagattgaggtagtacttcatatacttaatcggaacctattatcaacatagtttgaggttaggtgggtagcggctagtgggttggaccatgttgcgagcccaacaaggaggaggtgagttggggtttagcccaaaattaacattgttgatttggaattcaataaacattttttgatatatttgaactgacttcgacttgaaaggctgtaaaaggagggaggaaaagaagcaatggagtgggggatgcactcggagggaaagaggaacatgcaagggctttaaaacatcttcacaaaaaaagatcacttatttgtttgtatttctatctgcagtgagctggcacgtttcgatgtctatcgacagtgagcttgcgtatgtttcgatgtatatctctcctggctttagctagggagattcgttctagcctggttaagctatagtgaagataaaccttgctagttgttagatttcagtagccgctaattcctgcctatatacgccaaactatcaatacccaataaacgggggcaaattatttgtggacatctatacccctacaattttctcgcgacgctggcttggcccacaaattaacattgttgatttggaatttaataaatattttctggtagatttgaactgaattcgacttgataggctctaaaagggagggaggaaaagaaacaggagagtggggaatgcactcgaagagaaagagaaacatgcaaaggcttcaaaacatcttcgcaaaaacaaatcatttattttggactttgatgcgaggtttgtttgtatttctatctatagtgagctggtacgtttcaatttctaccagtcgtgagcttgcacgtttcgatttctatcggtagtgagcttgcatacgtttcgatatatatctctcctggctttagtcggcgagattcattctaacctggttaagctacagtgaagataaatcttgctagtcgttagatttcagtagcagtcaatctgtgcctatgtatgtcaaactatcgacgaccaagaaacaggagcaaaatacttatagacatctataccctacaattttctcgcaacacaagcttgctagagatcaagagataaccgactttaaaaccagtagaccaatgttactttagcaaatgcataatctttgtctaggtagttaagactaccattgatctccacatcatgactatatatggattattaatgtagtagcatggttgcccaacttgtgtcaaagtaaatgtgccccccccccacaacacacacacacacctcaaaaaaaagtgtgtgctccacattggagtaacaagcaactacaacaatacatgcaggaatatgagcatccactgtttgcccccctggtcccttccatgcagtaacagttgtcgcatcctcgatgcgccatggagagtggcaggattggcaacccaagccaccaccacctcccgttactcgccgctaacaccgtatcctcgcagcggcaccctccccaagcatgatggcgtcaaggaagaaggagacatcaacaacatgatggtgtctgaactcctaacgacatggttgcaactggcttgggcaatactacctctgtccccataatataagaaattttgcccatatagttagactgaggtggtacttcaagcacttaatcggagcctagtatcaacatagtttgaggctaggtgggtagcggctagtgggttgggccatgttgcggacccaaaaaggaggaggtgagttggggtttggcccaaaattgacattgttgatttggaatttaataaacaattttttgatagatttgaactgaattcgacttgtcgagttataaaagggagggaggaaaagagtaagagaataggggatgcactcagagggaaagagaaacatgcaacggctttaaagcattttcacaaaaaaaagataacttgtttgtttgtatttctatctgtagtgagctggcacgtttcgatttctatcggcagcgagcttgcatacgtttcgatgtacatctctcctggctttagctggtgagatttgttccagcctggttaagctatagaaaagataaccctggctagccgttagattttagtagccattaattcctgcttatatatgccaaactatcgacggccaagaaacgggggcaaaaaatttgtgaacatccataccactataattttcttgcaacactggcttggcccaaaattaacattgatgatttggaatttaataaattttttggtagatttgaactaaattcgacttaacagactataaaagggagggaggaaaagaagcaagagagtgggggatgcactcggatagaaagaggaacatgcaaacgctttaaaatatattcgcaaaaaaaatcacttatttaggacgtgatgcaaggtttgtttgtatttctatatgcagtgagctggtacgtttcaatttctatcggtagtgagcttgcacatttcgatttctatcgacagtgagcttgtgtacgtttcgatatatatctctcatggctttagacggcgagattcgttccagcctggttaagctacaacaatgataaaccttgctagtcgttagatttcagtagcagttaattcgtgcctatgttcgccaaactatcgaaatgggagcaaaatacttacggacatctatacccctacaattttctcgcaacgcaggcttgctagagatcaaaaaattaaaaccagtagatcaatcttactttaccaaatgcataatctttgtctaggaatttaagctaggctacaattgatctccacatcataactaatggattgtgaatgtagtagcatggttgcccaacttgtgtcaaagtaaatatgtctccaaaaaaagtgtgcgctccacgttagaggaacaagcaagcactgtaatacgtgcaggaattgagcatccactgcttgcctccccccttgggtccctcccatgcagtaacagctgtcgcatcctcggagaaggggcaggatcggcaacccaacctaagtacccaacccaacccccttctcctcccgttatcccgcccgctaacgccgtagcctggcggcggcgcctccccaaggccgtccactgacaggtgacagctacaccagtgatgaggcagtgagctgccgctgccgctgccgccgccgcaggcagatctgacacacgccgcgccactccaaagcctacttccgctgctgctgcacggcacagctgcagccagcaggcagcagcagcagcagcaagcgccggcccgcgcgcgtgacgagagagagcgcgcgcgcgtgcgaggcgaggccaaaaatcacccacaaaagcaagcgaaaaacaccgcggaaaaaaagggagcctctctcgcggaacaaggcattgcccgccccggtcaccgcatttcgggatggaggcggcggtgggggacggggaaggcggtggcggcggcggcgggcgggggaagcgtgggcggggaggaggaggaggggagatggtgga

SEQ ID NO: 9109 - DNA, 69311 bp, Oryza sativa
attcctgcagcccgttcagagatctgggttgaatggtcaactgtaaaaagtacccttatcagacttagtgcaatgtattgtatactccattacatatcaaagagtaatcagtttacttgagaaaagttttgtcattgcatttaccttgtgtgatgtagctggcgatcatagtgtatgtattgggtccattttaaattattaaaattgtggacttgaagggtcaatttattttatattcttctatgtaactgattattcattaaccatctcttccttatcaggcttggtgaagcaatagacaggacattacttagtcatcttctgaagatgtttactgctcttggaatgtattctgagagttttgaaaagccctttctggagtgtacatctgaattttatgctactgaaggtgttaaatatttgcagcagtctgatattccagactatctcaagcatgtggaggtattgataaacctcttgtatttccccttgcattttgttcacacaaaattcaggtatacttatgcaattggtggtatttcacatgaattattcagacaaggttgcaagaagaacatgaaaggtgtattctatatttggaagctaacactaggaagccgcttataacagctacagaaaagcaattattgcagcggcacacatctgcaattcttgagaaggtgattatctgctcttacaactgtaggatttgttatctggccagaataagaatgtgatggtgcattttctagttgacccattagatcaatatatagaaaagaggtgtttactttatcaatatattatatttgttggccactaatttagtttagccactgtctcattcatgacctggcatatgatgttttactgttcagggattcacaatgcttatggaagcaaatcgtgtaaaagacctctcgaggatgtacacactcttccagagggttgatgccattgagttgctaaagcaagcacttagttcatatattcggggcacaggccagggcattatcatggatgaagaaaaggacaaagaactggtgccctttcttctggaatttaaggcatcgcttgatagaatattggaggaaagttttgccaaaaatgaggctttctccaatacaataaaagagtcattcgaacatcttatcaatttacgccaggtaggccatatttatgattctgcttgacaatattttttttcctttcttgtgtactgagttcatatcttatatcacaatattttgtaatttgctttcctactacagtcagtcttcccttttatagcctgctaaactgtttgattctttgatttttgacttgctgggacatgttgatattggccatttgtttaagaactgtgctgtccttgtacatattgctttatgttggtttcctatcgcagtccagtttggctgtgatacttgataaacagaaagctcaattcttagatttgagatatgctggtaccaatacattttgtttctgatgttcattgttatctagttgcttttttgtacttaagtagatgtgtaatttatcctgcattttctttctttgtactatgttttattttatgaaagatcagctcaagcccttttttccaacagaatcgacctgctgaattgattgcgaagtttcttgatgagaaacttcgagctggaaataaaggtacctccgaagaagagctggagggaatattggataaagttttggttctgttccgatttatacaagtaagtcactaggttattttatatcactaagtttcttctttgtcagcatcttgttctttcaatttcagttatacatgtgggacacctcctttttcaactagtcaactgtataaaatagtaaaactccctatatggtgatcatattaaagaaaaacaatttccatgagcatgtgggcggatggtttaagcattgcattgaagatgatgctataggtctggtccttcacaaacatggttataatatgtcattcttatagagtcctatagacctatagtcctctgtatgaagcttctgggagaagctaatgcacataaaatttactagtacgtagtaacaaataaaagattgaagaaggttaatattcttaattatgttcagggaaaagatgtatttgaggcattctacaagaaggatctggctaagaggttgctgctggggaagagtgcatcgatagatgctgaaaaatcaatgataacaaaggtaattatttatttgctgatggtttaaaataatattttacatgccatccaacttgctgacatacttgagtttttttttttctgtttgcagctcaaaactgagtgtggaagtcaatttaccaacaagctggagggaatgttcaaggtagcaatttgctatagaagaaatgacttttgctagtatactagcctttttgcgaactcttgccctatgtatatttagctcaaatgttgctaacttatatatgctctatgcctctatccattggtggcgtacacgatatcatcaatttcttttatttggatttaatactcttgtaaaataaaatgactttggtgctgttctcaggacattgaattatccaaagaaataaatgagtctttcaagcaatcatctcaagcaaggacaaagcttccatctggcattgaaatgagtgttcacgtgcttacaacagggtaggtaacatgtgccttgccatttttacatgtgtgctggtttactgagtagcatgttctgtttacacaacacttgtctaaacctaatactgatagataggcttcttagtccatgacatgtagctggaatatgggcaatggattatataactttataataggcgtttgctgagcatgttaacatgcaacttgatattttctatcataaatgtgcatttctgattaaatatgttgcattgcagctattggccaacatatccaccaatggatgtgaaactcccccatgaacttaatgtctatcaggtcaggccatgttctcaaaactatgtttgttggcagtaaatatttatattaactgcctggaaattaatttagttttctatttttctgataggatatatttaaagaattctatttgagcaagtatagtggaaggcgtttgatgtggcaaaactcattgggtcactgtgtattaaaagcagagttcccaaaaggtaaaaaggaacttgcggtgtcactatttcaggtagggttatttttcccaatttctttggtggtttattgtagctgtaactgtctgatcaataattagaaaatcactgatttattctgtttttcagagtgtggttttgatgttgttcaatgatgcacaaaaactaagcttcctcgatatcaaggaatcgactggtattgaggataaagaattgcgaagaacgctgcaatcacttgcatgcggtaaagttcgggttctccaaaaggtgtggctctttattttatccaaatgtctaactaattttcagtagcagcttgttcagttgtcacttttattttcagatgccaaaagggcgagacgtagaagataaggacgaatttgtatttaatgaagaatttagtgcccctctctatcgcataaaggtaatattcgtcatctaatttgtgtggggtggggtgggtacgtcgagtttgggtgtgtcatcaggcttaactaaggtaatgctgtgtgtttccaggtgaatgctattcagatgaaggagacggttgaagaaaacacaagcacaactgagagagtattccaggacagacagtatcaggtgcattaaccatctaaacttgcaaacaagaacatcctttgaggacttctagttacacttgtccccgtttagttatcctcgatttttggtataagatgttagctaaactagtatgctgtgcttatgcttcctctggttcttatgtgacgccgtagaagttttaccctctatttgcactcagcacatggtagctagtttctaatctcacatgctttttattcattgaagcaacacattattgttagttcatattgttatcttacatgctatttttcttgcttaattaatgtctgcatcttttaggtttaacgtcaccattccaaacaaatttattctggaatgtttttggtgcaaatctaatgatgaattcaatcacgggagagtaatgccacaagttccttttcttgttccgtgcaggtggatgctgccatagttcgaataatgaagacacgtaaaaccctcagccacacgcttctaataactgagctttttcagcaggttagacatgttttcaacgcatgcattccattttgcgcactccacaattttgatatcttaaaatatatcgttttcttttctttcagctcaagttcccaatcaagccatcggatatcaagaaaagaatagagagcctaatcgacagggagtacctggagagagacaggagtaacccccagatctacaattacctggcttgacagcgcttgccatcataacatgaaagctcgtcgtcttcatttcattgtcagagacattgtaaagtagtaattgaatatgtctacctcttgtttttccgacctttttctccttggaagctgtagcaatcgcaacatttctgtatacaagaaaaatgaattttcgataatatcagccatgcatcatgcatacatgtgttcctgatgagtgatgaacagccaatattttatgccagggtctgttttggggccctgccagaaaaaaaaacatcgttgaaacgaggaatttttcttgaaccctgtgaaagttgaatcgaatttcgggaaaatctgataaagtttatgtaaggacctgttcactttgatgttattttcaatcttaccaaattttggtaatgttgctaaaaaagtggctacatttagtttgttatcaaattttgatagctatataagaaatcttgccaaaatttggtaacaaagtgaacatgccttaaaattccaacaatttaaagctatatggctcggccttacgaattttccacccaatatacatgcccagatatagcccagcccatccccatgtttaagcctacccaaactaggcttaattgggcttcatactttgggcttcaagtttgcagcccattaaacgggcccacccaagcccagtctcccctccccctccacacagtcgagcagacgcagtcgagccagctacacggtacgcctctagtcgccgtctcctcccctgtctctgggcgccctcctcctcccagatcagatcaccaccggcgcccgcttccaccgccgcctcgccccgtcgccgggggacccctctccggcgacccccttcgccgcaggcaccggcgaaggtgggggaatacctctatacccgccctagatcgcgctcctgcgattacgcttcgcctgcgcgcgcgcctgccacaccggcttgggtttttggcgcgatggatccgctcaggagctacctcgggaggctcctcctcgaggagatcaccccggtggtgatggtgctcaccaccccgctcgccgaggccgcctgccgcaagagcggcctcagcgtcgtcgacatgctctcgccgttctccctcttcaaaaaaatcgacggtgattcacctccccgatgctctccgcttccgataattgtgtgtatgacgcttgtcgcatttcattcgattgggttctgtgacctcatggggaatcccctgtatgcagtgcccgtgcggacggcgagtgaccagccttacaggctgcagatgtttaagattcggatggtctacgcttccgacgtccggaagcaggactacgaggtgattctcgaactttctggaagcttctgggttgtgctgtgggcttgttcagtatggatgcctatggtttatgaatctcttgatggacattggctgttttggagcaggtggcggatcagaggatcaagccagtagtttctgaggccaatgagagtgctcttccagatctgctttcagacccaccacagctagaagatgtacttagcagtgagatcccttactgcttcattttgttatgttctcacctgtgggcatatttactttgagcaaaattatggagccgtagttggaattctatggatcacttaaagtagcgtaatccgatcaccttgacattagaagcaaactgtgacttactatgagcagcaataatcttctattcagattgtttaatttgcagaataattttaggttataattttgcgctggtagtggaagtatctttacaaagtgatcataccaaacgagcgtgtgcattatattttggatagctcaaagttcctgtaaatggtgtgaatatgcgatgtgtttctcagtggctgtgagtgtaaataacaagggatatttgggtggttacaaacatagtgtttctttgccttcgtcatgtcttagagttgatatgaaactgaaataatagtattattgtttgctgtttgttcggtgcatcttacatatggttctttctttgctcttgattccagagcctgaagctgaactgtgccctttgtggattaagaaattcaacagagctctgatgcgtacactctcattttcagagcatgaaacattcgaccaccctgtggcatgtgagatttggaactttcgtcttatttggtgttttttttaaggatatgttcttgctcatgctttgactattgttaacaggtctgttagttgtatcatcaaaggacaatgaaccaatcagcaagtttgttgatctcttcaacacaaatcagttaccttctcttttaaatgaaggcataatggatccccagattcttaagcactatcttatacttcatgatcaacaagatggaccacaagagatgtatattcttcactcagttattatgtttacattagttcttgcatagcctagcaacctgttactaatgaacatgttctctcagttttatagtgttctctagccaaacaatgatataatgtcatatgccaaatgccaacattttacagtgtcatgtatgcaattttccccttcttttttgctgaccttcttttttcttttggtgaagagctatgaacattttagcggaaatgaagagcactcttggtttgaatgattgtaaattgttgtgtattaattcttctacagaagcagatggtgcagatgctgagaattcatggttaccttatgtaagtacagagaactacttcagattaaattgcattagtgtttacgtagtgcagccgatatgcaatctagttacagtattttcttgactaaactacagaaatctcatggtttgcacaaccaagacggagcttgttggcttaacacggatgatttgaatgaggtattgccccatttgatgaatatcatgtcatctgcttatccgtcttcttgggcatattgaatgtcatgaaaccattgtccaacattttgtagcacctaatgattcatctgttccctggtaggtattgttgggaagattagtagcctacttggtagtttttactcagtgtatgcaaggttttcatgggtatcgatgctaagaatacaaaatgaatatttctcgcagatgtatggtattagatcaatgaactttagttattcctctgtagtatccagtgtcacatgcaattattgatttctgagagccaacccatacaagatacttactagataagccgttttttttcagataaaggacttcatgcaagatttggcttctaatcatataattccctacatggagcaaaagatccgtgtcctcaatcagcaggtattttctttattccattactttttttttacctctctcaacaagattaaccattctgtttttgaaaataataataataataataataatattaagcatttttctaggtagccacaacaaggaagggctttaggaatcaaataaagaacttgtggtggagaaaaagagatgatgttccagaagctgcaaatggcccaatgcaagtggttacttacatcttgcccttttccctatataaaaattctgtagtttgctgtaacacttttttttttcttcaacaggtatacgttcacctccatagagtcacagattagagttctaggtgactatgctttcatgttacgggactatgagcttgctttgtccaattatagattactctcaacagattataagcttgacaaagcttggaagcgctttgctggtgtgcaggtgctttatacttgttttaacttcttgccttgatttacatatgacattacttatgtagtgttgttgagtttgaaataaagtagcaatcaaggtggcgattcttaaggaatatcctgggaccagctacgttaacagcctaacatacttttcacctcaaacacgagtttagaccttcttacttgtacaccatatcagaatcatactgtatgcttccaaatttaaagcacatggttcctgaatttgttttgatgattgattgagtactgaatcaagcttgagtgcagtggccaaatattcaagtaggtagtcacttcatgataatgtctgtgtcttttgcaggaaatgagtggactgtgctatttcatgttggaccagtcaaggaaggatgctgaatattgcctggacagtgcctttagtacatatctggtattcatctctatgtccacttctagtttctcagactaaattaaatggttctctttctaaattgtaacctaacatgctagctccatcgatataaatttgtgttctgtgtactgtccaatatgtcatacacaaagagaaaaggagttcctatttagttttgtatgaagcagttttccatgtctattaaatacagttgcatctgattttcaggactattgatattaacattgacttagcaaggagtgatcatatgtcattgatcttactgcgcaaatgctagtctgttgcattgttttatagtcattcatatgatatcaacagtagactcagttaattttatggagttccccagtcattaaattcctgtgtgctctgttcttacccgaattagtgccatgcttcacctagcactgttctaatccaagttgtcattggtggcatctctaggatagatgacttcctttattcccattatttttgggagctgatagttgggtgtgctttgtggcatataataaagaatgcgtgaaactagatatcaagaattgaagaattcataatttgcgattaagggctataaaggggcaggatgattccaaataattaatgctactcttatgtgtaatttcaacttttgaagttaattaaatttggaatgattgatatccttcgtgcttctctgttctttcttgatattgctctcgtttattctattcatatttgtagagaattggatcttctgggaagagaaatgctactagatgtggcatttggtgggcagaaatgcttaaaacaagaggacagtatagggaggcatcaagtgtatactaccgcgtttctaatgaggtagatctagcatcaagcatacattgataaaattttactcatattttttgcaggaagaatttttagtttattacacaacattgatggaattttctaatgttcaggaaccttcattgcattctgctgtactgcttgagcaagccgcttgttgctatgtgttatctaaaccacctatgcttcggaagtatggatttcacctagtgttagctggaaatagttattacatatccgatcaggtgtactataattatatttactgctgtgatatttaattaatgctttagaagtatattatatctttgttgagtctgaaaattcaatctttgagtgcagaagcaacatgctgttcgggcatacagaaatgctctgtttgtttacaaacaacatccttggagttatatcaatgatcatgtacattttaatgttggaaggtagttgtgtgttttagctcctatccatatatttttcttgtctataaactattattaactctggtgactgtaaactaggtggtatggagtccttgggatatttgatgtagccataaagcacttgctggaggtcattgcttgcagccatcagtccctgacaacgcaaagcatgttcctcaatgattttttccattttgttcaggttcttgaccagctccatttgtgctctcattttggtgaaccaaacttctattgcaatgttcatcttgtgttttgtaccaacagagtatggggaagaaatttgatgtctacaagcttcaacttcctgttatcaacatgccatcactcagagttatatatgaagatcatcgtacttatgcatcagatgcagatgtaagtactttccactgctgtaggactatatctagtttatttaccattcagttttccagagtaatcagacattttatttaccattgagttttccggagtaatcagacattgaatttatgatatttcctctaatactcccttcgtcccaaaatatatcaagtttttagtctttggcacgggtattaaagcgagggggaataagacttggttgtctccttgggattggtgaggtataggtccggacaagttggactataataaagccaaggggtactgtgggtagtttagcggtaaaatttacattttacaagtactgttgctatatttgggacaaaatttggactcggttgttatattttgggacggagggtgtagaatatatcttatttcttgtggggctactgaaactgaaataaaagaacaccaaaatgaatcgatgtattgagcatttctgatgatagacaattaaataataactatgagattcaaccactccttttgtttctctaacaataaatgtatctgtctttgtgatctagaaattaaagcagtctaattctaacttgtataagttgccttcaataacaggttaatgttagtgaaagcatttggcaggagctggaggaagaaatgatcccatcatcatctattgttagaactaactggcttgaaaaatctcctgacttgagaaaatacaaggattcctgtgtttgtgttgtgggaggtaatacatcttcaatatccataaatctgctcctaagtggatcaacttaacttcatctgaattttcctggagttaagctgctttcagctggaaaccagcaaaatggcaaagtaaatccaacattattagcaatggactcatggggcatatctagcgcagcttgagtgtaattgtggaagctttccacgtggaccactcgatgagatgaacagactagtttgggtgactcgtatcccctttgtcggttggaaatattaattccaagcatccatgcccatgcatttcgactttcgagagatacaaatatatatgctatatgatgtagagttaaaacaagcaataatattgattaaaactaaaaattagatacactatttcataaggcacaatcaattacatatgcacatgtgcaaagaatgtaatgtttcctaagaaatggatattgcaaagaacacttatgtctacatttatgcagccccaaatgatcttgagttgagtggtaggtgtagagagtgccatcatccagcttctccttttaaaagagtataaagattaggcctaccttctcatgacccagaagaatctgatccatccatatcacatccaacagtccaaatggaggtttgtgtgattgcagccaaatatgagttcaaactcgatctgccccaagtcactttaaaggattaaggaaaataatttatttatcaaaatagaaacgtcaacggacaatagagggaaatatggatgcatctcttatatagtgtttcaattattgcttttttgtcaattgcagaagcagtaaaagtgaggattgagcttaggaatcctctacaaattcctgttgttgtttcttgcatctctctaatatgtcagctttccaccagtttggatgcttcaagtgctggtacttcttttttctctgatctaaaattttatcttaagaaccccatatccagaaaattatgttgatcattgatttctttaatggatcacattactgtgcagtcaatagtgtgctgaccacaggtgctggggaagatatagctaacacaaagcctgcgatatcaacgtaatatttcttttttgctaattattgaggctttatttatgtatgtctttggatcccaaccttaattctcatgggtaccgatgatgtttctggtttaacactacagatttgaggatgatggaaataatttcacagtttcaaagctggacattgtgttaggaggaagtgaaactaaaagtgtatgccttctttgtcattccactttactcagtattatcgccttacaaaagttctgttaggttgcttcccattttcctagtaaatctaatttctacccttggtaaaatgatttggcgctagcaaatactgtttcaactatttctatttgtaaccatattgatcaatggtatattaggcgatcaaacaaaaaggaggaaagctttatgtgtcactttgtcatttgtcttctttgctgtttcaattactccttaccgagtggttattgtatccaaaaaagatataatagaagttctcttgtaaagccaatagtatttccattcaggacgatctgcattttatcttttggcctgatattgcttcaaactattcatacttgtggctttcctcaatttaattttcatttgcttcaattattaagtctgatgttataaattataataatacctgtaatgacaagaggcgatacttaattgactaatgtgtagttatacataatttagctgataatgttttggtaggcattataataaccagtttcctttccaattctattaggtacaacttgaagttactccaaaagttgaaggtattctgaagttacatgggataaggtggacgctctcagatttattagttggctatcaatactttgaatttgacacaaaaaggaaaactaagaaagggaaaaagggacctcgtcgtactttgagcaacaccctgattgtaatcaaggttcggacttgtccagtgctctctttcacataatttgttctgagataagtgagtaactttaatttatttccagggtttacctaaacttacggggtgtattgatcacttgccaacaaatgcgtttgctggagatttacggctactcaagctgaatctgaggaaccagtcagaatatgctgtgaaggtccaaactatatatttttgcaactctcttcccttctttttcagtaatttgaaatgatttaacgaggtttgctcaaatgagcataacttttggagcaaatttaatggtactacacaatttgaaccaactaccacaaaccacactttcaaagaaggctttcagaaaactacacgttcttcagaaccacaaaactactttttttatgaatttacactagtcagacttctgactgagaccattagtaaggtatacgtggtaatctgtgtgccatatggaccacacacacgttcatggtccatggatgaccttctggttaatgtggcaaaggtacagtggatgagtggagtagcccaaagcctatagtccccttggtgctatgccatcaggatgacaattcacaaggcagtacttggcctgcatagaaactgtcttagtcaccgtatagttggaataatatcagatgttaccatatgttactttcatatgggcctagttggtcataatttgttgagagttctatgatggtcttaaaggacgtcaagtttttgtgagaactttttattgaaagtgtggattttatgatggtctaagtttagttgaagttctatgacatttacactaattttgtcctttatgtaatttttcagcagcttgttttgtagtaataattcccaatcttgttgtgcagaatattaagatgaagcttagccatccaagatttgtaattcctggtgatttatcagaagttgatttcgagtttccccaatgcttaagaaagcatgtacaatcagaaattagtactgtatcgacaaaacgtactcagggagatgccaagggtttgctctttacattttctcaagtgagttggttcaagcatgcccccttgtatgctgcaaaaatcatgcatggtctctgtttctttgcaaatattcaccgtactctcttgccaggatattaaaattcaagaaggagccacgttctcctggcctatttggttccatgctgcaactcctgggaacttttctctttatatatctctgtattatgaaatggagagcccaagtgagataacttatagaacattgcgcatgcactacaatattgaggtaatgacttgtgcttgtatttaaataatacatgatttgttgcaaatttggtggattaaacacctaaatttgttgttaagggttgtaagtgggttcttagcaaagttcaaggtggtagagggggtggtaaatgaacatattccttaaaactggaaatatttttaattgcatgaaactaactgtaaaacagggttgtcatgctccacaacggagtggaccaattaaaatactcgaaaggaggtgatgggtttattcctttttagcttttgagtgtctttttttgtttaatcagcatctgtgtttttatagtcagcatttcctactctggtgtgagtttttatctctaaacaattctctgcaggtttttccatcacttaatgtgtcctttgctataagaatgtgctcatcaagattgaaagagtatattgtgcgcatggacatcctgaacaggactccctcagagtcatttattcttcatcagttgtcatgcaatgacagtaaatgggcaatttcatcgttgcctttgtgcgattctatccgctctattgaaacagtatcagcaaatcagtctgtgtcgtgcttcttcaagataaaggtaatacttgtagcataccatgtcttccaaatctatatattctttttttgcccattacattgtagagtttaaaactgtattatattttttaaaatgcatctctttttttcaggatttaggtacaaattcttgtaaagaagctgaaaacagttcttgtagaagtgatatgctttttttatctcgtgagggcaacagcaatactgaggagtttgatgtttcccaatctcctattaccaatttccactatcaagagagataccaacagggaaggttggctaaggtgagttctgttaaagactataaaggcatttgcacccacttggtggtactttttccagctgtcaaggatttgttaccctaatcttcaagttggaatcaacaaaatttggctcgaaaaatgatgagaaattggatgcatatgtttttgttttcatacagtttaccatcacttagtcaaatgatgacatatatattggtgccatcactgtccagggaccacgggaccttcttgattttattctgatctcgaaagcagtaggtggtaactattccaagtcagatccagacgttcaactactctctcatcatgtgtgccattgcaggtaagtgctagattgtagaacctttgttacgacaaattctgttgggctctggactttaatgtgctgataccatctgctgtttctcagtgctatcgaccagagtcctatatggtggtttatggaagggcctagaacagttactcatgatttctcaaagtcttactgtgaagcaaacatccagttggtaattcataatactgtgcaacataatatttcagcgagagtagttacctatgacagcgtgccagataaaagccaaactgtcaatttgcaagattctaatagtaatcagggtggatggtatgatgtatcgctggaaaatgacattaaagctatctctactgccaaggggacacattatcagaaacagccatcagagagcatttcaccttttgtttggtgttcattgagttctgctcaagttgacctgaaacctgacacttccactaaagttcctctaaaagtgtgcatatttatgcctggaacatacaatctttcgaattatcagctacaatggaaagtgcattcatccgaggtaggacaggtggatgaaaatcaaagatccggtggtggccaagggcatcctttttatgtcactgttcttcaggatgcttgatgaactgcaaggaaggatggtgtgagacagtgagacaaccttctcatgaagaaactcgttccttggatgctgggtaaagatatacaatctgaccaacccaaaccagtggagtggtgactggtgaagatgtgtacctgtaagttcacggttgagtatagaatgaatatacatggattccagtttcaatactagcacagttatacaagttcttttcaagggtaattctggcgattagatgtataccattgtcggtgaaattttggtgctaggaaggatgcagacaacaaaagctttggtttgccgattgttgctgtagcctataggttcttacattgttcttgtaaatccttgtcaactttgagacaactcgcagatgcagtatctgtccatagttttcagtcatattgtacttttgaggaaattagatacttgagacgctccaagggcggcagttttgcctggctaattgtgatgttcatcatatagtgttgctttgaatcccagatcatacgaagttattttatttccattggcttagtttgtttgccggattatcttgtgatgtttttataagattctatataatagaaaatgatttgcggttgtcttgtttgatactttcatctactaacagtctccaagctgaaaccggaaaatgcaagttcgtgactcttgcacgttccagaagtagttcagctaatcgtgactgtacctttgacaaaatagcatcttgttttatttgtgtatttatgaatcgacagcctcttgtagccttgcctctagaagtccagcttttttgcagccaagtacttgtaccaacaaaatgtatcctcgtgttcagctgatgcagtggaagtcctaccaaatgcagagattttttgtcttgtgctgtgttttcgtgtgccaaaattttttgtaagtatatagacacatatttaaagtattaaactgtatactaataataaaataaattatagattccgtatgttaactgtgagatgaatctgttaagcctaattaatctgtcattagcaaatgtttactgtagcaccacattgttaaatcatggcataattaggctcaaaaaattcgtctcgtgatttacatgcaaactgtgcaattgattttttttcgtccatatttaatatttcatgcatgtatctaaacatttgatgtgacggaaaagttgaaagtttgaagaaaaaagtttaaatctaaacatagccatgaatgcaaaatccacccgtacctccattatgcttcacctctgcttgaacaggtaagactccgtgcatttacatcggccatgttgtttttattattactccctccgtttcaaaatatttaacaccgttgattttttaacacatatttgaccgttcgtcttattcaaaaaatttaagtaattatttattttttttcatatcatttgattcattgttaaatatactttcatgtacacatatagttttacatatttcagaaattttttttgaataagacgaatggtcaaacatgtgttaaaaagtcaacggtgttaaacattttgaaacggagggagtattatttagattttagatttttgtttgcatgtttccctactaaacggagtatttgatgccaaaagaaattctatataaaattttcttgaaatacttttctaaaacaaaatttcaactctgtagtagtagttaattttcattcgtttatatcgcaaaaatcatattatccgtcaattttctatatattgttgtgtctgtgcaattcagtgctgccccctgaagtgttccttgcaactctgtacaatctatgagggttggataagagcacccgcaatggtaaagtaaggtgctctctataaaacatgtacatctcagcaatagactagattaatagtaaaccacctcaatagtatgtctacatgggtatctatagctctctcatgtattgtctcgtttttctctatagactatctctagtttagtagatagttttgctctatctcttcatttaatatcttgcaaatagaaaaatatactgacgtggatctcttatagagagtctatagataaccattgcgggtgctttaagtgaaatttgcgcatgcacatgtgcgtcagttgctagaatcctcaacagcatgcaaagctcgtaaagcaaaacaaggagaggtcaacggagagagcacatcaacgcatcactatggtaatcccagagtgagtagtactagcaataataatagtgtcattagtactccctctgctgaagaaagcaacgccttataaaaaattaaaagaagttagtagtacgaaacaaataagacgtcaacgccgtcgacatccaaatgtgttactttctctgttataatatgtaacagcttttaaatttattatatcttagtattataaatctgaacatgtcgtttatattcataattcttatattgaaatggaaaaataaaaggagtattatagtacatgtgaggtggggcaatcaatcaaaaggcgtcacgttcacgtccttgtgatcgattgagacggtcagcgttgccgccttgggttggcctgacccggtttggtttgtagcgtggtaacatagcatagcaagcagaattgcgagggttcatccatgattggcagtttggcatgtgataactgagacatccaacggtggatgacgaccagtaccaactaccaacccagcaagttgtataaacgaagggcccctttaaatcacgggaataaaaaaatgaaggaataaaaaaatataggattctaatagaaatgtaatgtaagtgtaaataaaaaaaatataggattctaacagaaatgtaatgtaagtgtaaaacagaggattgcaaaacacaagaaaaacatagaaatgaccgtttaattggaccacaggaaaaacacaggaatttgaggagagataaagactcgaaggattttttccataaggttctacctcttgttaaaattcctccaaaacttatatgggaagaggcattccataggaattttataggatttcatagggttcattcctttgattcaaagggctttgtaggaaaaattcctataggaatgaaatcctctaaaagaaaattcctatgaatttcctttgaatcaaagggaccgaactctgcaactgatggaattattatgtatataggccgagtttacttccaaactttttcttcaaacttttaactttttcatcacatcaaaacttttctgcacacataaactttcaacttttccatcacatcgtttcaatttcaaccaaacttctaattttagcgtgaactaaacacacccatacttggttttattttcggtcttttgttctctgtcctttttatattgtcgtggtcaagtcaagctgcacacttgcatgcacaggtgcccttgctcgctctggttgatccggtcaaaaacgaccagctgaatgatcgcctacggcttatggctgatcctgatgccatgcatctccattctccagtcttacaaactccagtagcagttttataatactaccagtagcttttttttttttactcttgacaaatttattggcatgatttgaagtttacagttacctgataagctttcataaggccctttttatacggttcgggttccaagatttttcggaaccggtaatttctagttttacaaatttatgatctaataaatcaaccattacattgctaatatttagatatatcattttatttctattttaaattaattttaaaatttaaaccattatgatttaatgtaacgtacaaagttcaaatatgtcgtggatctggagttgtgcaaaacatgacctattttttttcacaaaataaaatgaaatccgtgctccgtttcatagaaagatatttaactatttgtcagtcttataaatggttaattaagggtttgtcaccggatccatataaaaaatcgtgagacgtaaattcttaattatcgcatctttaaagtggtaaaaaaaagttaaatgcaccggcccctctgaggttgcgtggttaggtttgaaacaaagcacaatctggacgcccccggcgcgccaccacacgccaccgcgtgatcaagcgccgcgcgggcagtgcacacgagggaggcctggactgggcggcgctcgcgagtcgcgacgccacccgcccgcgccgcggccatctcatctccctccttcctcccaccttcccaatccctcccccccgcgccacctcacgtcgccatttcaactccatcctcgcgtgaacgagacgagacccctccgaccccttcaactccgcgtctcctcctcctcccccctcttaactcctccctcctcccgatccaagaaaccggagcaaatcgtggccgatcttgtgttctagtgagttgctgcagccatgaacaatctcttctctagctcgtggaagcgcaccggcggcggcggcggcggcgacggggatattgaatcgggcggcggcgtggagatggcgccgccgccgggggcggcggcgggggcgagccttgataggttcttcgaggacgtggagtcgatcaaggacgagctccgcgacctggagcggatccagcggtcgctccacgacgccaacgaggggggcaagtcgctgcacgacgcggcggcggtgcgcgcgctgcgggcgcgcatggacgccgacgtcgccgccgccatcaagaaggccaaggtggtgaagctccgcctcgagtcgctcgaccgcgccaacgccgccaaccgctccgtccccgggtgcggcccgggctcctccaccgaccgcacccgcacctccgtcgtcgccggcctccgcaagaagctccgcgactccatggaatccttctcctccctccgcgcccgcatctcctccgagtaccgggagaccgtggcgcggcggtactacaccgtcaccggcgagcagcccgacgaggcgacgctcgacaacctcgccgagaccggggaaggggagcggttcctgcagcgcgcgatcgccgagcagggccgcggcgaggtgctcggcgtggtcgccgagatccaggagcggcacggcgccgtggcggagctggaacgctcgctgctcgagctccaccaggtgttcaacgacatggccgtgctggtggcggcgcagggggagcagctcgacgacatcgagacccatgtcggccgcgcgcgctccttcgtcgaccgcggccgcgagcagctggtggtggcgcggaagcatcagaagagcacccgcaagtggacctgcatcgccatcatcatcctgctcgtcctcatcctcgtcgtcgtcctccccatcgtgctcaagttcgtcaacaacaacaagagcagcagcagctcgccggcgccggcgacgccgtcgccgccgccgccaacggcatgatggtcgtatgatagtccatgttgagttcatacttcatagtgagagatttctatttttttgtcgggttttttctttcgtgattgtaattacttctgtatgattagttgatcgtcttgattattatacatatctgattcttctaaatatcattgcatttgaaactgcattttatccttttattcgagcattcgactatgtgcgatgcaattcattctccagaaaagcagtaaagtcataggcgaaaatttaaggcgtgttctaaaagaacttatgaaagatatggattatttgtgttatgctcaaacgattttctcagagaaaattctgcatcagcattgcttatacaacttgttctagctatttttttagcattatactaactccgttttatataagagataattttttcgcgaacgcacaaatttataagagataatgttgatgccttttagaataacgtttaacaattcgtcttattcaaaataaatagtataaacatgttaaagtataaaacatacttaaagttctttcataataaaacaaatcacaacaaaataaatgacatttatataattctttttaataaaacaaacggttaaataacatgccaaaagttaacggtgtcatctattaaaaaacgaagggagtactataaaatatttagttcatccttacaagtaattgtagctaagaagtccaatcattccgttagaacacgccctaactgatatatcgtctcatataaaaccaggtacatacacagagagctgatttacaaaatttgtcgtcttttttttctttacaaacagcaaccactggactatatataaatagataacattattaccttaacacgaaactgacatatacaccaagatggccgaagagaaatgcgagctcgaaaaagctagaagaacatgctggagctagaagaagatgctgaactggctggtgagtgagtccttgaggttggagaagagcccaaccagggagtactgccggagcttggacacctcataccacgagttgaggacggcttcgtgcttgtcagtgccggagaaggcgagctgaatcccggggctgcaatccacgctgccgcccttgcccgtgcagttcgccgtgctgatcgcgcagttctgatcgacgcaggtgaaggagggttgcccggagcaagcagagcagccgttggctttccagtacaggttctgaagtgtgcctttgttgaactcaaacacctaagaaacagaattcagttggtcgaatgatcagttggagaaataggtgaagatagaatgttcagaatgcagggtgcgggttatggatcgcaccagggtaaagctggtcacggtgtatgagctgttactgacgaaaaccggaggtgatcttgctgcatatttcctcccagcaaaagctaccatgtagccaccagaagttgcctggcacatagcaaaatagtggccaattagaaacacaagtggcttcattatattgagctaaaaacagttaaaaaaaaggacaatcatatgaagaccaatcacttatgggtaagaaagtaccactacaacaatgctaaatgcttcaaaagatggtgtgtggtttgctggccgaaacagtgaaaaatgtgcgcaacagtttgccattaaccgcaggttaccacagtaatcttctaacagtacaacaaaaaccattcttacgcaatagcactgcttattcttgcaattgagaatttgacatgctatggccaatcaataggagtaactttcgtagtgtaatatgaacaaaactgcgatcaacaaatcaggtagaaaacagaaaatgatggcctccatcgtgatgattagcccttatctaaaatgtcaagcacagctaaaccattttaacacatgttggtaattaaacaatcggtagtactgtagcttctctatgttcaatcaattagaataaaaatttccaaaccatagagcacaacccattgaataatttcatcatcaaagcagataaaccgacacttggcccacagaaaaacagagaagcatgttcatgggaccatttccatctgtgttactagagctcctacaaagagtccaaaaaatggtgctgtatcaatccatatgggacacataatccagctccccccaacttttgtcttcatcctccccaagcaggtcgtgattgccaatgttcatgacaaattgacaattcaccggcaagttcttcgtttctctgtttctcactaggcaattagggtgtttgattctaactaaaacctattgcatgacgaaactgacagcataaattctttattgaaaaggaattgtgtctatataaaattagataaaaaagaagaaactagaggactagttctttatgcgtttatgccaaacttcgggttcctgatatacgcaaccgtgcagtcagttagggttcctcgtgtgtatacaccatctgacataaaaatcgacattaagcatgaaaacacgaagcttctagaggtgaaaagtcgaccagggccttagttaccgggtcgaagccaccggcggcggaggtgttgacggtgaggagcgaaatctcgtcgacctcggggcggaacaccgcgagcttggcgcccttggacgccagcgacagccttccgtcgcagggggagagctgcacgccgccggagaagaagtcgccgcgcgccgcgaaggccacgccgaaggtgaacccgtccccgcgctgcaccgccgcgtccgcgcacggctcgtacacgccgttggtgtcgcccccggctgccaccgacggcgcgatgacgaggaggacgaggagcacggacgccgcctccgcgcacgcgcgcctcgacctcgacgacagcgtcgccaccgccatggccggcgcgaattgggtgcctcgggcgcgacgaggtcgttgacgagaggggctttggctttgctgttgctagttactacagctcacgaagaaacgcgtcgtggggaggcaaggaataaaggctaaaaaggcggttgcttgcttgttgggctcgctgcttcttaggccccgtagtcctcatgggccttgtgtacttctatctgatcggagataaaactaattattagtattagtactactttggggaaaaaaagaattatttttaagggcttggtaaagcttgtatgacccgtttggtaaagctctaactcttaaatttaattttagaagatagatctgtaaagttatggagcagtctaaacctagcttcacatctctagttcattttgtgatagcgctccaaccaactccactcctattttaggtagagttgaaactatttgactggattctagctccagaagaggtacagctggagccatgccaaacagactcttacttcaagattcttgttccatagagttagagctgaatcaaacactttcaagattctggataatataaattgaagttgttcttcctaaaaaaaattatactagatgaagcggtggtagtatatttttgctactagaatatttcaattattagatagagaaaacccttttgtaattgatgttgtaatttgttagagcatctccaacactctctctaaattcgactctccaaatatctatttggccaactctccatctcatttatcaagtcaaatttgttatttactccaacagcttcttcatccatcctctctattttgagtctatgacagcagtacccatgcatcagcctctatacccattcttcctcatctttctccccctcttcctcttcctctctctctccctctatacactcccgagacggctggggacagtggcggcggtcggcgcagacagcggcggcagtcgcggctagggatggcggcggcgggcgcggctggggacagcgcgggcgcgcggcggtaggcgcagacggcggcggcggcggacagcggcggcggggacggcggcagtgggcgcggctggggacagcgcgggcggcggtaggcgcagacggcggcggcgggcgcggctggggacgacgcaggcgacggcggcggccggcgcggttggctccggcgcctcgctcctccatgccgtcgccgtcgtgcggttcctagccgtcgcggacgacggcggcgggcgcggccggcggcggccggtgcggttggctccggcgcctcgctcctccgtgccgtcgtcgtcgtgcggttcccgtcgctgccttcttgcgggtgcgacggggagagagagatggggtgggagggagagtggtggggcccacgaatagccaggcagagtgactcttgactctccaaagttagtgagaggtgcaatttggaggttgttggagggtattttttctccatacttgctaaattttaacttggccagccatttggccattctatgagttgctcttagaacggataacttttcaatggcaaaacaatagaatttctcaaagggagtacctatacatctttcgaaagatttttataatcgtatcacacagatttttaatttttgtattaaaatccgatagatataataaaaagcaaaaagcaattaagaaacaccataatgaacattaaattaccatatcctcaagaaaaagaccaaatccaatacaaaatttaaaatttacatgtgaagattcaaaaattacagtgtaacttacaaaagttaccgtgtaagtttcataaattacactgtaacttacaagaaaatgcactgtaaatttgagtgagaaaatcgagtgagagataagaaaaaatctttcgagtgagatatagcaaaatcgtttctcaaataaaaactgtaccagtagcatggcatggaccaacacgattcataggtacaccaatcaaaaacacaaagttgttactattacatagtcttagttacaccttacaagtactacaacactaaacaaatagtaaaactctatatgtacggttccctcctctcagacacatatttgtacttctaccaactggtctcatctctcatgagatggtcagttgagcctgcatatctatatggccaagaaaagctgcgatgaatgcaaagcaaatttcttgaaatattggatagatcatcacagtccaaggctgccaatatatccatgaacgatatctcaggtgaaaatgttgccaatgactatggatgctctttggataattggattggctgtcaagtctgcagctcaactcttctaggcaactcaattgaactggcaagatgatgtttagtgacctttagggaccggttaaccgcagatttattcgtcatgcgcttgcctgcttcgacacctgagagttagggaaatttggttagaaaattgcaagtgtatgagtttgagccttaagaaacattgtatactagataaggtcagttatgtcacaaggaggagaaaaggcttaacatgaacacatgcagatgatgcgagatttttactcacagctggcaggtaaggagaatctcttatttccttgaggatctaaatgcccagtcctctccttaggattactactcgacctagttccaagtcccgaaggacgagacgaaatttcatcacatccttctctggatgacagtttcagttttgacttagccgatgccgaaccaccagaccggttcgatgaggaaccaccgccctctgagtttggtaggcaggtcttctggttcagtatgtttgaatgaagtgttgaagtttgtcttctaacatgtttcttatgtggagtatagacagcattttcctcgtcttgcattgctccactactaacaggaattccatctgctgcataagagcccaggaatcggctctcccatggacgaacagccatccatctctctagccaattccagccccagctgttcttgtcaggttgaaatgctgtaatggctgcatgttgccttgcttgccactgcgaaaggaggaaaataggttcaggtgtcaagttttttaatgacctccctttaagtcttattttattatcagaaatggaattaagccctcaaaaagtatggaagcacaccaaagaccaacacaaagtgacttgagatgtggccacaactgatgagagatcagttcttacagagtcattgggacagtgtatctgacatcaatgatgggaaggactagaaaaattcttaatctactacctgaaccaatgaaaacttttagagatatgaattcatcttatttctggaaggggttactgcatgaaaaaattatttgacctcaaccacatactggaaaaaggctcccttttcttacttctccaacatacggtgaactgtctaaataatttcatttatcatgattggattctttttctccagaaggagcatgcaaataggtctcatcttagctacatactgaaattacaattaaacgctaaccaacagaagcagaacagtacagaaagtcggaaacaacaagcagcctaattattaggctaacttggagggagagacaacatcatctgttatccatgaaagcaacgtttggaatccagcaatagcaacttagcaagcatgcttgttgttacatgctggagatgacagtgagtcgattactttcatgatatcaagaagctatacttggatgcagaccaatttgattggtgcactacagtatacgctataatccatggttcatatgattaattggataatcatagctgagtattgtcctggtgtaaaatgtttgataaagttacctggtgagttagagcataggccatggctcgttcgcgtttggctgctgcctcctgcctctttaatagttttgcttggatatcttccacagatcctatgctatcacaccaaccatcctgcatttttaaggtaaatagcataagtaaacaactcaagccaaatcactgcactttcatgccagttatttccttgtgaaaattgagaagagcatgcatgcaagcctacctggaaaactactgaaagtgcgactcacctcgatttcccgcacatgtgtctcatttattttctcttgtagaatagcttgctgatccgtctggctttccaaagcaatgcgcactcgccttgctctaacacgggcttgaaccctcaccaaagcttgcatacacctgagtgttatagcagcttgctttctcactatatgaccccttacaagggcttgaagcctaactagtccttttaaagcccgacgggctctcctagcctgaagagaattcaagttaaacttgtagtaaagcctgaagaaccaaacatttgggaatcatgggaaaatccataattccatttcagcaattctatgtttgcatatactttgcattggacttggactagttactaaattggcagagagagaaagagagagagcatcaataccaggaaggctctaaacacagtctgaataactgtagcagcccagatctccttgagttcttcttcagtctgaggcacaggcacgttaggtgaactaaaagcgggttccgagcacgaaagtgcattgctatcaccttctgatggaccattttcatcaggaaactcttctggtgctccaaggttatcatggtcttgaccgtgctgattttggcagtgaaaatggttagcaccgtcccttttctgcaatttcacagttcacaagttattacaaacccagccaaataaaaaaaagttattatatacgaacaatgcaatgctaaattgttaacacgatggtttccatttctttaaaaaaaaaaaagacatagtggtttccatctttcaacatttttgtcagtggcatagaagccaaaaaaaaatgatgcagatattatcatccagatctgcagtaacttcataaatttacacaaggcaaacaagcaatgcaagaagtaccaactgtagtcttaatttagcggagaacgaataccccaggttgatcactacaacaaagaattccccatgacatgatcaagattcacttccccatttcttttcagcaaattgttgtcgaattttaacacgaactaactagtcgaattcccggctacccccatcaaaatcaaccaaaaatgccaagaaaaatagaaggacaaggagcagaacaatggatgagagaacctgtgctactcgcccaccatctccatcctccttgctctgctgctgctgcttctccaccttcctcatcccaaccaacgacttgagccacctcgccgagatgcccatggcgccgcgcccctcaaccgagacaaaaacctaaagccgcaatctttctcatcagcaaccaaccaatccaaacctcaaaaatctctccacaaaaaagaagcaaaacaaaatcacccaaagaacacgcaccaagaacttctaggtgcgtgttcttcttggcaagaagagccgtgcccgcacaccaccagatcgcggcgagacggggccaagaaaacggtggtcgacgctggccacccaatgagcggcgcgccttgcagatcaagggtggtctactctactcctcccggtcccggatcatcacgccacctcgctactactctactctactagtagtggccaccaccaccaacacccgggaacccggccattactgccgcagctgcagctgccaccactgcgtgcgcattattgctgccatcggtgggcttgtgcttgtgtgcgtggcagtgtggcacgctctgctgctgctgctgcagagaggaggatgagattgattagctgattagtagtagtactagtataaaaataagcaagaaagcaccgcgcttttcttgcgtttcactttccgcgccccccgttgtcgggaaagccaagccattgctgttgttctcttttgtttaccctctagtttttcactgcatctttgcctggctttcggacaaagtgatctttatgatctgaaagagaaagaaattctttggtagtatagtactcgcaacaatggaatttcagcaattagcgatgtgctcgcactgttcgagctgaaagctgcaaattcggagatttccccgtggaatttcagtcattcggactaattgagtcattcagactagtgcaaactacgaatttttactattttactaccgaagtgtgcactgtgcaagatggatttgctttgtcaggttaaagatctgaaacatgtagttctacgttcgtgctgctgctacaattattcacatttattgttttctacatttactactagtaggtttttacgagtgccaccggtttataactgttcaactctgagtgaagaactattaccattaccgctccatcaattaaacatgtcatggcatttagtatcacttcttttcaataatgtcttttgctacctcataggaagccgagagctgaatcatcaactgctaccactgcttccctacacaggcagaggccgcaggaccacttcagagttcagaaagttcagagattgtgatcttaagctcaatatctctaattaaatccgtttatctgcctcgaattaaagtcacttaaaatgagaagatttcaggttgtttggcaaaatgcgaatttattagaagtagatgggttcagttggcaataaaatgggatatctacatgcgagtcaccaccgaaaactgacatgacaccagtgacagggcgcatgatggttatggatgggatgttcataatgccgtgctgaactctgttttcgggtggtttgcataagtaatcacgtgattaaattggaaatgttggcattagaactcagattaatagccggtgttcagaaatgaacagagattctctagtttctacagaacaaggatcttgattgagtgtcatgttacctgtcctataccatgacaagctattagtttatccaccgaatcttttcctttgtttcttcctcactgaaaaacatactcctaagtttttcctttcagttttttctgagatattctaagataaaatgtacgggagtactttagaatttggattttggagggtgtcaaattcaaatccatgacatgacaaacgggccaactagacacttttaaggcaaaacgagctgattgcgctcggatatcgtacgggactaacaagctttaagaaaaggctatcaacagagggatgtcttttaaccgtgagatgttggggctgtttggttctcagccacactttaccattacttgccaacaaaagttgccacaccttgcctaaggtgaggtgatcaaattgttagccacaacttactaagcctaagggaatcttgccacacttttttgagccattgacatgtgggacccaatttgttggaggggaatcttgccacaactgtaactacaaccaaacacctgtcaaatttgcctaaccttaggcgtggcaaactgtggcaaagtgtggcttgcaaccaaacacacccgttttaagtgacatgaaaagtgtataaaccacagcgccttttgcagaaaaaaaaaactagagctcaatgtcatgtgtcacttttcttgtccaatgcttaggcttttctacgacaattgatctagaggcctggtttagttcctaactttttcttcaaacttctaacttttccatcacatcaaaactttcctacacatataaacttttaacttttccatcacatctttccaatttcaatcaaacttttaattttagcgtgaactaaacacacccagagtaacaaataacactgtaaagtgtggtaacttaaacagtataaactccatattttttccattttgttaatccaatgtgcattgtcccttgaggtataaccgtagaacttcctcttttacacgtggtggaccatagtatatttattttgctagaatgaccatcctgatcgtactccgtctggtttaactatgtactgtactaagttaagagcctcattggttgccttaataagtcaaagccaaaactaaaatttaaatttccaaacttaattttaaaattgattttaagatattttcaacttagtttcttttatagtgttatttaacttttaagtcaataagagcatatatataaaagttttacctaaaaactaatttttattttctaatgagccattttggcttattagtaaatatgggcaaccaataagaacctaaagtatgtggaaagtagctcgaataacaatctgctctttcacttatatgaaataagattgggtaatttttacagtgtgagtcaccttttacccgcaaaaaattcgctttggatcaccctatatttgatctttacacttgagatatgtaatttttcctttcttacactccgaactatcttgaactttcttctcgagcgcatcaatgcctttaagcgtattggcggctacatgtcggtaatttccatgcaagcaaccctttatcatatgagagactatatgcgactcgagaacagagttatggtggtacaaagcgaaacaaatgcgaatttaccaagccaaaagtgaaaatattggatttaaaatgaaaagttgcatttaattgtgtgattagaaaaggttccatttattcagtgaggtcgaatagaaggccagtgactcaaacaggaaaaaaaaattggtggtatgcaagtggggtcgagggaggatgattataatctaaccatcatggtttaaattctcgtgtccatgagtattacacacttatgaacatgtgtttagtggggtgaggcatttgtcgctatctccgtcttctatgtgcaaatgaaaaaaagcgtcacaaatctctcttcaatggagaaaattatctcgtcgcttatgaagcataaagtttcttgtaaagaatttaaaaacagaaaaaacacagccaccatttttgcatgatgcacatataataaccatgaaaaagatacgaagtgagtgtagctctattagtttggttcaagtcctagatttgatatgggtgatcgtatttacggctatctattatttattatttcagtgctaagcaatgttaccgttgacggtgaggcgcatatagtgacttcgtcaatctcaatattttataggtgttcttagagatagagtgtgcgtgtataggggaaattgtgcgcgcgttgtgagtgtccgtgtttattccatgtttctaaaaaaaacatgaaaaaatgaatataaacgtttttcacataatgcacaaataataatcacaaaaaagtgaggaaaaaaaatcctataggagtattcgaaaacaatttaaatccagggaaacttgataaaaataaaaaaacaaaccaaccatattagtagtatactttccttgccttttctcgacagcgcaaggtaagcaagcatcgccaaggcaagaaaaaaggaatctctctgaagagagggaatctccttaccgggttgctcccgtcgcaccggacccgacaaacgcaacccgaaaccggagtcaagtcaacacgcgcggacacacgcgcttcccttccccggaacccgcattgcctctcccccaccctctcgcaggaagaccccggaaggatctggaagctgcaacccccaccgtccgatccagatccgacggccccacgcccgccgcatccgcttcacgcagcttccagagcattcactcctccgccacccgtttcttcctccgctataactacacccctcctctctcctcctcacaaaccgcttccaacccgagaccacgctccccgccggatcgagcagctagggtttcgacctttttttttcccaccaggagggcgacgagatgttcgggcgcgcgccgaagaagagcgacaacacgcggtactacgaggtgcttggggtgcccaaggatgcgtcccaggatgacctcaagaaggcgtaccgcaaggccgccatcaagaaccaccccgacaagggcggagaccccgagaaggtgagctcgcgagcgattcgtctcttgttttttcgtttcgatctgtctgcggcggcggtgaggggcgtagccggtttggatggaggtgggggatttgaggggggcgttggggagttttggatctgtgatagggttgaagaattcgatgggtttaggagggtttggagtagcgcttgcgtgtgctccgggaatgatggatttaggtggggggaagtagatttggttgtggaaatgtgttggattcagagcacgataagtcgcccttccccaattgcttgccaatcaacgaaaaccatgtgaacgtttagatgcaattccattactggttcatatatcgaaatcatctatggtttgaactgtactattcattagctgttgatgataagttgcccttcctcaattgcttgccaatcaaccaaaaccatgtgaaccttagatgcaattccattacttgttcatatattgagatcatctattttttgtatgtttttaactgtactattcattaactattgatatgcacatttaggggctttgctgatgattatgacagattagggtcttggaacattcttgttaattcagctaattgatagccaattctagtgataagtagtattgagaatgatgtgagatattgttcatttggctgatgcaaacattacatcgtcacctgccaagtgccaacctgattttgtattgcgagtttgtgaccatgtgtactatctatcctgcattgtcatagttaggagcctagttactgtggcatacaggctggtgtgttctattatatatattgttttacctcataattatcgctgatatcttatgagtaaactggttaagctttatgagtactgaattgccaatgctttatctggttaagctgtatgatggggacaatagctttcttgatgagatggcaaactaaaattcttgccttcatttcagttcaaggaattggctcaggcttatgaagtcctgagtgaccctgagaagcgtgaaatctatgatcagtacggtgaagatgctctcaaggaggggatgggtcctggtggtgggatgcatgacccatttgacattttttcctcattctttggaggtggctttggaggtacgagacatgagaagcagctcaattcaacctcctggtgattgtggtttgcttagattttgactggctctcattgtggtctgcaggtggtagcagtaggggcaggagacagcgtaggggagaggatgtggttcaccctctgaaggtttctctggaggaattgtacaatggcacatcaaagaagctctccctttctcgcaatgtgctctgctccaagtgcaatgggtatgtcatcagcttccttttgtgggtcctaaatattgcataaactgtttgactattctgatatctcacactgttctgtgctcatcttgcagcaagggctcgaaatctggtgcttccatgaagtgctctggttgtcaaggttctggtatgaaggtccaaattcgccagttggggccaggaatgattcagcaaatgcaacatccctgcaatgagtgcaagggaactggtgagaccatcagcgacaaggatagatgcccaggctgcaagggtgagaaggtggcgcaggagaagaaggttcttgaggtggtggtcgagaagggcatgcagaatggacagaagatcaccttccctggtgaggctgatgaagcggtatgtctgtgttctgactcctcgcattgtacagtacatggttctaaggtgtagtactccatgtgcttgtcaacactgttactgaccaacctgtgctttgtgcagcccgatactgtcactggagacattatcttcgtcctccagcagaaggagcatcccaagttcaagagaaagggagatgacctcttctacgagcacaccctgaacctcactgaggccctttgtggcttccagtttgttctcactcacttggacaacaggcagctgcttatcaagtccaagcccggtgaagttgtcaagcctggtgagtctcccttcaaagaaagatcaccatagagtagcagcattttggaaaccatctgattgtttttttaagcattcattttagaaactattttattgtttactcatatcggccgtcatcttgtcgcagattcattcaaggctgtcaacgacgagggcatgccgatgtaccagcggccattcatgaaggggaagctctacatccacttctccgtggaattccccgactctttgaaccctgaccagtgcaaggccctggagaccgtcctcccgccaaggccggtgtcgcagtacaccgacatggagctcgacgagtgcgaggagaccatgccgtacgacgtgaacatcgaggaggagatgaggaggcggcagcaacagcagcagcaggaggcatacgacgaggacgaggacatgcacggcggcggcgcccagcgcgtgcagtgcgcgcagcagtaagcagcaagcagcgccgtgcatacatatctgcacggctttgacggcggcgacaaattgtttctttccgctctaggggcgataatactatcaagttttccatgttaggcatatgatgatgtgatactacttttggtcttttatactgcgtattaatgacgtacatcaaccggacctactggtccatgaaacaaaatctctactgcttctccttcctgtgtgtgttagtgcgctgcgttcttcccatgtgtaggatttgctgcttcctcgagatgagcagtagcagatggcaccgcgaatggaactgtcaatgcgcaatttgactcggtgcaactcgttgaggctcggtcatgcactgtgtcagggcccccggtgtcgggatctaacaacatggaacatgaaagaagaggctcctgcttagcaatggtaaactaaattgaactacaactgcaaagatagtgagagactacaaatcagacgcccaatttgttcctaaaaggaacaaaatcgtgcgttgtttcatttctagcagaaaaaagtttcaccactaaataaaaaagttccaatctattaaatgttgtgaatcatgatagcagaaaaaagtttcatcactaaataaaacatttgtgaatgatgatagaaacaatccgttgtaacaaacggaacatcgagcttcagctgctaaaacagcaacgaatatgcaagaattgatgaaacaagattcaaactactcagcgaaacattttgattccccaagaaacatcatacttacattggttgaaacattgaaaatcagaaaaatgcactagtctagattgggttccttcctcttctccagtgatcacattttcctttggtctccgctgcagatctagaccgggacatgcgaggctcttctattccgccgaggtgccgtagccgccgctccacggagaccccgaggcttactcaccccgccgttgccggtcccgagccatcttagtcaccctgccgttgctggtcccgagtcatcgtcatcattcggatgaacaaaaactccgcccgccagatagtcgcatggggaggacgcctcgttgctgtcgaatggtgagctatttcgcttgatcccctgcaaggatcatcgagagagaaagaaagatgcatagaacgagcggataaaggagtgagagagtggataaggggggactagaaggctcggtatagttataaagtggaggtgggcctactgctagcatcgcaacatctgatcttttttagttgtatcggacgatagatatggagctttatcacagagataatagctatttttttaagaatgggataacaatcgtttattcttgtaaaatggataaagaaaattatttcaaattaatttcgctgaacatctactgaataaagcactcatgtaccatccagcaaattaaggatccaccataaagcaaaagaaggatcatggaaaagtaatggtaatgtgaacaactattatttggctctcccaaattctcgggagggacaacaccgcagcctcccgtggaacggctcttaggcttgacggtggactttcaacattgaggtggacggcggtgacaacctccctagtccctacaacttaggcttgacggtggactttcaacattgaggtggacggcggtgacaacctcctagtccctacaacttccagcattgaggtggatgacgcggcaacctggttcaaaaggatgcaacaccctccctccgtcttagagatggaaggcggcactagcacctacactaccataacattaaatttcactttgggattacctttattaccggtgttccattttaaatcaccctttaatcaatttcactttaaacatggtatcttcattttaaaaaagatatcttacctttatgagaccatactctaactcttttacccatctacattaaactaatcatctagggctcacgcatgaagtcagtatatattgaggcgaaacagagtgctcggtcatgtctcatcagttcctcgcattggcttgcatgggcatgtcgcatcgggtgatcatgggaaagcttgtcatgctgcggttgtcaggtgcttgcgtatctatcatttggctaggttaggggatagacgacgatgggtcgcgcgatcacttgtattcttgttggatgttgtgtggtccgtgtggagacggaaggggaaggtggaaggccaaacggcatgggcctagccgcctaggtcttgcttgggagcaaatagcatttgatgctggaacattggatttgatcggacggcttcaaaaaaactgatgacgtggaccaacctggagcaagttttataggaattaatgatgtagtgggtaccaactatgtaggaagacggatatagttagaccctaccacgagaagacaaaagtaattgtaacggcgaaagctagcgtggctgtggggattttaaagagacagaggtgaatctttttgctattggttggcctggcttatgtagtgtggggaggtgaggaaagcggaaatagaagcagagtaagacttggtacaaaattagcatataattgtggattgtaaggattttagcatatagccaatggatttagattaacatggaattatctacaactttttatagccaatggacattttttttaatttaaatttgatcctaattaacgataaatgtaagatgtgatcgtagcctagatcaaatttttccaggagaaaatatcgaaatgcaaacagaccctggatgttagctgctccagttttgatgctgcatgcaaagcatttttctaagtgaattctgttgcctcttcatgtccatcggtattgccctgcacgcgaactatgagcatgccaaccgtttgcacacagacagagagagagagagagagagagcgcttaggctcctagacggacactgcacacaccaggtaatcctagaaagttagaatcgatcggcaccatcctctcgccaccgcggctgaaacttctgcagaacaaaggctgctagctcgtgcttgcagctcgggcgacacctcctcgtggataaacttcgtcctctccgatgttcacagggacatatccatgcatcgaactgttaatcattacacttagaagtgtttggcaaatgagaaagagaaatgatttcccacctatctttaaatcctaaccatttattctccatgtttcatttaatcctaactcttcattaatttttcaatcccaatcccaccccccatttctcattatccaaacacatccttaggcacatcagcatctgcgggggaaacggtacggacgggtcaaaggagaacacgagcatgtcgtgaacaacaacgcggtacatcctgtcgagaccggtgtggcggggtgggttgttcgcaactacgtacagaaaacggagtgatctattagcacgttattaataaagtattagtttttttaaaaaaatgaatgaatttaattttgtttaagtaactttcgtatagaaactttttttaaaaaaacatgtcgtttagtagtttgaaaaacgtgcacgcgaaaaacgataggttaggagaaggggtatccgaacacagcctagtcagctgccgatctcgccaatcgccattgacgtcgagccagacggccccgacgcgatcagcacccgtacgtgggccgtgtccagagccgatggacgacaaagaccggcattacacttctcctaatatatgggattaggtgatcgagaaaaatccatcgtgattccaaccaaaactacgatcgcgcgcgtgctggcctgctgacgtggtaacggcacaaacgtgcgtgggagaattctgatctgaatcaaatttgcgatcgtgtgctacaggcagccgattgggaagtggaaacctatctggtttcgctcggacgacgacgcgcgtggaatgcggatgatagacgacgtacgcacgcgtgtgctagactaatggaccaccaaaacatattattcattttattcattggctagcggtggcgaaccaaaataccgacaaaaacctcttcatttctttttatcttaactaattaaaagatttggatttttcctttcgtcacattaatttctcgttcgtatgtccgatcgagcgaggcctgtgttcccacgcgccatgaacacaagcgatattgcacaagtttaaagatcggtacaaaatccaatcggacacagaacacagaggaagagaaaactacaaacaggaagaataataaaaataaaaatcacacagaaaaaaccttgactggctcgaattgagccattttattgagcccgattctcttcattgactcctcaatgccccaatcccccaatacaatgccccagatcctcaaattgaaggtgaaaatattaacaacaaacaataatccccatatccttattttaacatatgaacaacccagatcctcaagattagaaaaaaaagcatgaataaacatcaacaaagcacaagagtaattcattatcatcactgctccttcttctggtgtgggaggaagaacgggacggggtggcgtcaccatcgcatctcccagatccgcctgtctccgacctccacaccgatggatccaccggccaagccaccgagggaaagtagaggagaggaggggcatttgtcgcacctgcaacccgctgtcgccgtcagcccgtcaccatggaggtcggatgcggctaaatctgacggccccagacctccacgccgatggatccgtcggctaggtcgcccgtcatcgcccgttgaggccgtagccggtggcgggacgagtctggaagaccgagtcgccgcagccgtcgcctcgagtcgccgtgccctcatcaggaacggtgagcgcagggagatggaggagaggagcagtagaggagccggcgatgtggccatgcctgcggctggatccagacgaggaggggcgaggctgctccaacccgctcgtcaccgaactgcctctgagcaggaggaggagagccctggcagcggtgcgacgaagcacgggccgagcggcataggcaggaggatgccggagcccggagggacgggcgccggggtagagggagggggctccgccacggttggggagggttggagccggtggtggatatgtgccggcgacatgaagagagacgaagaaagccagggacagagagagtaaagcgatagagataaggctgttctcaccaaaaaaaaaagagaagaagatagagataaggctagctctgtgactgtgaccagggccaccaggcaacaagtcacgaactcacgatattttcccttcttattaaagtaggagcttcaattttttcttaaaaaaaaatacacacacatgctgtcccaaaataagttgattcatgggtttccgtgtacaatctttgacaatccgttttatttaaaatatatatgaaaaaattttaaaaaataagttacgcataaagtattattcatattttatcatttaatctatatctataactaataactaatataaatattcgtatttttcctttcgtcacatctaattttcgtccgtgttttcatctgtatgcaatccgatttggttagcaataacgatggaaaaaaattgcaaaagaaaaaaatggtggccgcagatgccgccgccggaggaagccgccgctgccggatccgcccgcggtcgccgccactgctaacggatccacccgcggacgctgcagacgccatcgtcgccgtcgacgcttgccttagggacggccgtcgccgagggagcgcggatgccgccgttgggagggcaccgtcaccgagaggtagggagggagggatggccgtcgaggccgacagggagaggaagaggaagagggggagggacggccatctccgccgtctccgccgtcgccgcgccacgccgtgagacgggagggagagggggagagggagcggtctgccgtctccgccgcatcctgccatcgccgcgccgtgccggtgagacggggggagaggagagggagcggcgccgctggaggggaggggagggaagcggcgccggtggggaaagggggagggggagaggcggcatcgggggcgggcgaggcggctggctcggctgggagggaggggtccgctggagggtaggggaggggaagcacgccaatggggagagggggaggggagaggcggcatccggggcgggggaggtggcccgcttggcggggggagggggagggttagggttctcatcaatttggaacttatccgagccgtccattaaaacgaacggctcagatcgatcgagcgttgggccaaaccacttgggccgtacgcgggccggtggtccagcaagcgagaggaggagtatggggatattaattagactttggtcgcttgagggctgaagaagaaagtgggctgaaaaaggcccatagagataaagggatttttatttagatttttatttcaataaatgctgaaatgatgtttgtattataaaaatagcaattaagctatgtaaatttcaagaaaatttcaatgagtgtaattaatatagaaaatttaataaaaaataaatccaaccataacattttatttctcacacttactttacttataaattaatttaattatatacctacctacttaaaaaatacccaaatatttcagaaattttgtgtttcatttaattataatttaatatttttctaattcaattttatttttttcttttcgtttcaacgcacgaccaattttgctataatttcaaatagtgtaattaatattgcagaaaatttatatttcattaaattagaatttaatatgttttaattcaattttcttcttttttttcattccgttgcaacgcacgggcatttttctagtaataatagagatatagataaagatagctagagaagtagaacttggtccgtccgtctacccttattaggatattcatggggattgatttggggagtcaatctcccgcgactttgggaagtcgatcttaaacgactctacatattcgcaaaccctgggaaaatggcgaaacttaagcagagcttcagccttctcttgctcatcgaacccatcgcagtatgggccacaatatattttctcatattttgaagcaccctcgttggatctgtgaagagcctctgcatttttcttgaatatcttgaaccggtgagtcatctcagcaaggtcacgcttcttatcgtaagccttgcaccagcgctcatacatggcccctatggcttcatcagactcaaaatccttgtccgtaaaatcgtcagcagactcatcaaaattcgtcaaaaaggcacctggctcatgaccatcatctatcacaatggaacaacattaatactgtcaagaacagcgagttggcttgcaagtttcaatttggttcctaatttgcgagcataaatgtctactattgtaaacattaaagatgtttttgtcggtactttggtacgttatccgtgtatgagttggattttaagttcgttcacttttggaaatacatatccatatttaagttcggttttaatctcgttcacttttggaaatacaaaatgagtcgtataagaaattctttaaaaaaaagattcgcatgctaacttgatatgattttctagaaaaatatatatctaaacaattctcacggtgaatttcaatgaacaataataagattaaaatagcttcacctgttacaacgcacactttttctagtctaaagaaaactatcctgcctaatatgcccatgccctgatgatggcaatcagaaggcccgtaagagcaggtacaatagcaggctataagccagctataaacatattttaaagagataaacgaagagagagaagagcagcgggctatagatctgtagccagctgcagcacggactccaagacgtaatgtgcgtatgacaggtagaaccgagtattaatagtatagtaagcaactattatatgaattggctattacattagctatagatgatttgtagttagtagttggctatactattaaacttgctctaataagattggggggattagcttacctgatggatcgtaatcgtcgaggtaacataccgcgcgtgcagcgtgacatgcggcgacggcggcttggcgtgctgcgcgacgtgctgcgatggccgccgagtgtggagattatggttaccccatatctacatagcggttatattccagctggatatatggtaccaaatatagatagaatatctttatgaggactcgggttagattctaaacttgtatgtcaagaaaatacccaggattctagtcggttacgattgtattttatctgtaatcccatattccgttaggatatggactgtattttgtattacggatcccttcccctatataaggaggggtccgggttcctctcgggacgatttcttttttctctcaatcatacaatcaataacatactcggcggaatcatccccggataggagtagggtattacttcttgaataagaaggcctgaacctgtataaaattctttttctccaaacccatccactttcctagcttgatagccacccccttttattattgccgaaatcttgttttgacagttggcgcgccaggtaggggttgcgtcaagttctcgccgactaagtgcgatgggtttcgtttctggcatcgacgactgcgccttccttcctgggcaggcgttccggttcggcagcctcaacttcatcaccaacgacttcggcaagatctctctccttgactcggattcaaaccagttggggagagaccaggtcctcgtgccattcggtattccgaactcggccgaggcctactccaagatcatctctcccaagtcggcttcaaaccactcggacgagatccaatctactcttccgcgaccagatcaagacgacgggtcctatccctcaatcctgatgaaacttcctgatgatttggccgctgttttcactgtcaagacatctcccactcgaagatctaggagagctccggcttcggccccgatccaatctagatccagagaggttggcgttatactccaacctcttgggacagtctcgacggaagagttggatggttaccttagctcccccggcgtcagttctcgaccaaccgagatcctcgactacaacgatttcggctaccactatgaccatggcgacctcgacaacttcgatgacagctctgaggataactacacgcccctcttcttcggcgtattcatggctgacaacgaaatggaggaacagcgccaagcccgagaagcggaccaagatcgcgcaaggcaagaagctgaacgtcgccgactggaggaagagcgacagtgacaggagcgagaacgactacagcgttagcaacaagatcgcgaacgggttgcaaaggaggctaaagatcgacggcaacgcgccttggaatctgggcgccgagcgagagagctcattgggcaacaagacgtcgatggaacagcggtctttcgcaccccccagcagaacgcggttgcagcaatcactctcctcgacaccctcctcaaggaagacacactcaaccaagctgatcatgttgtcaacatcttgaatcagacgaagaccatgatcgctgcctcggttccagccaactccgcaagcacccgtaccccgactagtagccgagtccctcacttccgatctcatgattatcatcagccaagcctcagcatcatcggcacaggatctagtcgcaggagcaggggtcacgacgaacgatcttttcactcgcctcccgaacgtcacagggagcgccgagctaaacggcctcactctccacctcaccagcgtcccgtcgaccttcgcgacatgatcaaccagcgccgtgcagcgcgaggtcaccgccattcaccaaatcgctacgacgacgacgtggatggagtagctgccttcactaatgacctgcgtcgagtggattggccagccagctttaagccgactggaattgagaagtatgacggcaccactaatccggagtcttggctcaccgtctacggactcgcaatccgcgcagcaggaggagacagcaaggccatggcaaactatctacctgtggccctagcggactccgcccaatcctggctcaacggactaccccgtggcacgatcggatcatgggcggaacttcgtgatcacttcattgccaacttccagggcacctttgaacgccccggcacacaatttgatctctacaacgttgttcagaagtctggagaatcccttcgagattacatccggcgcttctccgaacaacgcaacaagatctccgacatcaccgacgacgtcatcatcgccgccttcactaaaggcattcgccacgaggacctagtcggcaagttcggatgtaaaccccccaggacggttaagcagatgtttgaaaaagccaacgagtatgccaaagccgaagatgctattaccgcgtccaaacagtcgggcaccacttggaagccaaagaaggacacgccgaccgcaggagggagtggaagtaacaaccacaaggatcgcaagcgtaagcctgaagaacttgtggcgaccacctctccatcatcctgacaacgttcccgcgtcaacaccttcgacaagataaagaactcccaatgtccgcatcatcccaactccaaccacgtggccaaagattgcttcgtctacaaacagttcgcggagcaatacgtcaagaacgcacgtaaaccttcagacggagatcaaggcacatcaaagaacaaagatgatgaagacgatgccccgactggtttccaagatcatcgcaaagaacttaaccacatcttcggcggacccctggcttatgagtctaagagaaaacagaagctaacagaacgggagatcaatgcggttcagcctaacacgccccaatatcttcggtggtcggagatagcaattaagttcgaccgctcggatcatcccgactgagtggtccaccaggggcggtaccccctggtactagacccagtggttcgcaatgtcaagctccgacgaactctcatcgacggtggcaacgcactcaacatccttttcgtaagaccctggacgatatgcagattcctcgcacggagttaaagccgagtaatgcacccttccacggtgttatcccaggactgtcagctacaccactcggccagatcactcttctagttaccttcggcacgggggaaaattttcgcacaaaaaatgtctgtttcgaagttgctgatttcgagacagcatatcatgctatacttggacgaccagctttagctaaatttatggccgtcccacactacacctacatgatgatgaagatgcctggtcctcgaggagtcatatcactacgaagtgacatcaagcaggccgtcacatgcgacaaagaaagttgcgagatcgcccaaacccacgagactattctcgcccgcgaagagatccgactggctgcgaccacgacaagcgagggagaagtgcctgcaaccaagctgacgaagaccgaagaaagcgatgccaagacgaaaaagattcccttagatccctccgatcctgataagactgctgtaataggcgctgagttagattgtaaataggaaagcgcgctcatcacctttcttcaaaataataaagatatttttgcgtggaaaccatccgatatgcctggtatccccagagaggtgattgagcactctttacatgttaaggaagacgccaaacccatcaagcaacgactccgccgttttgcacaggacagaaaggatgcgatcaaggaggaattaaccaagctgttagcagcaggcttcattaaggaagtccttcatcccgactggctggctaacccagtcctggttcggaaaaagacggggcaatggcgtatgtgtgtcgattataccgacctcaacaaatcttgtcccaaagacccttttgggttacctcgcattgaccaggtggttgactcaacagccggctgcgagttactcagcttcttggactgttacttgggatatcattagatccgactaaaagaatccgactgcttgaagacctcgtttattacgccctttggagcctaatgctacatcaccatgccctttggattgaagaacgcaggagcaacctatcaacgcatgattcattgatgtttttcaactcagatcggtcgcaatgttgaagcttatgttgatgatgtagttgtcaagaccaagcagaaggatgacctgatcgcggatttagaagaaacttttacaagcattcgtgctttcaggatgaaactaaacccggaaaagtgcatcttcagagtaccgtcaggaaagttgctcggatttatggtatctcaaagaggcatataggccaacccggagaaaatcaacgccatcctcaacatgaaaccgccaagcttccaaaaagacgtccaaaagctgactggttgcatggcggcgctcagccggttcgtctcacgactcggcgaacgggggatgcccttcttcaagctgctgaaaaagactgacaattttcagtggggacccgaagcataaaaagcctttgaaaagttcaagagacttctcactactccaccagttttggcctcgccgcatccacaagagccgctactgttatatgtgtcggtgacctctcaggttgtgagcacggtcctggttgttgagcgtgaagaggaaggccatattcaaaaagtccaacgaccaatttattttgtcagtgaggttttagccgactccaagacaaggtatcctcaggttcaaaagttattatatggtgtcttaattaccgtcagaaaattatctcactattttcaaagtcactcggtcacggtagtcacatcgtttccactcggagatatacttcacaatcacgaagcaaatggacggattgcgaagtgggccttagagttgatgtctttgaacatatcattcaagccacgaacttcgatcaagtcacaagctttagctgatttccttgccgagtggaccgagtgccaagaaaacatgccagaggaaaagatggaatattggactatgcatttcgatgggtcgaagaggcttacaggcactggagctggggtcgtcttgatttccccgactggagaaagattgagctacgtattgtggatacatttttctgcgtcccataacgtggcggaatacgaggcgctactccatggattaaggattgcaatctctttaggcattcgccgattaatcgtccgtggagactctcagttagttgttaatcaagtcatgaaagagtggtcatgtctagatgataatatgactgcttatcgacaagaggtacgcaagttggaaaataaattcgatggactcgagctcacccatgtcctccgacataacaatgaggcagccgacagactggccaattttggttcaaaacgggaagcagctccttcagatgtgttcgtcgaacatctttataaaccgaccgtgcccagaaaagagacagtcgaagccatggatgctcaaggcgtaagcatgattgaagctgactggagagaaccgtttataaaatttttgagcaaacaagaactccctcaagacaaaaatgaagccgagaggatttccaggcgcagcaggctttacattattcatgagactgagctgtacaagaaaagtccatcaggaatactgcagcgctgtgtgtctttggaagaagggagacagttgttgaaggatattcattctggtatttgtggtaatcatgctgctgcacggaccattgtcggcaaagcttaccggcaaggttttttctggcctacagctgtgtccgatgcggacaagattgtgcggacatgcgaaggttgtcaattctttgccagacaaactcatttgccagcccaagagttacaaaccatcccgttgtcctagccgtttgcggtctgtgggcttgacatggtcggcccgtttaaaagggcagtcggcggttacacgcatctctttgtggctatcgacaaattctccaagtggattgaggctaaaccagtcatcacgatcacagcagataaagctagagattttttcatcaacattgtgcatcggtttggggtacctaatcggatcatcactgataatggcactcaattcactggcggagcatttcaagacttttgtgaagacttcagtattaaaatttgttacgcctccgtggcacaccctatgagtaacggacaagtcgagcgcgctaacggcatgatacttcaagggatcaaagcacgagtttttgaccggctacgtccctatgctggtaagtgggtagatcagctgtcgtccgtactctggtctttacgcactactcctagtcgggctaccggccagtcgccgttctttttggtttacggtgcagaagcaatgttgccgagtgaagtggaatttgaatcgctacgatttcggaacttcaacgaggagggctatgaagagggccgagtagacgacatcaatcgactagaagaagcccgagaagcagctttaattcagtcgactcgatatttgcaagggttgcgccgttatcataatcggaatgttcgatcgcgagcctttttagtcggtgacctggttatgaggaaaattcaaacaatacaggatcggcataaattatctcccttatgggaaggaccgttcataattgctgaagtcactcggccgggttcctatcgactcaagcgcgaagacggtactcttatcaacaattcttggaatattgaacaccttcgtcgattttacgcttaggcatttcgtttgtatctctcctctttgactgctaacttcaagtttttccttgaagttttcagtcagggggctactataataataatggagtgtgatttttatcaattcaatttgcttacttgatgtatcattgccctgtttgatttcttggcttagtcaatgaggactgaaagttttttaacaacttttgcgggttttaggctcaacaaggtttggcaaaaacttttaagaaatcaggaactaagttaagatatcaagcatagcataaattcatcagtattgtacaaattgtgcctccatcatcattaatcatcaaaatcattggtacagtaatcagtatcagtcttttcatcatcagaattatcaggaccagtcggtcgaagatcggtgtcctgaaatctctcaactacatcagcagcaatcttgtcagcggctttttgtgcattgctgatgaggtcaagagcagcttcttcgctcgtcccgtctgcaaagccatcaatggcatcaacgtcaaccctcgaataaagagatttggtcatcgccaacgccagacttgctcccatacttccagcttctttgatgttcttgaaatatgtatccggagcaactctcagcttgtcgaaaatttcagaagcatcaagtacactcgggccgttgttattgaagaacatcgcttgaacaattggggcagcagcgttagcaacctcatcccgggttccttcgagttttttgatcttgccaaccaggacgtcgaattgagcttgagattgatcttgcggtctgcatcaacagattcacattaataagttagcatatggaggataatggcttttgaggtattcattgttgataccttcaacttcctttaaagccaggtctctttgtcttgccagttctgccttgtcactttccagaatttgaatctggttctccaactgagatatcttggcagcttgcactacattgatcacggttaatcaagattgcaaagataacagtatgagtcagttgagcagagtttgtgcgtaccttttgatgagccactcagttcaaaatttgattcctggagctcagcgatccgatccctcagatcatgttcattcttcctagcaagttctttcacttcgtgcagttgattcctggtggcttcgagggttccgagatgagggactaacctctctaaggttactgttttggcttcgttcctaagatgaatcctctgcaagatagtttaattagcgcgtgaattaaatggcaaacaagatggttgaaatcaggtaccagagggcttacatttacaatgcgggttgcctgaccaagtgccttcttcagtaggcataactcttcgtcctctttttgcttatttatcacgatcccttgaggctgcatgttgtcatcccaccacttgaccagaatcggagggcatgaatcctcagctgcttgtatacgggggatttcttcttcatcaccaatcattggtcctaatgtattcactgacaaaggttagacaatcgatcagagttatttgggtcaacatggtttcagacaaagtgtttacccgtgatgatttctggacgaggacgagcggattcggatgcctttaaaggagatccagatctctggttattgtccgcgttttgtctgcgagggctgtctgcttgggtttcgacttctagaatctcttggcttggccctgcgtccgactggtttccagtcgggggctcctgattaactccggcttcggcttcggccgactggtttccagttgggggttgatcaccgaattctacattatcagttgccggatgattgtcactcgggtgatccccaacagttggcccggtttctttggaagaattcgtgcccatgttagtcgggtcagagtcttttccagacgggtctatatcagatggtttcctgcaaatttgattatcagtattattgccgcaatgggtgcgtatcaatacaagagagatcgttatatgagttgcacctagaagacttcctgatctttggcacatggcgactggatgttttcttccttggagtagcttgttttggtagtttcttggtcgtctctcggtcttcaggcctcctggtggtatcatcggcttcgtcgtcacttagaaccaacttcctctttcgataatctgactggccgactggatcagaagcactaggttgagtttcagaccgaattcttggtcctccgctcccttgcccagtttggtggtggggagatcggcgttgagcgattgggggatccgactgcatcaaagcaaattcctggatgtaatatccttcattgttagctgattcaacaagaaaacaagatcatattttgagaaagattgaagtgtatgaatacgtactggtggaggaggattgaatgcattgaacggtacgactggcagcaagtgtgagtagctgacaacgatggcgtttgagaagagcttatacatcctttccttcatgaccttgaagtcaagagaatctggatcttcacggtttgggtcatgcttgccgtcaaattcgaaggctgtgcgagatctttctttgattggagctaaccgacatttgataaagtgccgggtgatctgttctccttgaaggccctgttcttttagctttatcatcctctccatcagttctactgcttgtgcagcttcgtctcccattagcagtgagttccaagtatcccgataaactggaggaagacaggagtactcgggaagaacaggctcggggttttgaacataaaaccagtttgcgtgccagcctttatttgaggtcttgaagggcatggagaagtatttttggcttagtgttcccctgagttggaaaccagcacccccaacgacgcatggtttgctcttatttggctggggcttgaggaagaaaatgcggcggaataaggcgaaatgaggcctaatgcccagaaaagcttcgcaggcatggataaaattggcaatatgcactatggaatttggattcagatgatgcaagctaatcccgtagaagttcagaataccccggaaaaatcttgaggttggaagagaaaatccgccatagaagaaatgagcaaataccacgatttcgtgtgtatcgggggtcgggaatgcctcaccaaatgccggtcgccacccgatgatctcttttgctggaagaacgtcgtgcgccaccatctccttcagattgtcttccgtcacatcggagggcgcccactgactctcgaagctttctctttcttccgccatgaatgagaactgatgatttgatttagttcgagatacggctggaaagggatggggaatcggagcggtggatgcgggaagagatttcgtgaagttttttaagggtggattggagcggattgatgaaccctagtttgcccggcgcaattttgtactgtagcaggaaatggggaaaatggcgagagtctcagcggggaagacgaaacgacgtttggacttcggtgtttttagggtatcgggagtactaatgggccctggcctgtacagtacttcagcccaattatgttttcagcgtggcccgttgtgatccctagggacttaggcgctttttgctttggcaatatgtgctcacaatgatgcggcccgatgctgttgaaatcctttttaacgcgattcaataattctttggaattattatgatgcacatgaaaaggtgcccaacataaaggtattataccatttttgtaagcttttttaggctacgaaagctgttgggttaatttgagatgactggtttgttagtagtcattctcccagcatgttatatgcttattttggttatggtaagggtcacagcctaggctattagactcattaattaccatgattttctatcatgtttgatgggtcattttatgagattcttactcggattcctatcaaacatgtctatttttggacctttgagtgtttatcactcggcccttttcatattttttgtccttgatatattcaagtgagaagcagtcggctgggtattttattgagtaccatgcatgcttcgatataagatcactcggttcttgactatatgtttaatttttcaactaatcacatagtcgggggttacacctaattaggtgcatctactcgatgcaccatgttttattttcgcccttcacagtcttctagcactcggtaagccggagcaagttgaattgaagcactcagattattgttttttgtttcgagaagactattttggtcaactgcgaaggtctcgggggctactgtggagattatggttaccccatatctacatggcggttatattccagctggatatatggtaccaaatatagatagaatatctttatgaggactcgggttagattctaaacttgtatgtcaagaaaatacccaggattctagtcggttacgattgtattttatctgtaatcccatattccgttaggatatggactgtattttgtattacggatcccttcccctatataaggaggggtccgggttcctctcgggacgatttcttttttctcccaatcatacaatcaataacatactcggcggaatcatccccggacaggagtaaggtattacttcttgaataagaaggcctaaacctgtataaaattctttttctccaaacccattcactttcctagcttgatagccacccccttttattattgccgaaatcttgtttcgacaccgagcgtgcacaaggactagacgacgcgaccgccgaggagcgcgcggcacgggatgcggcggccgcagctaagcgggcggcggctcgcgcggccgatacgtcgcgggcgagcgacgccaccagcgccgccgttgacatgggcgagggataatcgattgaagaggaacggtaaaccctagttctccccacccgtcccggccgactgatccgattggagtatatatatatatatatcattaatatgcagtagtatcggccgagacggaacagtggatatataacaatctttctgctgctccgattttgtttcatggatactactgcttcatcgaagaggaccagtagatgaacaaaattggagcagtggatatatagcaatctttctgcgccgactggtccatgaaacaaaatctctttctgctcttcctcttatgtggtgatgctgcgttcttgactgccagtgtagtagccatgaatttttttccttgggtaagttcagttcgtaggttcacaacacatgctaaaattttctaacaccaaaaaaccgatacacaagtacaaatttaatataaatgcgataaaaatcaacattcaacaaccacaatttacaaagtgcatactcaatcattctcagattcatgaatcacaaatcgatttatgaagcagccgggagcggagagctggagacgggcaccggtagacgccacgccagacgggagacagcgggcggcggctctgcgacaagacggcaaccggccgacgtcccgcagcaaggcggcgactggcgatacaaggagaagttgtaacgtcgtcggcccccagctcggcgccgcgatggcgcggacggcggacccacgggcgtcggcgctgtggtgtggctcggcactgggctgcgccggcgctaacagcggacgcggcgtggcgccggcgcggacagcggtcagtggcggcgtggaagcgggcatcgggcacgaagggaatagatgctggaggtggaagcgctccaggctccctcaactcaaccctagctgtttgtgggctgttagagatgcctctaacggagtggttatttttgactctctaaatatctatattgccaggctgataaaaatttagagagtcaaatttatcttctattccaacatactattcacattccactctattaaccaatggattccgcctgtcattctcctcctctttcttcttcctcccctctctccaatccttagcccgtgctcctgctcgtgccagcgggtttggcggtggcgaaggcgtcgagcatctcaagttagcatttttctaggagtttgactttcatttcaagttagcatttttttaaaagaaatttcttatacgacttcttttgtatttttagaagtataaacgaacttaaaaactgactcaaacacagaactgtatttccaaaagcaaacgaacttaaaaaccgactcaaatacggatcacgtgccaaaataccgacaaaaacatctttattttttataatagttgagataaagataaagatagagaagtagaacttggtccgtctacccgtattaggatagatttggtgattcatggggattgatttggggagtcaatcttccgcggctttgggaagtcgatcttccactgctctacaaattcgtgaatcccgtgaaaatggccaaacttaagcagaaattcagccctctgttgctcatcgaacccatcgcagtatgggccaaaacatagtttctcttcttctggagcatccttgttggatctatgaacaagctctgcagtttccttgaatatcttgaaccggtgagccatctcagcatggtcacgctccttatcgtaagccttgcaccagcgctcatagaaggcccaaatggcttcatcagattcaaaatccttgtccgtcacactgtcaactagatcagtctcaaaatccttgtccgtctcatcgtcagctggctcaggaccatctatcacaacagcacaacattaatactgtcaagaacagcgaattggcttgcaagtttcaatttggttccttaaagttatcctgcctaatatgcccctaacctgattatggcaatcggatcagaaggcccgtaataagatgggggaggattggcttacatgatggcaatgggctgggaggagcaggagttggctcgtagtcgctgtagtcgtcgaggttataagacgggatgcgtgacaccgcgcgcgcggcgcgagatgcggcggcggcggctgagcgtgccgcgcgacgtgctgcgacgacggccgccgagcgtgcgcaaggactggacgacgcgaccgccgaggagcgcgcggcgcgggatgcggcggccgcggccaagcgggcggcgtctcgcgcggccgatacgtcgcgggcgagccgcgccaccagcgccgccgttgacatgggcgaggcgagtgatgatcgatcgaagaggaacagtaaaaccctagttctccccacccgtcccggccgactagctgctccgattggagtatatatagaacaggaataagttcacttgccaagtctaatttaacgcttttgctattctgatcgcgacaccggggggccaagacgcgatgcttacacggccgagtcaattgcgcattgacagctccattcgtggtgccatctgctacggcatacggctcgtcatctcaaggaagcaacaatgtctcacacagcagtcaagaacgcagcaccaccacacaggaggaagagcagaaagagattttgtttcaacgagtcagggatttccaaggagaagtggatgtagagctagctagcttccccttcatgaatggccgctggtacatcggcacgccctcgatcgtcgttgacagccttgaatgaatctgcaacaagatgacaggcgatatgagtaaacaataaaatggtttctaaaatatgcttaaacaatcatatggtttttgatatatgcggctatgaatctgcaacaagatgacgggcgatatgagtaaacaataaaatggtttctatatataatgctgcttaaacaatcaaatggtttctgatatgctgctgccctatcgtgagttttctttgtagtgtacaagttgggacttgggagacagctaaacatcgtttcaatgcttgaaacaattttgccatagcaaattactcccccatcccaaaatacctattttattgtaaaagcctatccaaccaacattgccacgtcaaaattatctctgcctctctacatacatgaatatctattcggctttttcttcatacgtggatttatagtggtacttatcagccatatcgtctcataaaatgtggttgtgaggtgaaatcgggttagagtcaactaacctaaggacgagcttgagtcaaactaacctcatagctagccatataactatccacactgatatggtccgctgcgaatccatgtcagaagaaatgggttgaatcaaatgtttgtgaaggggatggacttggcagtgctgagtgagtgggcttttgcaacaaaataggttatgtggtggaatatcaaaacaagagcgataattaatttggatggtttacataattttttagtgctattgttcttgtaaaatcgataaataattttaaattaaatttgctgaaaatctactgaggccctgtttagatccctccctaaaatttttcaccctgtcacattgaacatttgaacacatgcatgaagtattaaatactttgcgactaatttacgagacgaatcttttaagcctaattactccatgatttgacaatgtggtactaaagtaaacatttgctaataacagattaattaggcttaataaattcgtctcgcggtttaatgacggattctgtaattagttttttttattagtgcccgaacactctatgcgacaccctatataatacctgatgtgacacgccaaaactttacaaccctagatctaaacaccccccgagtaaagcactcttgtaccatcaagcaaactatccatggaaatgcagtgcctctgtgtcatgactcatgagagagagtgactactattttttttctttttaccttttcatgagtgttctttgcttgatccaaaacacgggggcgcatttagggaaggcatcactggaggcaggctgctcaagtaatgcattatccatattcgattcaacccaaccaaacctaaacccaaaataaaatgatgcctatatacttctggcagttgaccttccatcctgactagccggcggttcaacttatttttcagaatctgcatcgagacagaacagaggagaaagattcagaaaaaagaaaaagaagaaggatgtaacacatctgtctctgagcaaccattgttcggctctcaagtaccagtcggttggtcagatggaataaggttgctgcagtagcagtccatttctcttgatcttgatttgagtaggtgtgaagcaaaacctcgtgtcaatttggatgactttgtatatatgtagctgtcattgaacttcacttctgaaacctgctaaatttgaagtcggtatctttgcccatgtttacgctgtatctgatcaaaaccatttataagcatctgtggtttcactcaacccggcgaaaaagatgttatttagcgatgaatcagatattcagttgtaaagaagtgctcgctatagtattcataagtaaacaaactattttttggacaatacaagaggtgacttctattcttctagaatgcaaaggaagcaacgatttgcaaacaggtcaagcaagaaaatctcttcttttttttttttgctgggccggccaaaggatggccgaccaatttcattaagagaggggaaaaaaataaatagccaattacgaagtttgttacatcgacatgaaggatgtcgagggcgatcaaggccaggccttagatcaaagttgtctctttttttttttctgggccggccaaaggatgattgaccaatttcattaagagaggggaaaaaataaatagccaattacggagtttgttacatcgacgtgaaggatgtcgagggcgatcaaggccaagccttagatcaaagtcgttgtaatgtgaagcaggagtagtaccgttcaccaaaaaaaaaagtgaaaatagtacttcacatgccaccttgagaaattccttgttctcaaggcactgaaaggactactataattgcaactgaaataaaaccttggcttgcaatgcagaaactggactcgaaactcctcaaaatggccggtatgcttcacacgactttggaatataataaaaaccgtaagagaaatacaacctgtcgaagcaaagtcaaatcccaaacacacacatgattgcattgaccattacaaaccaaacaattcgacagatagtaagctacgcaaggacaaacaaagccacagcaaatcacacacaaactcatcttattttaaacatatttgaatctttttttcaaaaataaaaaaaaccatggccatatgcccatatgccattgacctcgaaaccattgcacaacctcatcgtctccttctctctctgtccaagttgtgtgtttgcaacatgcaaaagcgttgacgtcgcactcgcaacctccccctccctcgctttggatccaaacaaaaaccgcaccaaaccatcgagctcagccgcggcgcgcgcgcggcgacaccaccaactcgctggctcggcgtcgatcgccattgcttgatcaagctcgatcgcgatgagcggcggcggcgcgccgcctggggcgccggggatgatgacgccgggcgacggcaactccgtcggcatgttcagctccgaccgcatcggcgggttcggctacggcgtcggcgtgtccgtcgggatcctcctcctcatcaccaccatcacgctcgcgtcctacttctgcacgcgcgcgcccgtcaccgcggccgatgcagcggcggcggcgggatcgtcgcggcggcaccgcggtgggggtgggggcggcggcggcggcggcggcggggccgggcacgaacacgacgacgtcgagctcggcatcgacgaggcgacgctcaaggggtacccggaggtggtgtacggccagccgaggaaggaggcggcgaaggcggcgtcggcggcggcgacgaagaagggcggcgcaaccacgtgcagctgctgctcgatctgcctcgacaactacggcgacggcgacgtgctccggatgctgccggagtgcggccacctgttccaccgggagtgcgtcgacccgtggctccggcagcatccgacctgccccgtctgccggacgtcgccgctgccgagccccttgccgacgccgctcgccgaggtcacgccgctggcaatggcgaggccgtcatgacacgtggaggttctttgcttggttttcattttttaaaatttttttcttattcatataaaactaaacttgaggatgaaatttgtgtattctgcaaaatggaatgcataaaagaattcctcaagatagggactagaaatttcctcttggtaattgggtgtaaatttgggttcagagtagattttcttttctgatataaacaaagtttggcataggattctctttggaattaggattcactttggatttttggagggagattatgtatggattacaaatttggatgaaccttctagagatctaatttttatatcatcaagcttagtgcagaagaacgaagatgagtgtaaacaaagtaagaagtaggaacatatttgcagaatgctttatatatgtaaaattctatcatgaatatctgtaaaattgaagatgcacatttcaaaaggaatagatccttttaattaatgctcttgcatattatctagaaattgaggttgatgaggatatggaatgcagtaaacagattaacctcagttcaaacactcatgcattgtactcttgatgaattaattcaaagatctactaggtgcatatcaaatgatgacatcagcaacctatatacggccgtcccctagatacattgctccttcccccaggtttttgctgggtcaatcagtttacgccaaaatcattactttgtgctttgaagtaacggatataccaatcatgatgcatgctcttcaagaaaagagagcaaaagtgaaaaatgctaatttggcctaaacaaggcaagagtgcaagacgtatctacatcaagcctttttctgctaacaagtgacaacaacagatgtttcttttacaatttctaggaaaagaaaaggagaacttaattaggcaaattaccttcacatctgcagtgtcctgccacagaagctatggaatcattttcagctatgttgcacactgcagagtctttctatgatataaaagactcactgtgccgctctttggtatgatagacaattaggcatgggcaaaaatctggacaccaaactccatgacatcatttgaacagacagatctatttgcaaagatttggtccggaagaccggaatagtcgaatatatattgtgaatatctgaataaattagaatgtgattgtgatcattttcaggttcatctctgatcacatggagaacaagagcttaaaggaatgtctgcacgttgtgatgcagattacaaactaaatctttgcaaacgaaataaattctaaaaaaaaatcgaagcatcaggtggaaatcctgccattccctgtaggaaaaatattgcagcctggttatgtcagacagagtggttcagaatgcataattcatacagctctctgcagaagccatcttatttttgttcatgattcatgaagcacctagtcgctcccctgctgctttgtttttgactgtaaataacttttatttctcttaatacaaaatgcgctccttgcgtattccaaaaaagcacctagtcgcccttacaatcttcgtcggtgtcaattcctgcatcaatggcaccgggctttggttgataatgatcatttagtccctttcaagctttcatgacatgtgagttaagagtaaaacataattaacaaataatctagcacagtagcactagtgcactcgcattgtattattctagtacaggtccatgtgacttcgggatccaattcagcttcaagctggccaatcaagcaagagaagagaaatacaaaactaactccatttactccaaagttccctcacaatgaccaactgatcccaagatctaacatattaaaaaaatagcaatcagtctgaaggaaggaaaatctagttagcccagtgtatacaaaaatacaagtaacatcacattaaacaattgaacgttggtgtacagtcttctcttccattctttatgatcgaactaactcaaacaagaaactaataggaaatattagtaaattaaaatctagctcaggggatttagttttcatccaaggaaaaatgaaagagatcacgaagaattacggacatgtagatacagtttagtaaattccagtgagatcacagattcatcagtggtctccatttcttacatgtgtattgaagacactcacgagtcaccaatataagcatatgtatcttccatgtaatcataaaataaaagagatcaacaagaaactagcagccaagaactaaaacaaaacttttttttttgtaagtcgggaacactattttgctatatatattgacaaattttcttccaaatatttatcaaatgtaaatactgttttaatccaattcaggtggggtcttcccccccgatgttccatgaagaaaatgtaaatactgtataattacagtacaattacattcgaacttgtataactataacttatatgttacctttacataatcttgaaccattagtttgattacttcaatttctatgcaagttgggaagaaaaaaaataatagttgcaagttgggaagaaaaaaaatcatagtgcacacacgagtgaggatatttagtcccacggcgtccgctttgcaaattacgaattgtactgcatttacatgcaagttacgatacagttataatatgattgtactgtatttacatctgataaaatttcataagtatatactaggaattaataggcaaggagtagacctgagcaactaggcccattaaaaggcccataggcaggcatgagaaggccgcatccatcagcatttcagcacgcacctgagacctgatgatttgagtcctcgtcgcgtcgcgtcgcgtcgtgtccacctgcgaatcctctagtcctcgcgagtcgcgacacgcggagctttggcacctgcagcgatggcgaccgaccaccgccgcttccccgtcttcctcgccgcggcgctgctcaccctcctcctcctcccggcctccgccgcggccaccgacgtcgagtactgcagtgagtgcttcgaggcccttcccgtccgcagcttcgctcgcctcccgtctcgtgtcaagcttacgtttccgcttttggtggggtggggtttgttgctgcagggcaggggcgggattatcctgtgaaggtgagcggagtggagatcgtccctgaccccgtcgtcagcgggcagccggccaccttcaagatctccgcatccacgggtaagcaccaagcaccgatctgttactgcggcgggttgcagtttagtgcggtcatgcggttgggggatttactgggcatatgcagtagtcggatcgggagtcaaattagtgtgggttttgtagcgctgtccattcactggcattattgaattggtccaatttgcagaacagtacaaccatgcgatggaatttttgttgtaaggaagtaaagaacaaactgctggctgttagaaacttagaacatggaaatattgcgctgcagcctgcaggtgtttctgttaagactgcccttcacaaggcatttttcattgcgatgctacttgcagatggagcacctaatgtttgttggttgcaacttgcaaattgtgacaatgcgtgcatctgtatatgcatgctggatttagtgtagtttgccatagtttcatgcccattccttgtttgttgatgcccgtgtttgagcttactatgactgggtgccctggagttcatcatctgtgcactgttatgacacgtgttcattgtgatcccgcttaaattgctctgatagcaaaggggagagaatttctacaaataaggataagctaactgtttcgattttattcaagaagcatccctttctgtagagtacatttgagctacaagtctaaattcagcaacagaacaagggaatttccgtccacctagtttaattagcttagtttaattagctttatattgtttgtccaacatcctgctcaatacaaatatgatgcggcctctcacttcatactaagtaaaacaaaagtattaacacgtgttttctgtaaacatcataatacttattcatctcattagacatagtgtagcattaaccgttaatattctgggactatttgacacattagaagtttctagttgttattctgtctacttaatttagataacttgtgaggaaagctagaatacctccgtttatagttgaaaaagatcaaccaacaataagtcgataaagttgtgtgcattctttccacttgacatgtcggttacttttgtgtattttactaactttgtttgttgcatgacaagtatcatggcactgctcacttaacactcagtgaagtactgattcatcaaaagttcttggtatggttgtcaagtgtgtgtatggcttaagcatgactacagtacataggcttggatatttgaatgtatgaagctctggcagcacagctgctgtcactgtcttttcccatgtgttgtttctatatttcggtagatgcgtggattctttctttatagggaatatttgagttttgctcatatttcatgacattatgtgccaaacaaaattgaggagttgttgaggctgtattcattcagtaatttgtttgaggaaagcaaacatagcatataatttgaagttaatgatgagtattcaattaatacaaagatacattacaaatatatgcttcctagctcacttttcttatgatgatatttgatttttaaaagctactactataaagttttacgccagtagattcttgcctttgagtactgactggggactttttcatgactgctgccagataaaagcatcactaaggggaagctcgtgatagatgtcaagtacttctttttccatgtccattcagaaagtcacaacctttgtgaggagacctcttgcccagtaactggtgaattcgtgcttgcgcacgaacagactttaccatcaatcaccccaccagtaagcatagctgcagcatgcttttagttctgttggtgaagaagatattcttttgttaatgaatttcctaactacccaagaagaggggatagagaacatgtccttatatgacttctaactttctgtatgacattctaacataatattgtgttgcagggttcttacactctcaccatgaggctactagatgacggcaacaaggaactgacctgcatctcgtttgggttcagcatcgggttcatttcacctcttgctctcatctaaattcagctggagtcacagcaatgtacttgcagaactcccatagtcctaccacaacatgttccactaaagccggtttaatctccctgagttgaacatcttactacttctggtgttatgcaataactatagtcaattgccgcttatgttcagtatacttgattggacattgccctgtcgttgatctgtctctctgctctggctgtggagtccggtcgctttcatggaagaattgaaatgggaccattgcttcatttccttgatggcttgtcagcgtcgatcacctgtcatggttgggactaaacccaatcagctagacaaggttattgcttgctgactagccattatcaccctaatgcacaagcacaaaaccggcagccgtttgatcatggtggatgcggacatgcggttgttgtggagcatgcacttgcccatgcttattagctctaccaagcaaattttaggtagaccgctccgcgtgcgtcgaatggtttttgtttcatgcaactcggcatttacaggtcacctctggatatttgacctgttttttatacatgtaaggacgtcggatataacacagacactatttgtgaatgcgagtgcatacatgcttggaatcttatgagacttatgtgttcttatcagggtttttgcgttatcgcgatacccggtgttatcaatgggcacctataacaaatttcttcaaaaattgtcgataacggttctcaacgcgtaacaataactcctactagctaatagctaataattgtaatcgataaggtaaaaccggttctatttttaaaaatttatcctaaagtacaacaactagccatcttaatctctaaaatttatcttaaaatataacttctccaccagtcttattatcttaaccaattataaccatcttacacgcactttttttaacttgaccaatcaagaccatcttaatcaccataaaaaatacaaaattgtttatattttaggacggatggagtgttacacatgctacaaatatagtgtttttctcgaacatatgaattttacaggattttcgtacataaaatttcttcaaatttctccgtcttaaatgagacgacttaatagtaacacataatttcccgctaaaatcctggtggggcgtaacggctctagcctagccggccccgactcgaactcgaacgttaaccgggggcggcggttagttaagcttgaggaaaccgaaggcgggcgtacgaaatacgtattcgttgtcagcacgcgccccgcgcctacggctagcaccaaaagggaagggctgcgaggtacacgggcctcctcgcgagtcgcgagagccctagccttccacccctcctctctctttcccctctccaacccgcctccctctccgcgccgcgcgcctcctctctctctctcgcttcctcgcctccgcgccgcgccgcgccgcgacaccgcctctgcctccgcggggggatggagccgagcccgtacggaggcgtcggggggaagatccggcgccgcccggcgtcccgcgccgccgcgaccccctacgaacgcc

SEQ ID NO: 9110 - DNA, 7119 bp, Oryza sativa
ttttgaagttttggtgtgtcatatcgggtattatataaggtgtcatatgagatgttcagacactaataaaaaacgaattataaaatctatcagtaaacaacgatacaatgatacaaatttattaaacataattaatctgtcattagcaaatgtttactgtagcacaacattatcgaatcatggagcaactaggttaaaaatattcatctcgcaaattagtcgcaatctgtataattatttatttattagctcatattgaatacttcatgtagattcactaaacatggtctatatctaccacggatacagtagtatacgtagcacggcagcacggaatcaagtcactctgccagcagcaacagcagctgcagctgcagctgatgagcctcaaccgaatcgtaaagctactccctggcattgccagatatacacagctatacgtgtacacatttatatactgctactgtgtggtgtgtgcatctatggaacagaaacagaaagcttttcttttcttctttgttgttgcaggtgagagagtgttgtgcgagtgtgtgtggtgttgttgttgatgtgtgtttgttgcagtgcaggctacatggggcaatgtgccaccctgtttgtttgggtggggcctccccggccgggctaagctaggctaggcggctcccggatgggcatactagatctgctcatttccatgctacagctagcgttatactcgcctactactactccacgccagcggatgagtacgtaccattcttcttcttgggccatctcgtcgtgcttgcttctcgccttgctacaaccatattccatcatccatgatagttctttgatccattcgtgttatcgtgtcctgttctcttagccaggcatttcgctgcgtgactcaagggttcgctcggcttgaagaacacctacagaatccaaattcctaaggatcctcctctcttatgagtgtctctcggtctataggaacgcgggcccaggaaaagtcaaaggaatgcgggtctattcccctcttccttctattcctttgcgcgaaaacccctccacaactcatacactctaacggtgtgtatatgtgtaggaaagttttttatgtgatgaaaagttgagaacgaggggaaactaaacacagcctaagtatttctggctatatatgtgaatggtgttggttgctgaacgaattttggaagaaagcttcacaaaaattgaggcaaatgctcattgatatcctactagtaataaaagtcacattcattcacaacgtacagtttgtttcccaggagttttgtccgttacctgaagtacgatctctgactttctttttgcgtacgttggcacgagcgatccgggtatacggatgtaaacgtagtaataataataacagatcaaacttttctcttttctttctcttctcctttttatctcatcggttcattgctgacatcacctaactgcactagctcaacccccccgccccaaaaaaaaaaaagtttcagaaaagccggagggtcaaacgctggtgcggtaactttttccgcagtcggggtcaaacgtgtgactgttcagtaaaaaaaaaaaaagggaattggccacttggaagctaatcgatgggggcttgaccagccattagcgagcgcgattagtgcgtaactttcacgtttaccggggcggtaactttacccggttgagaagacagccgtccttatccacaccggacagcctggcaccagattaaacaaatgtaggtggaataaaatacagacctctcggttaataaagtaatgttttcctactaatgagtctatagtttctctcactacaggtaataataaaataaaatactctactatacatttttttggcataaactccaggtactgtatgcccgtgcagttccaatccatctctgatcatgcaccgtcctcttaattttgcgtaaataattcactatattattgccttttgtttggatcaacctctctcatatcaggcactagaaataattgagggataatgcattgttttttatttttatattctattaggtggtataaattttccatccgaaaatataaaaactacgaatctgaacaaacattaaatatctcttccgatgatactatatttttatatttttgggacgatgggagtactgcataacagtaatcccatttccctcttaatataaagcagaaaatcacgaataaataatcacaggataatgcggcgtccttttcatctgtctgccgtttcaacgtgcgtaaattaatttggtcgtgcatggcctacaccaagtggtggctttcggtcaccacctctctctctctctttcattctctctctctctctagagattcttttccattccaacctcgctgccctgaatccaagagaagaaaggaaagtacactgtgaaaaaaaaaacattccattataacaagaagaaaaaaaaaagagttgagaggcaggaaaagaagagcaaagtacagccagcctcctgcaacatgttcagcagctgtgcttgtgcgcatgcatggtcgtgtgtcctcgtcctcatcctgcattcactcaaagattttccattttgtcttggattttacaaaaaaaaagagacatgttgattttacttcagatttaaaaactagtgaaaattacacagaaattagtacttgtattatatatatcagttcatcctcatcctgcattcactcaaagattcttcattgattttacaagaaaaaaaaagtagacatgttgattttacttcagatgtcaaaactagtactagtgaaaattacacagaaatttgtactgctagtatatcagtactgcaaattgtactccaaggcagaagaatgccgccaataggaagagtggaattttttaattagtgggggtggtttcgagataacagtaggatcaagcatgtttaccgaggtggtaaaaaaagaagcattgtttgtgtggtgtgatgaaagagaaggcaagaaaaaataatactgtaataataaagaaagggaaaagaaaagggaaaaaaaaaaagcaaagctttgcaattaatccatttggcacttgagcccttgtgtgggcttaagcacatggggtggggggcacatatatatatgcggctttccccctagccctccaaaacttgctctccatgccctccccgtctcactgacggtggtccccaccgccccacgctccccccccgtgggccccgttcgtcggcgaccgaccgctagctccggcgaccccctccccgccgacgagatccggccgtctccggtgagctccccccccccactctctctcctccccggcgcgcggcgcgttgtcccacgagaaacccgcgtaaccgctctcctctcttgcttccttgtggcccgtgcgccaacgcgcaggttttcttggagccgctcgtcgtggctggggtggcgccggggggaatggaggcggccggcgctcgcgcgggcggtggcggccgggatctcgccggcggcgcgcctcggtgaggtcaggatgtggctcaattctctcgtttggttgcgaaggtctttctgttctttttttctctctttttgtttggtgagtgcttgagctgaagtcgtggctcgtagatttagaggaaagttaattctgttttgttgtgagttagtggttggtgaattagttggggaaaacgtctgcattttttttctgtttggttcagagcgagaaaaattcgagatttttggagagctttgtgtcatggagagcagcaaccagatgtggccgtttcttttgcttgcggatgtttctttttttttgggtgagaatagagaggtttttttgcttgcattctgcaaatcttggggttattttctgttttgctggattttcctttttgttaggatagataattagttgtcgtcttccgtgtgaattggtcaggtcagatagccaccttagaggttatttttttcttgtgttgaatccaaatctagaactagcagatgatagtagtaatgtactagccggtgctttggtacaaagtctaattattcctctgttttagatgaaacttgatggtagaaatgttttggatataatttgtttcttgaggcaaatgcttttttggatcaagttggctaagaagcagaaaccagtttggatgcccaggctagcagaatcagccatgtaggcaaatatttttttgttggtatcaacaataaaaaatgattgcatatgattactaacggaagatttggaatcgttggtcttagtggtacaaaattttagttgtttacttgattctgaatacgccaaagctgggggaaatatatatttttccatcaaatcaactctgaagatttttttagtgaaataaatgtacctattaagacgaacatgcctagatgagtccattgtttaactctgtagtggtatctgagctaaaattatgtatattgtttgctctgttcttgatccagaaatttagtgcatttcaaatacgctgtgctcattttgctatttatctcaaaatattttccagatgtgatctgtgatctgtccaacctttgtgtactcgggctcattccacagttaacaaaaaagatggaagatttacaagattgtgactgcaaaagccttgttgctgttcctggttctgtggttctgcacctctttaggctgtttaatcagcaggataattcctggcagaagtacacattagcctactttcttttggtcaggaatgagtacttctctagggattcaaggaagcattcagatgggaagaaccaacttcttgactgctgtgatgattcagaattagatttggatgtgctgtatgctgatttggatagtaaagaactggagcttaagttgcagaaacctgttgtcaagactcaatcaaaaggtgactcaagtgccagtggatcaaatgattgcttctttcctggccttcacgacgacctggctcaggactgccttgcttgggcgagcagatcagactacccatcgctttcttgtttgaataagaagttcaatttgttaatcaacagcgggtatctgtacagactgagaagaaaatatggcattgttgaacactgggtgtatctagcgtgtagcttgatgccctgggaagcatttgatccttcacgcaagcgatggatgaggctcccaagaatgccatgcgacgagtgcttctcttgtgcagacaaggaatcgcttgccgtcgggacacaactgcttgtgtttggccgtgaatatacaggtcttgctatttggatgtacaatttactggcccgtggttggtcccgatgcactccaatgaacctgcctcgctgcctctttgcctcaggaagctttggtgagattgctattgttgctggtgggtgtgataagaatggacaggtgctgaaatctgccgagctgtacaattcagagactggtcattgggagactttgccagacatgaacttgccgaggaggctctcatctggtttcttcatggatggaaagttttatgtcattgggggtgtgtcaagtcagagggattctttgacttgtggagaggaatacaatcttgaaacaaggacatggagaagaatacatgatatgtaccctggagggactagtgcctctcaatctcctcccctagttgctgttgtgaataatcagctttatgcagctgatcaggcaacaaatgtggtaaagaagtacgacaaaggaaataacacctggaacatagtgaagccattgccagtcagagctgactcttccaatggttggggcctagctttcaaggcatgtggtgatagattgcttgttattggtggccatagagtaccccgtggtgaagtaatattgctgcattcttggtgccctgaagatgggaatggtggtgctgactgggaagtgctctcggtgaaggagcgtgctggtgtattcgtttataactgcgcaataatggggtgctgaattacatttctttcggtataatccgtatatgcctcttgtttagcaacccacccatttcttgctgctgcttagctaccccctataatgacctgtaattcagaaaaatgacaccccccttttcgtggagctctcaatgaaatgtttgggagagagcatagagcattcagttcagtttacctggaacttcttttaactcgttcaaaatttgttcttcttgtccagtatgaaatttatgcagtattctttattcatcatccttgctggaaagtgtgcctgttttattgtcctgagttcaatcacatttctctctttcctgattcatgtctgcaccatgcaatatctgttgttctgagttcaatcccatttctaccatcttaccctgattcatgtctgcactgtgcaaatgtcggtggtttgatgaacccaccttataattgtgcactgtcagatgtttccaatgctcagctgtccttgttattagaaatttcagagtggtacaattggcggtaaaaagctacttttgctaccttaccagtacactctctggaagtgatttctggcaatatgtacaattttcaggttctgtgtacttctataagtcagtggcatgaccaagtttatcagtgtaacagtttgacccgggaccttttctatccttttttttcgtgattcttcggctccaattttttctacttcgtttacttcacggatggttttaatctcatcatcgaacacttttggcttttagggcccacttgcaagcgacagacattgaactgcaactctctctaaaaacatgtccatgtccatgtaaataaatgtgaatgggttatgaatactcctacatattatctgacttgtgctttgttgaaatctcactttaaagagttgacgaagcaaacggtggtagagtacgatccagaaagcatatttgacatattcaggccgggcagtttttttttctgaatacgtcatacgcacagagacggatgatggccacgtacatggcctaacaaacttcagggttcagatatcttttccaggatttcggagctttttgatccgttccaaacttgtccaaaacgtcagtgtccgtagagacttggagccacttgaccatccatgtaatgcaattgtgtgtgt

SEQ ID NO: 9111 - DNA, 1565 bp, Oryza sativa
agtgaagcccacgagctgcaccaatgcaggcatcaactcgttgcttccatgtcagaggtgggaggtcacttccataaagatggcttcgcaatgtccccttggccatgtattcgtagactagaatcatttccttctgctcttcacagtagccaatcattgcaacaaggtgccggtgcctaagcttggagagcatctcaatttctgtttcaaattctttcaagccctggccacataatggatttgcacgcttgattgccactgtagtaccctcatcgacctcacccttgtaaaccttgccaaaaccaccagtaccaataagcaaagcctcatcaaagttctttgtagcagccctaatctctgaaatgctgaatcttctgcccattctatgaccaatggaagatgaattacgtgtcaagggtgatttaccggctgcacgggcatctgtggtgcttttcatagcctcatggaggaccagtgggtgccaaccgggaggggcctccttctcatcagcttttcgtttccttcttacatagcaccatgcaaatagaaccacacttgtcagtgtcacaaaagaagctgagccaattccgacttcttcccataaaattttcctatttctatccttggaaatacccctttggttacccatgtcaatatggccaagaacataagcgaggttgccattcctgctgagcttgaatatctccaaaccattcagaagtggatcggtgcctgaagcactggtcaaggagtcagggcctagctgaagccagagtgagtctacctgctgtggcaagttgtcaaaatagtcttcatgatatgccttattaataccccctgccctgacatacacatcatagtcctcagcagctgtcttgttgttgatgtagatcttgaagaccctctggttgggcttgtcatagaaaagctcacagaaatgaaggcggaccaagtaatcaaagttggggtggacatagaatcgccatgaaacattgaaccgcttgtccacaaccatgttgttgctcatgattcttgcagtctcgtatacatcaatgggagaaattgaggagtcattgtttgagagataacttacacttgaagtgttggacacaatctgagcagcattcgcagaaaacatgaatgcttcatcagtgtaccatggtctgtgcagatactgatcgctggaagaattaagtgcatgccctccaacattcaaccggtacattgtctctaggcctctgttgcttaaaccaagaggaagctgcccatttccagcgctgccaactttgtttactgtgtcattgaacaggttatctggagtgagcatcacctcaattgcattcacaaaggcaaatgacccagggcttggatcaaactcaacctgcagaccacgagaaccaactaaaagaaaatactccttgacaactgcattgatggctgaattgctcacagtgctcctccaaacaatctcctctgacacgttgaatttcgagaccagcttgaaatcatttgcagtgacatcaaacaatgaatcattcccactgaaattcccgaatgtgtcaggg

SEQ ID NO: 9112 - DNA, 3441 bp, Oryza sativa
agcacatcagctaggtgtgttcgagctaaagaaaatgcattaccataatgggcattggaaataacattttccaactcaccactcctgatatcccatacataggcatccctaccagctgtactggcaacagtatttccatgaggtgccacgctccaaacccaatctgcatgcatgaacttctgaacacatttcatttcggatctgtcccaaacacggacagtcatatcccagctaccactgaaaatcctcaatgaatccaaggcaagacaagtcacaggtccttcatgcccccaaaggcgaaactcaggactctggtcagtgccattcccagagatgtggaaagggtaagaattaccttcaacagccctccaacaatgaataaaggcattggttcctgcagtgaccaaaagcctagtgtcagctgcaatggcccggatggtgcaacaaagtgggcgggacttatcaatcaaaagcccttcctccaagtcccacattcggatcacagagtcattaccaccagtaaatatcagatttactgatgctagaaggaacacagtgcgtacatcctcactgtggtcacggagaacatccacactgaatcttcccatgaatgatttacttcgaaactcccgctccacaaataatgttttccaagacttccaatctgaagttcctcctggaaccaagggcccattgagggtgactggaggagtaggaatcccccacctttcacagtagaacttcttccacccctgatgatctgtggctagggtatgcagtagggtggagacgcaagatacaatgccaagttcctttggatcgaggtgttcaagcacttcacagaccaatgcggatggcaaatcagtgaagcaccatgagtcacactttgaggcggtctcaccatcacttgtttcaacatttttctttgggtcggaaagtaattcataactgcacttctggttattcaatgtactgaggctattccagtgtttagctttcccgttgtgagaaacgggctttgcctggacgacagtgccttcagtgacaatgcatgaacgattcacagatgaagagtctcctcttgctgttttgcaatcaaagtccataaaattatgaaatcctacctaaagatggatccccgccagcagatcccgaatccaatcaaatcagaaggagaatacctgaaaaaaaaaatcaaaatcttcagcttaaacttgacaaagtccaatttttatggttaacataattggaacagccaaatggcacaaggcttataagagtaacttccaatcacagatctaattcctctagaatctgacagccaactcaaacaaagaggtgggttggtacttgttactaacatggtcatataaatcagtagcaaacttgcctatcagaaaaggggacgatttataataaacaaaccagtgattctaaattaactcccacaaacttttttcatagagatgagaaagtcgatgctacggaagagggattattgaactctgaattcgcaccaaaattaatagtaaattcggatcaaaacaagccgaataagctaagggtggctccaataagatcaaagaaacctccacaacacgtcaacctagaaccttcgcaccgcacaataatcaaatcaccaaatctgagattgcatgatcatatacatacaaaaagtaaacctaataagcagatcaaaccgggaaatcttagcaacctgcgaccaaattcgaaacgtagggaacgagatctaactcttcaaaaactaaacgagcgaggaatctaccaccgtgccgcccttaattcgaagtcaaatccaacgcagcgctgggcgtcgcccgcaacgcgcatggaaaaccccgaaaaatcccgcgaaaaaacgcgcataacatacttgattcgtcgcgcaaatctacgtcccctacccaagcatgcttgaacagagagcattaccagatccagtaatcaacacaatcgatcagggaaagaaaaatacgaggagaaaatttacctcgatccgagcctccgatctcgtcgaattcgctcggagagatttctctttattcggttttttgggggaaaagaaaatttcgcgatttgggaacccacgcgctgcggccgccaggaggagacgaggatcacgagacgcttcgtctgcaccgcccgtgccctgagagcaatgtacggcccagatcaagtccaacgcagcctcgcttccgatccggaccgtccgtgcactgcacgcagacagagcagagtccgtattgggctcgaatccggtgagccttgatgggccgggatcccatggcgttccaactcgcgtgctcttacgtgggccgatatttaatgacccagataagtggtttctactgggccgggctttgaatacccaaaaaagtagtttctactggagcgggctctcgtattatcgtgcacgtattgtctagaaaatgtctattttgtttccttcaactatagctcaagtcttatttcgtccctgttcttcatccgtgacggttggctcgatgccaatacgccatcacctctactgtctactgagttctaaacagtccctaggatcggcttcttccttcttcttttttttcgcgggtaggatcggcctcttccttaggccttgttgaacaagttctaaaaaaatttgttaaaaacattacatcgaatctttaacgcatgtattaatattaaatatagataaaaaaactaattgcacagtttacatagaaatcgcgagacaaattttttttagcctaattagtccatgattagctataagtactacagtaatccatatgtactaatgatgtattaattaggcttaataaattcatctcgtggttcccaggtgagttatgaaattagttttatcattcgtgtccgaaaacccctttcgacatccggtcaaacgtccgatgtgacacccaaaaattttcttttcgcgaactaaatacacccttattttccatgagcatgtatcctgaattgccaaatagtgtgcttcgtgaaaaaactttatatataaaagtttcttgaaaaaaagttaaataaattcatgtttcaaaattttaatagtcaatattcaattaattaagtattaattgcccatttcgtcttacgagcgggctgattagctgagtcctactgaacatagccggaagcgaaggacggaggaggtacagctactacctccagccgtccaggcggtccagcgtacgtggaagcaaacaagagcaagaaaacaacggcagacgtctcaaaaagagcaccgactggtaccagacacacacaaccagaaaatggctcgagataagtacaagcgtacagcctgctcgaccatgtgtgctcctcctcgttcatcagcctgtgtagcgtgtactactccctccgtttgacaccgttaactttttagcatatgtttgaccg

SEQ ID NO: 9113 - DNA, 2497 bp, Oryza sativa
caacctgcagaccacgagaaccaactaaaagaaaatactccttgacaactgcattgatggctgaattgctcacagtgctcctccaaacaatctcctctgacacgttgaatttcgagaccagcttgaaatcatttgcagtgacatcaaacaatgaatcattcccactgaaattcccgaatgtgtaagggaagaaatgcagcctgaggcagtagttccccggcagcacgctgaagttataccaagatgccgtgctaaagaaacgcgcggaatggtacaccagtccgaagatttcattgccattgctgctcccagcctgcgacgcagctattccagggctgcttaaggtaaaattcagcccgggggccatgtcgccgatccatctccggccgccagcatccacagtcgcgtttgaaccacagctgagaagcaaatccctcccatgaactcccaacaggtgcaaattagcaagcacgatgcttgcaactgccagcgcaagtagcctcatctgtaacaatcaccactccactgccagattttagctcttgcaggtctcatttagactagagcaagcatctgcaccctagaaatcaaacaaacggaaatcaggattcaaccgctagtgctaccaaaaagtaccgagatcttttgtggctagatccatattatatataaacaccgaatcaaacaaacagaatgaactgtttctgctcaacgattcagtctatgcctagaacacatagcacgaccacgaaccattccaaacagcaatcgagcatctcgaccaaccgacgagagagagagggggagattcgcattaccagcgaacgccgaggaagaagaccgcgcccgccattgcgggagatcagtcccgcccctccgctaccgtcacacgccgcgggagggagaacaccggaggggaagcacagctgcacaggaggcggagccgcgcgccggccaaacagagcggaggagcagccgcccgcggccgccgtctcaagaagcagcagatcggcgcgagttgctggctggcggcggcggcggcttggagaggcggacgcggtagcagcaggcagtggcggcgtggccgcgcgcgggcgcaggcggcgatgggcggctggggtgaggagcaagagaggtgcagtggagtactgcagtgcagcaagcaacagtgttggatgtggatctgcggttcgtgggctcttcttttggtcaatcgaaaggatggttattagatcagtggagcatgtgtgtccatgtagacaaaaataaaattatagaccatctcaaaaagatattgttataaagttatgtagaaactagatggtgctaatttaattggaatgctatgtagcactaggtattcgggaattagaattgtactatcattaagaacgataatatatgttttgttttgttgtttattatgcttttaaatttagtagactgtctaagtaaatgtgagttaaaatgaataatgtgtacttattcggccacattgacatataaatccggccatcctctatttttattatagagtcattcctccgttcatcttttaaaagagaagatggcataaaagttagtacaaaagaagccaccgttaaagctctagtcgattaggatattattacccattcgttcaggttataaaactttttagcattgtttatattcatatagatattaatgaatctaggcatacatgtatatatctagattcattaccatatatatgaatgtgtgcaatgctagaaagtcttataatataaaacggaggaagtagaatataagaatttccattaatacatgtaggcaaccaattttgacaatagtggtaaaaactaaaccacctctctattttagcagtataaaagtgtaacaaaaggttcaaataaaatatttctttctcaaacgaagatattaatgaagtgcctgcctccaaagaaggctcgacgatagtgagttagggccagtttagttctcaaaaattttccccttcacctatcacatcgaatctttggacatatgcatggagcattaaatgtggacaaaaagaaaaaccaattgcacagtttagctataaatcgcgagacgaatcttttgagactaattaggccatgattagccataagtgctacagtaacccacatgtgctaatgacggcttaagtaggctcaaaagattcgtctcgcggtttccaggcgagttctgaaattagttttttcattcgtgtccgaaaaccccttccgacatccggtcaaacgtctgatgtgacacccaaaaatttccttttccccaactaaacacagccttaggagttaggatgcctactgtagttgagtggagtagtagtattgatgtagattttggttttttttattcactctgctggatacttgatgtcgacttgttaacaacactataatggtaacaacatgcaagctttcattgtgatgagggcgataagcaattgcattagctagagggctgcaggaat

SEQ ID NO: 9114 - DNA, 3010 bp, Oryza sativa
atcaaaagttaatgagacaggagaaattgtaagactaaagttagctgtaataggcaatagttctgtacttctgtaccagcactgtactgcaagatatgcaatttttattcaagatttctggtgcggatagttgactaatcatagtttacaatgtcaaagtgtccaacacaaactcatgattatttttagtacgccgtacacattagtcgcttttacttggtgcaatcaactgaccaagtcatctcagactagttcctgatcaaccaatagacaactgttggtttgttgggcaatccagagatgcgaattgaacatatagatatgcatgccatgcccgataagttgcttcgtgcaaaaaacagaagacaggcaatttcttgctcatgcaaccactattatcctttaatcctgactcctgaacttcacttcttcatgaagttacttctttaccgcaccagattcttttccttatagtacaccctctgaaaactgtaacaaaaaaaaaactgggtccatcattgtgattgaaaaattttcaccacttacagttcaacaagactgtgagggtctcagatgtcagtgaaacccaggaaggcaggaagataggtgtactggcatgatggatggttcaacaatcacatagtaaaggaaagaggcgaaaaactattttgtaaacactgttcccagaaagaaacggtatggacgtgaaaaaaaaaagcaatatcataagatgtaaaagacaacaaaatacctcatcatgtgcatctttcaggttgcatgcatgaaatttaatggcaagaaggtccagattcagaagaaaatgatgggaaggccagaaggcaagactataagagtgaagatcagctgcaattatatacattctcttcagatatttcacattttcaatctcatagtggacaaaagatagttactttttgtaaataattatctaatctcacaaacttaccaaaacgaacaatacctttcccagcttcacacaatcccgatctatattagatcctgatcacatacagccctagtgaaaaggtcttggccattataagaccccaatagtaccaagctaccatatcagaaatattactatttgaatatttgagttgttccataaatcactggcatgagaccacaatctagcacattgatgtaacaagttttgtccaagtacccacccgaggaacgaaaccttgctccaccatttgcttcaagacaagatgcgcgtcgtctaaacagtttacactacagagtccatctatcagtaacttgaatgatgagaaaccgggcctcatacgttctgccctcatcatgctaacaaggccctttgcctctacaaactttcctgagctcaaaagaccatcaagaagtacctgatatgtccctgaattgggatagcatcccttaggaaccattgacttaaacaaattgaatgcctctgttaccctttgttctctgcaaagaccagcgatcaaaatattgtagacaactgcatctgcaacaatatcctccttctgcattctctcacaaagctcgaatgctttgtccacctgaccatgttgacagaggaaattcatcaatgtagagtaggtcgtcacattaggcacgcaaccttgcttcggcatctcatacaacagcgaaatcgcatcgccaaatttgccgaactgacacaagcccttgacaagaatattgaagcagcaggtgtccaatgtcactcccaaccttgacgcgctcaagtagacctcatggacaacttcgtactgcctcttacacacaagcatgtgaagaacatagttaaaagtcttggtcgacggccaacagttatacccgggcatcgcaaagagagtctcgattgctttctcgggatggttcgccacattgccgtacatcttgatcagcctgtagaagaactcatcagaaaacctgaacctctcagctcttgccctggccagcaactcctccacatcactgaacctcctgcaggatgctagcctgtcgatcatcatgctatagagtgcctcattgggcttgtaatcccttctatcacaagctctcttgaaggaactggtaataaggctaggatccctgatgttcgcgaagatcttgagcaattcgttgggggaaagccaatccttgtggtccaacctaccgatccagtatccgtcgtcgcacaccgcggagcgcagcctcaagaacggcggcaacgatcggcgcgccacggctctcgacatgctgttggctgtggcaagaacaagaagacatgaacagtgtgggtttgaaaggcgggcgcaagataagcgagggaggagagggtggggggggtgaaggagtagtaccttggctggcgggaggtgaacggtgaaccggagttggggtttgaggattcgggcggccggcggcgggggaggaagaagagaaggaggcggtggttgccaccgcgggcgacagcggcgatgtggtgcgcggactggaccaagatggtgggcctatggtgggccttgggctctttcttaccaaaaagcccaagtacgatagtttttttatagtttataaagttttgtgctgagctattatacgaagtgaccgcgtggcctaatggataaggcgctcgcctccggagcgggagattgtgggttcgagtcccatcgtggtcgtttttttctctttttcccatcgtggtcgtttttttctctttttcccatcgtggtcgtttttttctctttttttctcttacaatgtttttgaacgttgaattcctaacaggaaaggattcacatggtggtaattacgatgtagtactacattcagcaatgagcctctctagactctactaggaatatgcatgcaaatatcttgatagtttttacaaagtaaagatataaggggttgttcaaatttatgtcaatttaaatcttattatttttttaagttatcaaagatgtacatatatttagtccttgcactgtgtttttaaaatcaactactaattccatttcaa

SEQ ID NO: 9115 - DNA, 2864 bp, Oryza sativa
aaggattcctttggaacgcagcacctcacgggaatcccgtaagcaataagaaccagacaaaaattcccgcgttgcaaaaagaaagtcaccaccagtccggacggatctccagactaaacgcaagcgggagagagaccgagagagagatgcatgcaaataccttcaccttcaagccgatccgaaccgagaggcgcagggcggtggaatgaggccccgaggcccgaggcccagcctgctcgccggaggcggccccgcgcagcgtggagaggctagctcggcgacgggaaggaggggaggtcgaggcgggcggcccgttcgccggagcccccgcgggcgaggcggcgacagagaggcggcggtggctccggctggctgcgcagatcggaggagagagagatggcgagagaggagaggagaggagagggaaggagagtaatagacggtggcgcaacagtttggtccatttttacttctcgggctttctttattttcgaaattaacgtcgctgtcagttactcggaccctacgtacagtacagccatgtaggggaatttttgaaaagtcaaatttgtactccctgctttgggactagattttaatcagcaattactatagattttgtatcatagatttaacgttaaatttgtaagaaaaatatatttaaaactaagtatcgtaaaactataatataaatttattgttgaagttatctagaaactacatattttgaaggagcttaaatttctagtactaatgttatgttggtgttataaacattgtagttttgtgattaaatcaacactaaatttataggttttgtgataaatttgctacataatccgtagttttgtcatatttcatcttaaatctgttttgtgatagtttgatcaaaatatcttgatcaaaatagagtaaatttactctacttaaaaatttaatacaaatatagaaaaatataagttatgcataaattacatttagtgatatcgcaataaatgatactcgtatagttttttaagaagacaaacagttggttttataggtttaaaaatatattttgtgagcaagtaataaaggtcaaattttgataataatgttctttccattcttgacatttaaatgaataaagaatacacctagcgtcccgggtttacgtagggattcaatcgtagaaacaactttatgtatttccaaaggatctacagtttgcttgcgagcaatatctacgcaagaatatatttttagcttgccatggcaacgataaataaactgataaagccatcaaatttgtgcaagtcaaagctccacaattctgccacgctgctcctgcgattgcaaggcgccttcctcacttgttttaccttgccgaccgattcgtcagtgcaattatgtgtggtgctgcctccaataaacacaggtctctctgaattaaaaatacagtaataataatctaccagtaagtacttcatcagtaaaaatactaaacaacaccaggaatacgattcgaatcagttcctaaatacgatagtataatgattcaaaccaattacgaatcaaatctggatacatcggtggatcaagtgtcagtattttgtcggtgaaaaccaaccataaataaacacgaagaaaaaaaaaagaaggatgatgacagaagcctacaagtataaacgagcactgctgggtcggttgattgattgtttcagattggcgcgtgcgcagagagagagatggtcaacactttcatgccaagagattttgagattgtacctaacaattcctacttaaacgtcagcacttgaatttcttttccatccattacatctgtttcctcctctttttttcttctctatttatttatttctgggaatcttctgttcttgctctctgattgggcttcagctatgcatgcacttgcaagagtatagatcgcatcctgcctaacttgctgcaaatcactcgtttttcatttagtttttgatggatctttgtgcgtttggaggaactgcaatcaaggagaaaatttggtcaggctcaacagtttcagtactagtagtggtactaatggtcatggggcagaatggcagatggcccacctcagaaacagtacacgtcttatgatgggctcattgaaatgatgaaatgttcaatgttcagatcaagaaaatgattgatgcatttgataccgaagttaggtaggaggaaacccagccaagccgatgatagccacgttttcagtggcgaccaggctgaaatgagatgggttaaaaatgaaggcgaaagcagccaaaacctgaactttccagcaccagagcaccgttcagtcacctgtctgattcctgcagcatgtgctggtctagattgatgcacattgtgatgaccctgttgtcatgtgcagtggctaaccggctgttcttgttggcatttgcaaactgagcaccagttcatcagcatggacacatgtcccagcttctctgcagtctgcataagcccagggatctgtggagtctggacatctgtcaaggtaaatctcagcttagatagaacaattagatgtaaataagcttcttttccatggaggctccatcatctccagcttcgttcatggcgatggcgacgatgggttcgcccatgacacgtcgttctcagatcccctgttgctgcctgcacttttgtcaaaccattagtatgacattgcaactactagctctaaaacactggaggcataaacagaaatcgccttaccaaaggatttatttttcagtttatgtttcaccagatcaaaagttaatgagacaggagaaattgtaagactaaagttagctgtaataggcaatagttctgtacttctgtaccagcactgtact

SEQ ID NO: 9116 - DNA, 2734 bp, Oryza sativa
gcagaagtacacattagcctactttcttttggtcaggaatgagtacttctctagggattcaaggaagcattcagatgggaagaaccaacttcttgactgctgtgatgattcagaattagatttggatgtgctgtatgctgatttggatagtaaagaactggagcttaagttgcagaaacctgttgtcaagactcaatcaaaaggtgactcaagtgccagtggatcaaatgattgcttctttcctggccttcacgacgacctggctcaggactgccttgcttgggcgagcagatcagactacccatcgctttcttgtttgaataagaagttcaatttgttaatcaacagcgggtatctgtacagactgagaagaaaatatggcattgttgaacactgggtgtatctagcgtgtagcttgatgccctgggaagcatttgatccttcacgcaagcgatggatgaggctcccaagaatgccatgcgacgagtgcttctcttgtgcagacaaggaatcgcttgccgtcgggacacaactgcttgtgtttggccgtgaatatacaggtcttgctatttggatgtacaatttactggcccgtggttggtcccgatgcactccaatgaacctgcctcgctgcctctttgcctcaggaagctttggtgagattgctattgttgctggtgggtgtgataagaatggacaggtgctgaaatctgccgagctgtacaattcagagactggtcattgggagactttgccagacatgaacttgccgaggaggctctcatctggtttcttcatggatggaaagttttatgtcattgggggtgtgtcaagtcagagggattctttgacttgtggagaggaatacaatcttgaaacaaggacatggagaagaatacatgatatgtaccctggagggactagtgcctctcaatctcctcccctagttgctgttgtgaataatcagctttatgcagctgatcaggcaacaaatgtggtaaagaagtacgacaaaggaaataacacctggaacatagtgaagccattgccagtcagagctgactcttccaatggttggggcctagctttcaaggcatgtggtgatagattgcttgttattggtggccatagagtaccccgtggtgaagtaatattgctgcattcttggtgccctgaagatgggaatggtggtgctgactgggaagtgctctcggtgaaggagcgtgctggtgtattcgtttataactgcgcaataatggggtgctgaattacatttctttcggtataatccgtatatgcctcttgtttagcaacccacccatttcttgctgctgcttagctaccccctataatgacctgtaattcagaaaaatgacaccccccttttcgtggagctctcaatgaaatgtttgggagagagcatagagcattcagttcagtttacctggaacttcttttaactcgttcaaaatttgttcttcttgtccagtatgaaatttatgcagtattctttattcatcatccttgctggaaagtgtgcctgttttattgtcctgagttcaatcacatttctctctttcctgattcatgtctgcaccatgcaatatctgttgttctgagttcaatcccatttctaccatcttaccctgattcatgtctgcactgtgcaaatgtcggtggtttgatgaacccaccttataattgtgcactgtcagatgtttccaatgctcagctgtccttgttattagaaatttcagagtggtacaattggcggtaaaaagctacttttgctaccttaccagtacactctctggaagtgatttctggcaatatgtacaattttcaggttctgtgtacttctataagtcagtggcatgaccaagtttatcagtgtaacagtttgacccgggaccttttctatccttttttttcgtgattcttcggctccaattttttctacttcgtttacttcacggatggttttaatctcatcatcgaacacttttggcttttagggcccacttgcaagcgacagacattgaactgcaactctctctaaaaacatgtccatgtccatgtaaataaatgtgaatgggttatgaatactcctacatattatctgacttgtgctttgttgaaatctcactttaaagagttgacgaagcaaacggtggtagagtacgatccagaaagcatatttgacatattcaggccgggcagtttttttttctgaatacgtcatacgcacagagacggatgatggccacgtacatggcctaacaaacttcagggttcagatatcttttccaggatttcggagctttttgatccgttccaaacttgtccaaaacgtcagtgtccgtagagacttggagccacttgaccatccatgtaatgcaattgtgtgtgtgatgttgccaccctttggacattttcttcctactgacagatcagcatgatgagctgcagacgccatggcatacgtacagcttcgagctaagatctcatttctgaaatatatttgagttcagacaatttttgtgtatgatttggtcaagtggtttgttagttcgttgcagagaaaaatttgatagactgatgacaactcagagatgtgaatcgtgcagagcttatctttgaggctttgaacatcttcatttcgagatatttacacccagatcgagaagcaatacgctgcctatcttaaacatctcctcgtcacaaaaatcaaaca

SEQ ID NO: 9117 - DNA, 12788 bp, Oryza sativa
aattaattaatcttttaacttctggtcagcatgtatccatgtggagttgtcttcttccactgctaaacatttactgcctcttctcctgacttactccctccatcttaaaaaaacaatctaaatgatgacataatacaatatagtacaacgaatatgaatggtcctatccagatccgttgtaattagattatgtcacatcttcataattgagttttttggatgaataaagtatcaacttagaacagtttgccaaactacaatctcgcttcgccaccatcaaattcagggagctctttttcgtttcttcttgaaagagagggctccatgtctgtgagccataaactgttgcttcagacacaaacctgcacaatcttctccttctgaatcagctgttctctgaacaatcgatcatcaccaccagggctctcactcgacaagacaggatacagaaagaaagaacagtgctgctgctttccttttattggactgatccatccatgaatcgatcgagtcgggagaggtatgacgacgatgattacagacaattaacagtggggttttcggttcctctaccacctaatttaatctaccagctcaccaaccattattacaaccaattttgcatgcatgccacaaaaactgacatgaacaactcaagatacgaaccaaccaaacgcaaacaaaaccaacaccattgttttttgtactgctatgcatttctgggcttcttttgtttttcaccttcagtcgaacagctcccactgcgtcgttgcaggagcatcgaacgtctcccatttggtcgtcactatcacattctgcaaccgcgcgttggagatcttgagcacatccagcgtctccacgcatttctgcaccctcttcgcctgccaaaaaaagaaagaaaaaggtctcgttatctgatccatttctaggactaatatgcattgtgttggtgtaatttaagattgttttcttgtcatctgtaattattatttgcacttggttgtaataagaggatcgtgactgtagcttttgttgaggtaaaggtcggattatcaattattgaaaaaaatggaaaggaaaacagtgtgtagatagtacttggaatgtaagtaactgttcatgagtgggtcacatcatttccaaagaaaaagttaatggccttttccattctaatcttgaggtggcatcaggagatcatcacaggtaatgataaaagcattttctctttttactctctaacaaacaagaacacccaggatgcctgcacttttggtctccgtctactcttgttgtgacctaaccagaaatgggcaatcttttgcatcttgatctttcttttcttgtcatctactctttgcacaacaaaagcacacaactttcctcaaacttggtacaagttcagttgcttaagggctcagctcacactaaagagcgatctagatgcaaatagctggcatcacctaacattttcagcaggaaaagggcttctaggtagaatttcttgtgtgcttttttccttttatttttatgctgaaaaggcaggataagcattcttgtgtgcctggaccatgtgttttccagaaagaagctaatgatcctgtgactgtttcggggggcaagtaggacactcacccacccatgataggtgacacagacagctacagctccttctcatgaaaacttgtactgattgtcatgccactgcttgctacaatcctactcaggtaaaccgacagccccaagaacgctcaagccggtgagaatctaaaaagactaggttctttttatcttcagtcttctaatttatatcctagattctataactacaaattcttagaatctattacgagaatctaaactgtttggggagctggagatttcaaggagaagcgatagttgtcagaagctactctaaatgtaaccatagcatctctcattggtaccaatggtactgtaccaaaaacctataatgatgttcttgattctaatgcccaatgctaggctctttgcaaacaggagatgatgcaggtgctcacctgaatgttcttctgggaagacgagtccccttcagcgtgtatgctgtccagcttcacagcaagccgcatcagcagctcgatcagcgtcgtgatctgcacctcggcgaccttgctcccacgggtgatcgacttctcgatgctccttacctggtacaagaaaagaaaaggaaacatttttctcgtctaatcagcatcagcatcaggatcagatcatatcatatcacttctgccaaaatgagtctttcagaaactaaagctgagtgaactctgctttagtacagccaatgatggaagtgccctgagatgcaggggcacatccttgtcagggattgaatttctgtccctgctttggtatggcccggtttatgcaacatactaaatgaactcagggaccattgccttgtgcaatggatgaagaaatttcaccgctgcttcttcatggccagaatcgatggacaaccgtgcaatgtagtatcaatttggtcacctaatttcttggacggattactcaactggccatccaattcaatgcaccatgccaccattcccctccccatgcctgcctgtctgaaccagcacagattcagaccataactagccccctaaatcgttcaagcttcatctatctatcctactacctccattccaaaatagtataaacatttcaacaacgtgttgtgtttttgaaaatgtatctcaacatgcgaaaatacttacattttagaatatggtgataaccgatgcattgaccatggaagaagaacagaagaaacaaagaaagaaagaaagaaagaagcagggtttgttttaagtttggtcacctgatcggcgagcttgtcgacctccaaggcgatggcgccaatggcgcggttggcggtctcgatcttggcgctcttctggcgctcgatgtagcgccgctcgacgctggtcgggtcctcggcgaggtagagcttggacctgttcttgacgccgcagacgtcgaggtagtcggcgttgccccgctccttgcccctgtacgtcagccgctggtccgccgccggcagcccggtcctcgccgccagcagcttcttcagctcgcctgccacaacaccaaagaacagctgattattcttctgaaattcttcctacatgctcttgggacatggtggattggatcattgctgcagctactggtcaccaacatttgccaacgttattgaaaccgcgtgtgaatctgtgatcaatacactgacatggtaatggtggtagctctgtactttctttgcctggctggtgatgtttgacagtgatgaggttttctgtggcacgtttggccatttggggaccagatatcagtggtcaactctaccgttctgagatcgtgaaaaaatattttaaaaaaaaaagagttcctccattattttttatgctccagcctccaggtaaagttaccaactaaatcacaaaaaaaaaaaactaaattcctatcatatttccgatgctacaccgtgtcatatttcttttcacgtggtgaagcaaatactataatataacaagacatcgccaattaaggctaaagctagccttattaattgggtcaacaaacctcgacaaaattccaatatcatctagtaaaacattgtttcaatttaaggtttacttcttagctgactttaccctgatcacgaccaaaaccacccgaaccttataaaaaactcaccgcgcgatataaaatgcgagatgaggcgagaagaagagccaacaacgtggtgcgcacgacgggcgacccgtagcgatttccacatctcgctgcagtagacaaacagtgagcgccggagacgaagcactcaacttcacacttcccagaggtgtcggtgcaacgggacaaacgatcgcaacgtgcccctgcctccactccaggctgcccctgggccgtccgattcggccgcccgtacacgtggacccatctgcggcgccagaaactagagagagggagatccaccgtatccaacccaagccccccacccccccccccccccaattgctgccattgtcggggaaaggcaagcttaattcaggcagcatctgctccggcaaagtggaagcaaagcaaagcaaagcagagaacagttcaaagagctcactgatcgggtgattaattttgttaattacttcattagcctcgtaatctgcattcgcctgtacttccccgtcgcattgaaccgcccaatgccgggatttcacggaaggaatagcagtgctatggctcgagaaatgaagtcgtgtcagtaatttttttctctgtcgctaatccagagcacgggttttcgaagttaacgcagcaactgtgacagtaaaattactagcaaaaaattgttttatttcggggtattttcaggaggaaaagcggtcaaaatttaaattacgagatggccgcacaagacagaatgattctgaagccgggaatttcgcgctgcacggagcaaagaaatctcggcgcctcacgggctcgtacgaaattattccgtggattttgtttctttcctttttaaaaaagagggggaaaaaataaaggggatgtctcactgtcctaatatcgcggcggcattaattcctccacgcggcacggccggaactcatggtgaattttaaataccacctttgtatttaaatttgatatacttaactcagtttttttttattttaactggctcgtagtacaagccacgattgccagccagcacgggttttaaagctaagtgactcgaggtcaaattttgacccaaaaataaaacaaatttatgccggctatgttaaaataaacattcgcgcgggatttaaaccgaaataaaacagagctgcttttgcttaacttgctgggtttactttccggagaaagaaaaagaaaacatgagtgctgcagtgcaggataatctaaaaaaatgaaattaaagaaaaaaaaactaatcaaaatttcagtttcgtctcgtctatggaggaaagaacaccatcaagaacaaaaagaagaaaaaaagtttaaggcgtaattaagcacggttacttaaccaaagctcacactttaaccaaaggtgagaagaaagcgagaggatcgagagagagagaaatcgctcactcaccgaaggaggcaatggaggagacggcgacctcgtgccgcgcggcgccgtacttgacccgcaccttgatctccggcggcggcggcctcggcgggatccccatccctcctcctccgccgccgccaccgccggggccctcctcgcgcgcctgcacgaccatcccgctcgggcgcacctcccacccggccctctcgtccccggccgccgacgccgccgccgcctccgaccacccgctgctcgacccgccatccgagctcgaccggtgcatcaccgccgccatggacgacgacaccacaaaccccacccctctctcctcctcgccaacaagaacacaaccacttagtgcggggggtttggtgcagtagtgcgcgcgcgcgcgaggtggtggtggtggtggcgtgagggaggaggcggaggctgcacgcgcgtgcgcgcgctcgcggcggaggaggaggaggggaggagtgggacgcgacgcgcttcgttcgttcgttctccgatcgatcgctttgtctttggctttctttttcttcttcttcttctctcttgggtttgccggttttatatggagacgaggcgatggattggttgtatttggtggggttttctttcggcggatgtacgctgcagccaccgggcgcgcggccccgtggcgggagagaacatggtcgcgttgccgtatttgcttccggggatgggcgccggtctacgtaaaacctcatggtttttgccgtatcactttttattcgggtcagttccgcaggttaagtggtgctatgttatctgtatatttgtttactctgaaaaaataattagtcaaaaattgtttttccacatcgcaggtttcttctaaggacttatttttaggtcagtttcgtaggtgtaatggtgctatattatctgtatatatatttactctggaaaaataattagccaaaaatttaaactattcgtatcaagtctaaataatctaaccatgttaaaactacactcgtatgtaattattatatgcgcgaataaccggttaaactacgctcatatctttatatctttctatacatttgaaaaataattagctaaaaatataattgttcgtgtttaaaaaacctatcaagttaaactaatcacatatataaattttacatgtgtgttatttaatagtgctaagttggattcgatttaatttatcaatttctttctgacgcatatcggacgaattgatggtgtatgatactaagaacgtggactgccatgaggctaggcggtgtcgtgtactttttgtattgtgtattattttaagtcggtgagctcatttggcgcattcaacgtaatcggtctaggtcacggctaacacacggtggatgacatgttagtaagacggatttttggcttcacacgttgacgtagcaagatatatatagaccaattcatcttcaaccatattcgagaatcgatatggaatcttttgagttagatgtatgtcaatgtatccatttactttttccatcatctagaagaaacgtattcattttctttagaacgtatatattttgtctctttataatactttttttacacgtagcgtggttaaagtattttagattatacaactgagcgtagcttagttagttaggttccttgtagtcgaaactaactttttaattttgacttctaaacttggtgtgggtgcttgtatttacggttaactattgtttgagtggtacgtgttatatatacccgtcgatagcaaggtgtctatcgtaactttgtcgatctctctctctcactgttacaacagctaccagctgctgggtgatcacactgatcactgcgctaaccagtaaccactgtttaatgatgccagcttgcttgcatctgcaggaacctggatgcacatgagatagtgtacagtagtattattattgtatgactatgcatctgtaagtgtacgtacgtagatcgtaattaataccgagaagcttatatagctagcttgctagctaaactaaacaaggcagtgatttgtactagaactgtagatcaatcagcagctgggattaactaggatggttaattcgattatattgctcgcatacatgagtggtccatgcaaaagagagggattaatttctcccgggtcactccctcgagcttaattgcgcgatgtgacacctgccggtaacgtcatgtgacgcttaacgacatgcgtcgtcgtcccaatcgaaggcgccgtacatcttgtctcgcctcgatcgatcgaatatatcggctcttcatcagcttaaggatatgaacaatgtatttactgctactgtcttaagctcaaggagtattaattgttcactagcttgggcgcttggcaacaaaatgatagctagggacttcatcgatcacactgctagctaccattctgcagctacaaaaaacggccttgatcaaggccaaattaagctttgtggatatggactgcatggatgcaggcaaatagcagtggcccttgcctgacaacgcatatatgacaatgctgtgcccatttgtccattagcttagctgacagtctgaaacttcaggctcggtttcttccagttgctgtcatcctgcctgttagagaagtacgtaatgtatgcatctggcataatgcttggagaagtacgtaatgtatgcatgccccctgtttagaaaggaacagagtcattccgaagaagaagaagaagaagaaaggaacagagagagacgaggtgactgttgctgttggccacaccacactggctgactccgctgactgacactcctaccttacatgggctcacttcctgtcggcccatttactctggcctactccgagctgtacgtgggctgctgcaacagtcactctgggccggcctggaacaatcatgtcaaacaacaagttcgaaccaaagcgtctctttctctgcgttcgacttcgaccgatgttttcttttcttttctcctttcttgcgaggacgcgttaactgttttttttctctctttcttcttttttctttcttgcggtggacgtgttaaaatgttttgacgtcatgggagtacgtgcgtgcaagctccatcatttaatcttcggctgataagccgtagctaaaattaaaattttaaaacttaacttcataggctgtttttaatgttttgttattttattttactttttcattagctttaatttgagatgatatacatataaaagtttcaacataaattatttgttatcgttgataagcgttgtcgcttataaagttataatcagcgtgatgtataccgggtccaatggctctactacggacagagatcctcggtagtactgcacctgcaatgctgccgctaagtcctacatgttagcggcagctactaggtggcagttgtgcaaacaatccccactaccccgatgtcgtcctaagtcgcttacggatcacgataatataatgtctcgtattttcggtgttcaatgacttctattagtgcttatgtttgcccaatctttgaaaatctttggatcccgtcatcccacagctgattgtgagactgtttggtacagctctaactcctaaatttagcttcaggagttgggtctggagtgagctgtctaaacccagctccacaactctagttcattttgtgagagagctccacccagctccactcccagttttggtaaagctgaaactgtttggctgagctccagctctagaaagagtgaaactggagctggagctgtgctaaacagaccctgaatgtcttctcgctcttttcctgattggtgtcattgttcagtttttaccgtctgttggtcatgtgttgtcggtgaccgactattgctaccgctgtactgtccggcaaccggtacattgtgcaggaccgcatgatcgatcaccgacaaccttcatctctttagtcattaatcgctctaacccccatcattctacgaccccatttaatccccaaatcagagatgcaacatagcaacagtaaccagatcacatgcatgcaacaccaacctgcagcctgcactcgctgcagcagggaccgcatgcagaagccgcttgattctgccactgtagtccagctctgcagcttcatttctctcgtcggtttcctgattatttgtgacagaagaagccatagcacagcttgatacagtcactctgactcactgccatgctgttccagggctggaagttcagtgcaacttcctgtctcattcagcctgtgaaaatgttctgatgaacaaaaatcaggaattcaggattcaggtactttcttgagacatcaacaaaatcctgaattttctgatgcagtagcaaagcctaaagattacacgtctcacagtgtcacacactacatgccatagcattatttatgttacagaggggtgctgataattgtgttctccaatggtccatggcacgcacactcactcacacacacactgacagagaggaaagaatcatcaaactaggagcaaccgaggtaattaaaacggaaattaccaccctaatggtgctggtaattaatcatcaacggccctctgataggcgggcccacccaacgccgacgagccgaggcgtcggctcacggcgagccgagccggacctccgactcgcgccgcgcggcgcgcctggcgcgcaccacgtacgccacggcgaccgcgacgccgaccaccgccaccgccgcgacggcgcacgccacgccggcggccacggacacggatctgcgaggcggcgccgacgacgccgacgcggtgatggtggcggtggctctggggatcgccgacgcggcctccggcttggcggtggcggcggcggcattggaggcgtcgagcgcctccgggagctcggcggcctcgggcttgctgccgaagaaggaagccatcgccggcgtcgcctcggtgttcccctcgcggaagtcctcgaggccgtgggactccgatccgacggcgaagagcgccacgacgcagagcgcgaccagcagcgggcggccgagatctcgccggcgggacgccatttgcttcagcctccaagctgcaaacgcagttgaccagcgtaattagcaaaccgctactacaatctcaagctgatttgagcagaagctaacgtgcaataattctgcactacacaaaagcactctttcttcctcgttgagatctactccaagattcagatttttttttgctcaaattcagagcgattatgtgaattgtcccaggagagcagatgataagacaaaacgagctcaaaagggaggaaaaagaaagaaaacaaaaggtccaatccacagatctaagtaccaaaagaagctgttctttttgcagtgcagcaagctaatgaacccaattgcacaaagcaaaaaattcatggtggataaagattcgttttgttttctcctttgcgtgtgacacatacctttgcaatgcaacctaggatagcctaatgtgtgcgagggagagagagaaagcagatcagagagcttgttcttcctcggcagaagccacttgaaggttcagaggagcacaccctgatatatatatatatatatatatatcaaagattcctcctgttatcctctccctctaattgctgtgagcctgtgagtatatatggctggagagagacgcaatgtgcatgagagagaagcagataaccaaaccactcgtgaggatctatctactatctatctagctagtaagtatcctgtggcagtagggctcactgtttcatgcgtggtggagtgaaagctaagcgaggctgagagcattgtttgccatgatgccgccatgcttttttgcttggggccttgtggaaaagaaaacgaagaacacagtgcgtgagagcaagagacagagacccacattaggtgggcatgtgagccttttactaacctttgtctgcttgcttcgatctacttactgactaacactgctgtatgcctgtatttcgcccgtgtgaagatgctgtacacatgtactcttctctcatgttgtgccaatttgtgatgtactctccagctctctgcttatcatcggctcataagtatcgacaattacgtacgtatctacgtcagtttaaactgataagggaagacggacaattcactcacgctttgaaccgtaaaagcgtaattcacggacaatggcaatcaggtgagagcggcgtgcatgggaagagaagcagctcatctctcgtctatcttctgattgattagatcatgcgtcgtgagtcgcctcttcttttggctgggcatcatcatcgatcacgctttcttggcgtttggcagtccaatcacggagctcatcaattccctgctttgttgagatctgcactcactctctgctgcatctccatatgcctccggatttgcagtgcattgtacgtcagttggatcaatcgacaaaggaaaagatgaaaattataagattgtgacaaattttcgagtactggagtacgtactggtagcacatgcatgcttgggtagtcgtagctcgttaaactagcgtttaattaattagttttagctagccaagatctcggagttgatgatgaatggaggaggacatggagacagataaaagttggtgcccctcctactaattaaccaaattaaagcacattgctagtgatagctttgcttttagtagtagttggagtggtaacaatattggattggcatggtgaggcagggaatctaacttgtaatccctccgtcataaaaaaaaaagcaaaccgtggattcccgtgctaacgtttgactgtccgtcttatatgaaatttttttataattagtatttttattgttgttagatgataaaacatgattaatactttatgcgtgacttatctttttatttttttttataattttttcaaataaaaccgacggtcaaacattgaacacgaaaactagggtttgtcttttttttgacggagggagtagggttcttgctgccctggtccattgccactgccagaagaaagaaatggcacaaaatggtggccttcgacagatgtcagcaagttcatcggttggttgcattgcccctgcatgggactgacgattagttggcaccttttgtacactcctacctaaccccaataaaaccataaaggtactactcatcatatggcaatatggcatgatgaatcaagatcaggacaggcaggttagttacagtggctttggtaattaactgtactgactgcccttggatatggtgattgaactgttactaattactgcaatggtaacaccatctgcaacaatgtgctactaccagctatacatattactcctatgtaatatgtagctacgacatggagggaaattgcatgaatggttgatctgcattagttggataatcaatcaaactacgttcaccagaggtcgatctactgaaagtctgaagaatagacatgaggtttctgctaattcatcttcttctccagtgcgatcgatctaccgtggcaatggcttctggtcaccgagagtggatgaacagttgtccagggctgtgccgtgcatgttcttttggtgatgagacaagtcctcctgtctgtacgggaatctggggaagatcgtcgatcaggtaacgtcaaaactgtccgtcctggtgtgc

SEQ ID NO: 9118 - DNA, 5844 bp, Oryza sativa
gaagtgaccgcgtggcctaatggataaggcgctcgcctccggagcgggagattgtgggttcgagtcccatcgtggtcgtttttttctctttttcccatcgtggtcgtttttttctctttttcccatcgtggtcgtttttttctctttttttctcttacaatgtttttgaacgttgaattcctaacaggaaaggattcacatggtggtaattacgatgtagtactacattcagcaatgagcctctctagactctactaggaatatgcatgcaaatatcttgatagtttttacaaagtaaagatataaggggttgttcaaatttatgtcaatttaaatcttattatttttttaagttatcaaagatgtacatatatttagtccttgcactgtgtttttaaaatcaactactaattccatttcaaaatagatgacaccattaatttttctcgtaatgtttgatcactcatcttattcaaaactttaatataaacatgtaaaagtataagttactattatattttttatttgatgataaaacaagttaaagaatagataatatttatagttttaataaaacgaacgaccaagttatgtgaaaagtcaacggtatcatacttttgaaataaagaaagtataacatccatactactataaaagacaatagtgatggtggtggctttatcaccagcccagcaccactacttttgcacattatgtaatagtttaatagttggttgaatcaaatgaacaccatatatattttaataagtatggacattttacccatagcaaagcatgggtattttgctattaaagttataatatatgctcacctaagaagcatgaaaatgagtgtttgtgacgaaccgcatcctacgatgtcgagattattatcatagtgaggctagctctgtaatagatggttgaatgaacttggccaaacttctcttcttcttttttataaaatgccaagtcccacctcccatggtcgatacgtgtcctagtgtgttagcattggataaagaaagtatcttcataaataactcaaacctctactgcataaacacacacaaagctggggtttaggtgctatgcatatcgctcttcctttccaagatatctgtgagaatgtgaccccttctcactgcacagccgccacacccatcaatcttgggcaattaaaagtcaaaaatttatgcatatccaggataatcactagaaaatgggacatgacctaatagcattatgttacgatcgcaggcgtcacccgatgagaaactgatgatcgaccactattagacatcgggttattagaggcgatccaaaaaccccactagagatggttttgtgaattgtctatgcacgtgcgtcattgcaatctgccttagacatatttcaacaaataagtcagaaaaacctacccacataatctacttaccagagatagtaaaaaaaccgccttagacatatgtcttgtcaatacaattatgaacgaggtacaatattatattatatatatttacagacaattatgtcctatgaggatttcttatttaatatttatggttttatggatctatcttatgactatatctctagaattaattagtactccacctcaaacatcatgtcctagctaggcccgttcggtttatattattgagtggataaaattgacatatattatttacttaattatagagatagaataaatattttaaaatataaacttaaaaaatatcatcctaagatataagcattagtggctatgattttagacatacatttatccagattgatagctaaaaatagttatattttaggataaaggcagtaccttaaaacaagtggtctaaacaatccaatacaaggatgcatttttgaagcgttgagcgaataatccatttgcataatccagcgaatatgttgttgtatgtatcggacattgacaatattatctgtagaatatagctttaatctccaatttttatttaaaaaatatgttatatttgaaaagataatgaaatttgtgatcgtgtttggattcaacccgagttcaaatcctggttacaaatagaaacatttacgcttagaatcgacctatagagacagggtcctcgtgtattagacacaggttgcctgtttggtagagctctaactcctaaatttagctccaggagttgggtctagaatggagttgtggagctgcctaaacccagctccacctctctagttcattctatgagagagctccacctaactctgcttctattttaggtggagctggagttgaagctgtgccaaataggcccttaattaaggcacgattcataggggatagctcctgtcatcctgtgcaggggacctgcttctatggcctttcttgaatccaaatttaggtatttcttatttgaaataccttgggtaggtatttaatttcccttaaagccgagggtttctttaaaaaaagaaatgaaatttcgatattttgatagtattgtttttcaatagaatttttttttcatgttttcaatctactcactcctattcagagaagtactgacagcaatgtttaaccccacctaacccaaaatcactaattttttgtactcaatggagtatcttgctagattttccaattaagcacataatcgtacatgcatgcatgtacattccacaaaggatgtatacatgcatactccaggagtattagtgatgtcatccgcagggatatggaactgtcacttcttcagagacttcagtgaaaagtaacacttgtttaagaacagagatatcctatatccaacgtcgccgcaggtagtggagtttacagaaatcttttaacttgctagtggacgcacgacgcatgttggggcgaaactgcgtatgaaaattttcgttatcttccccaaattttccacccatatcgtgcaggtattccacagaccaaggatacatatattatgcatatttatgcacgtgattacactgcataaacaaacagttagtgggactgtaacaagacaatcaagcaaaaataggttgtgtcttacgtaagagtaataattaacacagacacagctagctcgtattgtggtttaattgtggattcctactcaaactacacacaatgaacagattaatttggagtagtagtggaatgcagtgaatataatcatgtactacagcagtatattatgcaagtagtccacttcttcagggttcaggggttgccttttacgcctgtataaattggtactcttgcgtagtttacaagcagctcaaaacacttagctagctagctcacaaaagcatcagagttaacgtacactcatctagctagggaagaagaagctaactaagccatggcttctcgtgcatttgctgcagtgtttgcagcagtagcacttgtagtgtgttcttcagtcttgcctcgtgctctggcctctgacccgagccagctccaagatttctgcgttgctgacaaactcagtgctggtatatatatacaaactcatttcatcaatatatatgttgctacgtgtaaattacagggatatgtcaggtgctaattaagtcacggtattgataacaaacttgttattcgccgtttaatttaaacggcttactgcatattcttttcagcatcatgcagttgggtacgttttattataacaacataacttgcagcaacccaactagccagcccgttggaccatatatatatttgtcaaaaatacagtaatgaaatgagaacaaaaatacaccatcaaatttgtgatgagaacatttttgagactgtatacatttactgcaccacatttttcatcagaaaacacttaaattttccaaggcatggtattttaccagcatattgaatcatataaggaacttcacgtatgtatcatctcggtctttaatttgcaaaattgtaatgcagtgtttgtgaatggttatgaaactttgactacaaaatccaataaatttatagtattatgatattacttttcaaagaaaatctacgtataccattccttatgtttttaaaacaatcatttaaaaaagatattttttatagtttttgagatggtactaaaaatttagaactgtaaaatttctctttgaaaaaatattaatgatcaaagttttaaatgtttgactaaatcttatcataaatgtcaaagaggtttgaccaaagtattaatctatgaacaataaattgcaaatgcagtgttcgtgaatggtttcgtgtgcaagaacccaaagcaggtgacggcgaacgacttcttcctccctaaagccctcggcgttccaggcaacaccgtgaacgcacagggctccgcggtaacccctgtgacggtgaacgagctgccgggcctcaacacgctcggcatctcgttcgcccgcatcgactttgcccccaacgggcaaaacccgccgcacacccaccctcgtgccaccgagatcctcaccgtcctccagggcaccctcctcgtcggcttcgtcacatccaaccagccgggcggtggcaacttgcagttcaccaagctgctcggccccggagatgtcttcgtcttcccgcagggtctcatccacttccagctcaataatggcgccgtcccggccgtcgccatcgccgcgctcagcagccagaaccctggggtgatcaccattgctaatgccgtgtttggatccaccccgcccatcctcgacgacgtcctcgccaaggcgttcatgattgataaggatcaggtcgactggatccaggccaagttcgccgcgccaccggctgcctctggtggtggcggtggcttcattggcggcggcggtggtggcggcttccccggcggcggcgcgccatagacggcctcattctcgacgcgcttagcaatgcatgcaaaggcggcgtcgtcgtcatgcataatgcatgttactatcttataaaacctttattacacatgtaagctgcgtgtctacgtggcttgacacgtaggatacatctcgatcgtgtccaataatctggtgaaatcgcatcagtgtattatgctaaaaatgttacacctctttatgaaataataacaaagttggatatttatgtgctgcctatgcacaggaatagcaaatatgattggagtctggcagaaacgtaggtgcaaaacttatttattcccttgaaaatacagaggttcagcaacatgaccaactctgaactcatacagagtgaaactgagctgctagacacgccgtttgatggacaacacagatgacaactcaagacatctagcatccaaaattgcaataacggccggacatgtttatttcgaatgctaaatgttacagaagaatagatcatgagaacagtgctaaatttgttccttttttggtgatctagttagcaatggcttcatgttctgttatcgcaaccaacggagattcccagggtaagtaggactcgaggagctgtagaggccattccatttgtttcctttgaatattgcaatctacaaggaacagtagcatgcaccccttgttttccaaacctgcaacactatgaccttgacaacacaccttttgagctgcgatcaagtcaagaaagatacgttaatgtttcaatatcagcaaaggtcagagataaaccatatgcttagcaggtgtgaagtttttgaatcaggcatcaacagtgtagttgggcacaacatagaatttcctaaacgctatttgcaataagctaaaacgaacctggggacagtgccgcgtcggcgcaagtcatattctgttgcttgtcgaagggctctagcaaatgctttgaaagttgcctcaataatatggtgtgagttttttcca

SEQ ID NO: 9119 - DNA, 6304 bp, Oryza sativa
cacgggccacaaggaagcaagagaggagagcggttacgcgggtttctcgtgggacaacgcgccgcgcgccggggaggagagagagtggggggggggagctcaccggagacggccggatctcgtcggcggggagggggtcgccggagctagcggtcggtcgccgacgaacggggcccacggggggggagcgtggggcggtggggaccaccgtcagtgagacggggagggcatggagagcaagttttggagggctagggggaaagccgcatatatatatgtgccccccaccccatgtgcttaagcccacacaagggctcaagtgccaaatggattaattgcaaagctttgctttttttttttcccttttcttttccctttctttattattacagtattattttttcttgccttctctttcatcacaccacacaaacaatgcttctttttttaccacctcggtaaacatgcttgatcctactgttatctcgaaaccacccccactaattaaaaaattccactcttcctattggcggcattcttctgccttggagtacaatttgcagtactgatatactagcagtacaaatttctgtgtaattttcactagtactagttttgacatctgaagtaaaatcaacatgtctactttttttttcttgtaaaatcaatgaagaatctttgagtgaatgcaggatgaggatgaactgatatatataatacaagtactaatttctgtgtaattttcactagtttttaaatctgaagtaaaatcaacatgtctctttttttttgtaaaatccaagacaaaatggaaaatctttgagtgaatgcaggatgaggacgaggacacacgaccatgcatgcgcacaagcacagctgctgaacatgttgcaggaggctggctgtactttgctcttcttttcctgcctctcaactcttttttttttcttcttgttataatggaatgttttttttttcacagtgtactttcctttcttctcttggattcagggcagcgaggttggaatggaaaagaatctctagagagagagagagaatgaaagagagagagagaggtggtgaccgaaagccaccacttggtgtaggccatgcacgaccaaattaatttacgcacgttgaaacggcagacagatgaaaaggacgccgcattatcctgtgattatttattcgtgattttctgctttatattaagagggaaatgggattactgttatgcagtactcccatcgtcccaaaaatataaaaatatagtatcatcggaagagatatttaatgtttgttcagattcgtagtttttatattttcggatggaaaatttataccacctaatagaatataaaaataaaaaacaatgcattatccctcaattatttctagtgcctgatatgagagaggttgatccaaacaaaaggcaataatatagtgaattatttacgcaaaattaagaggacggtgcatgatcagagatggattggaactgcacgggcatacagtacctggagtttatgccaaaaaaatgtatagtagagtattttattttattattacctgtagtgagagaaactatagactcattagtaggaaaacattactttattaaccgagaggtctgtattttattccacctacatttgtttaatctggtgccaggctgtccggtgtggataaggacggctgtcttctcaaccgggtaaagttaccgccccggtaaacgtgaaagttacgcactaatcgcgctcgctaatggctggtcaagcccccatcgattagcttccaagtggccaattccctttttttttttttactgaacagtcacacgtttgaccccgactgcggaaaaagttaccgcaccagcgtttgaccctccggcttttctgaaacttttttttttttggggcgggggggttgagctagtgcagttaggtgatgtcagcaatgaaccgatgagataaaaaggagaagagaaagaaaagagaaaagtttgatctgttattattattactacgtttacatccgtatacccggatcgctcgtgccaacgtacgcaaaaagaaagtcagagatcgtacttcaggtaacggacaaaactcctgggaaacaaactgtacgttgtgaatgaatgtgacttttattactagtaggatatcaatgagcatttgcctcaatttttgtgaagctttcttccaaaattcgttcagcaaccaacaccattcacatatatagccagaaatacttaggctgtgtttagtttcccctcgttctcaacttttcatcacataaaaaactttcctacacatataaactttcaactttctttaaacttccaacttttttcaggaactaaacacacccttagagtctataagttttgaaggaattttcacacaaaaaaatagaaaaaaaaggggaataaacccacattccttttacttttcctaaacccacattcctataaaccgaaagacactcataagaaaaaaaaatccttaaaaatttaaattctttaggttttcttcaaaccaaacaaacccttaaatcacacaacgaaatgcctggctaagagaacaggacacgataacacgaatggatcaaagaactatcatggatgatggaatatggttgtagcaaggcgagaagcaagcacgacgagatggcccaagaagaagaatggtacgtactcctccgctggcgtggagtagtagtaggcgagtataacgctagctgttgcatggaaatgtgcagatctagttgccacatccgggaggccgcctagcctagcttagcccggccggggaggccccacccaaacaaacagggtggcacattgccccctgtagcctgcactgcaacaaacacacatcaacaacaacaccacacacactcgcacaacactctctcacctgcaacaacaaagaagaaaagaaaagctttctgtttctgttccatagatgcacacaccacacagtagcagtatataaatgtgtacacgtatagctgtgtatatctggcaatgccagggagtagctttacgattcggttgaggctcatcagctgcagctgcagctgctgttgctgctggcagagtgacttgattccgtgctgccgtgctacgtatactactgtatccgtggtagatatagaccatgtttagtgaatctacatgaagtattcaatatgagctaataaataaataattatacagattgcgactaatttgcgagatgaatatttttaacctagttgctccatgattcgataatgttgtgctacagtaaacatttgctaatgacagattaattatgtttaataaatttgtatcattgtatcgttgtttactgatagattttataattcgttttttattagtgtctgaacatctcatatgacaccttatataatacccgatatgacacaccaaaacttcaaaactttatgcctcttgatctaaacaccccgatagatagatagctcgatactattactactagaaagggaggagaatcatatgctacaagagggatgcacgaatacactgctaccataataagggtactactacgactccagcagcatgtgatgcgtcattatggagattcaaggcgcctgacattgcatactagcgcacttaataactgtgcgaatgggggtgaacccttgtacgtcaccgcctcaaaagctagagaattagtagtagatcaagtattaacatgcgtagaagtagaacacatcgagttatgatgcggatacacactacagtggcatctaccagtcatcacagtgtttgttggtgtgacctaaagctttggttaataaccagaaaccgcagaatgtcgctacacatgcagcaaccattgatcgatcgcattgatcagtagggccgtgccggcaggaggcaagggcactagtagatctatccatccatctatccctatagctgcgcgaagaacgcgcagcggtatttattagtgccgaaaattaggtgcctaatttattaatcacttttttcactaacataagcacggcattaggctgcgattaattaaaaccctttttatttatttttaacctcctgcttctccgtgcagacgtgttgatggatgggtgctatactactacttctaggactaggagtactagtagcttggtaggcaaaggcaaaggaggagcttgcagcttgcagctgcagcagcaggaggaggaggggggatactgtactagggcaaatggagatgtggatgcatgagaaaacctactaccacaagtggaaagaaggggaaggggggaaacgggaggggagggggggaattgttccatcacatgatgctcacatgctgcatgcccgcatggtggtggtgtggtggtggcgctagctaagctaaccaaccaaccaacccgcggtccttccctcttctcagactcactcacccacggcattttctcgctctcctctcggctaatagcaggtacaatataagattattagctagctataaatatattttaatgagataaaagatgagagagaagcagcgagcccagctgcaacgcggattccaagacgcaatatgtgtatgatatatgtgaccatattaataatatattaaataactattatataaattagatattaaattagctataactaaattggagctagtaatgagttataatattaaagttgctctaataagagcttggtggtgttgtttgccttgatgggtggaggtggtggtggcggtgacagcggtgcgggggagctgggtggtgggggcccacgtcgctccaccctcttctcttctcgcctcactcctactgttcctgatagatccaccaaccgagcttttgcctccttttcttccgttgggggtggcccccctccgccatgttttggacgcttcctcctcctcccttccttgcctgtactgtatacacaccctgtcttttcttttctaagattgaaaattgtgtattcactaaaaaaaatatttttgtgatcacccatgctcgcttcagttgagatttgattgaatgacaaataaattgaaacagtatgattatttagcaagggagggagtcatagttggtaatatgacaaaaggagtcatagttggtaatatagcgcagcagttatattggtttttataagtgatatactttgtggtaaacaaaagatcaagtgcatccgtgcacagcagtataatagcaccgtccaataatatagtagtagtatagtaagatgccaaggaatgggatggtgaaacaccgaacagtagcagacaaacgagcaagggtatcaataagaaatgtttgactaacagctcggtaaaacagtgctggttttcagcgtgcctgtgcaccagtgcatatgtcgagtgagcgaggccatgaaagagcaggatttgacacgagttcgggctctgtagggggggcagacaaccaaagtggaagcgatccaaattttcgcttagatcgcggcgaagaagcaagaaaaccggtggcatcctttaactccaagattgttgtaggtgcgcgcgccggtggcggtggcaccggtggttccacgttaatccaccccatctatctatctatctatccatccattcatccatcatccccaattccctctcctcgcactcccccatgtgaccatcgccagtggcaggtcgcgcttaattattcgtggccccatccttcgagctccagggtcccccccttccctccccttttccctctcttctccaaccctctctttgtctcacgatatcgatagcgtctcgcacgcagccgcggttttcgccacacaaaccaaaagccccaggtgcaacgcagaaaagtgttatattacattgcaactacacctcttctcgaatcaatggcctgggacttgggatgctgcgttagttaatctgtataatctaaggttttgatgcgttgccagcaactgaaaccgttaagaaagcatatctttctttctttcgcctttgggtggaggatgggtaggaagggtaccttttgtgctggccgctatcgacctgaggagactttataaattggggagctcataagaaagcttttttaggctcgtccgcagatacgccttagatcttcaaagatcacagcgaagtattataatgcatcaactgtagagaaagatagcaggaaaaaatattagtagtggtatgatcatagataggtagcccctgatctaggggcaagattccatgtttggtcagtaccattaagcaagccaaccaaaaccatcactattacacgttttttaccg

SEQ ID NO: 9120 - DNA, 8358 bp, Oryza sativa
tgattatcatatttgtatgtcatgtaaactatcccattactatttcttggatatttgtatcttcacattgtgccccaggttatattctatattctaacatagtaccaatggattcaaaagctgccattatcgttctagatcaatgctcataatttgtaaatggcaaaaggcagagcttggacagatttcaccaatgtacttactgcactatctttgaccctaaaatcctagtactagcataaatgtctcgacgacggcgaccacaagttagcctagcgctgacatgtgatgatgatgctcctgtccagcttacatagatccaggttgcaagcttgtcaggggaatttgcgagtacactgaactcatctgggaccattgggcttgatggggtctctcttctgcaatcgttcgtgctgatcacatgcgtcttcaatgcagatcctgaactgatttgcaaaccatccaaaccatgggagctgcagatgaatctggctgaaatttgaaaccaacatttggtagagctagaggagctacgaaattgcacagcatagctctgaattagccttatacatgaggaccccccggatgataagcaagattgtcaggttcagaagcaatgaaattccagaatactgtcaggtatggatgcatactgtgtacagtgcagcgtacagctggctcggatgagtggatctggctatcctatatgacctgcatacagtgaaccagtgctcactgatttgtacaacgatacgtcaactaacaggtttacaaacctagtagtacacttgagtcaatcagtgctcactagctggcacaacaatacatcgagtaacaggtttacatacaattattgcagcggagcaaacaggacaggaaaaccagacacaattttgtaagccgtagaaaagagaaacaagttcatccacaggagtataagagaaatccatgcagagaattgcagtaacaaattatagctcgatgaaattagtaggtggtaaaacagcctcaacaggaaactaagataatgagacatacttcagttttacaagcaaaactgtttgggaagtaaattcccaggtaaaactttggtacactcaaggactcgaccatcattgattgacgagaagatggaaacacaacagcagctgtaagcaagtcatccattgtgttaagagacggttatcactggatgactggaaaacatatcatactgagaccaagactgttaaatttctttttttccccttttagataactaagcaggaaccaccgagttgtagtgctcaccaagaccataggcatgtctgtgataggacaacctaatgctagggccatctttaccacctgaatccaatttgtattctttgcccatttccacatctggaaatgagcccgagtatacaacaatgcgcttcttcaggcagtgggttagagcaccaagctcaagttgcccaccccaagcagcagttgactcaacctcctcacagtacctcttgaagctctccaagggatctggtccagactcgaccttgccctctgataggaaaaatgggagaaaatctgccgcatgctctttcatataattggcagtcatttgccgcagctcctggtaattgtattgtgtggtttctctggaatagagtgacagctggttctcaacagcacggtacaggcagtggccatctggctttatctcctgaatggtcagtcccatgggctcaagcttcttctcaagcttttcattttctatcatgcggtcactgacaagattgttttgctcttcttgaatccgctgctctctagcggcctcttcctttgccttcttctctcgacgccgtgcacccttgctaggcttcgcggaatccgcgttgctggtcacagaaacaccagctatagcctttactaaggtgtccatgttccccttttctgagctgcctgaggatttgtacccaaaagtagcgagctctgcggcatgtttcgcctctaactcagctgagaggcgtgaaatctcctcctctacctgcttcttcttggccttctgctcagctttgctgcctttagcggctgctttcttgaggcttgtttccttatcctggagtttggatttctctttcctgtttaatacaaagagaaagaggacctcaacttttagaaacaataccatataattgaaaaggatccaacccacaatttgtgaagtcatgaaatcaacaggaaacgaaaattagagaatatatgtgcttcttattgctttaactgaacaaattaactaatggttcacattctacttctaagaaaaaaaatgctctgctgctcttcatatggttaactaaacaacccaaattcttgcaagtacttcactgcaactatttttttcctcctttgaataagcatatgtaagttttaaagaggtgttgcaaatacctatgaactggttgtagctcaaaagtagaatgtgcgtggaacttacaaattaactaatgtatttcaatataaggaaggttctgctatccaagaattgtgtatagtagagataaacaagcaacatgacgttacacctaaaaatgggaactttcctgaatataataagatccttagatcctcatcatatgagaaaaaagatagtaactactacgggcaaatgacatcgataatcagcattgaaaacactcataacatcagtttcagtggaagtcgctctggtggagcaaccctggcactacagtgtatgtggtaaaacgaaaatattatcacaaatgatgaaaatactagtctctgttcctcatctttggtgagcatatccaccatcacagaattttagagtaattttactcatggtaatagaatttctgttcagcaatctggtagcaatttcaatttcaactcatctaagcagtttccccgaataacgccgctttaatggagaactcaatctgacactagttgtataattagagggaaaaaaatgaatatgcgtaatgcagaaacactattgcgaatttagtcactgacaaacctagggcacttttagtcgaaatgcatatttttcttactactaagattccaaggacaaaccactaagacaaatctaagtagccaatcaaaatcatgaacaaaaacccgacgaacaatggaaaattccaaccttttttacagcccagcacaaaactttatccaagtcgcaattgggaccaataaggcagcacttaataataaacagcaagataaaaattttatcccctaatttgccaatgggactaatagcgcaacacttaataatcatcatcatcatcaacaaaaacaataatgggaccaataactcagctcttaataatcaacaacaacaagagtaatcctaaatcctgccgtgccgcagcctccgcccaccagccacgccaccgcgcactgcatcgccgcctccgcctgttgctctgctctgcggctctgctagggttcaacaactcgggggaaccccacagtcagcaagtaaaaggaagcccgatatagcccactggtacgacccagcatcacaaagtccctctccgcctctcctcatcaatcgctcgcagctctccccttcatggcgatacggaggacggcatcgaggttccggttcgggggcaggcggcgagatcgaggtacggcgaggtctccggcacatgagcacacacggcagcagaaaaagaaaaaaaaattgaagggtacaaagccaaagagtaaactaacctatgcctcgagagcacctcctcgagcgtctcttgctgcgattcctgcgctggctccgccgcggctgcctcgccgccgccggcggcggattcgtcggctagggtttcgtccattggcaaacgatgcaaaactcagttcaggcgaaggaaaaagaaaagagaaaaaaaaaaggtagagaggcttttgtgtttgtgggctactcgtgtgctcttgcgggtcttgccccaccttatcggatgcggatctgttactcttgcgggtcgtggattgtcacgatgcttcgcccgtttccttgtctgacagagactgggcgattaatctgttcttcttcagagattctgccccttgtttagatccagattctgccccttatttagatcagggtgtaaagtttcatcgtgtcacatcaaatattatatagagtgttacatggaatgtttggacactagtaaaaaaaataattacagaatccgtcagtaaaccacgggacaaatttattaagtctaattaatccgtcattagcaaatgtttactgtagcattattattatcaaatcatggaacaattaggcttaaaagatttgtctcctaatttagtctcaatctgtgcaattagttattttttagtctatatttaatactttatataaatgttcatacgttcgatgttatagtgtgtaaaatttttacgtgagaaataaacatgaccttagatcgttttcgtgtttgatgtggactgaactcttaccttatacttgtatgatgtgcttagctagatttcaactcctaaaaccacctactccaacgttttgatttcacgcgtctcacgcgaagatttccggctgtttctaaatccgttaatttactgggacgacaaaatggtttttcatgtcgaattgtgtctagaatagtcggagctagttaatttaattcttcctgtaagtgctggtttgaccatgttgaaaacatgcacgagtattttgaaagccggtggagttgaaactatttaaaacatgcacaaaagagcatgggaacgagtaacttgaccaaagttatggaagtcatatgttaagaataatccaatgggttctccatgctcaaagctggctatttttcgtgttcattcctaataaagaggttggcctttttcgtatcaagcaactatgtgatgtgtttcgtaaatacagctgtgtcacggcctggaagaaatcacctctcacgagttgtccgtctcgttatccaatttagcgcgtgcttagttcacgttaaaattaatagtttaattgaaattaaaacgatgtgatggaaaagttaaaaatttgtatgtaggaaatttttaatataatgaaaaagttgaaagttcgaaaaaaaaaagcgctaaaccaggccttaaccaggccttatccttgtgcacctggtgacaacacacttttgtcaacagggagagagacgtacggcagcacgtaacgcgaacacacggcttaacgtgtacagtacggctcagtactcacgtgcacggtggacgtccgtagtacctaagtctgacggatttgatcgatcgaaccggccgtccaacgacgcagcacgcgttcggtttggatacatccttgacgttttaacgacgacgtgccatgcaaaccccgccgtcgcgtatagtcgtacgcccacggctacgtacgcacgcacgcatgcacgcacggcccgcgcgcgcgagaccaaccgagccaacacggccgcgaccgcgaccgcgaggttgtgtgtgttgggagtgaaacgccgagacgtacgcctgatcaccggttcgctctctgctgtgctgcctgccacgcgcgcgcgcgcacggtgacgctgacgcagtgcaccacggtcacacgcagtcacccaccgcagcacgcgtgccgctgttgtttttaccgcgccctgcgttacgtcacgtactcaaatgggtgctcaaagggcataactactccctccgtcccaaagcttacgctgtttgaccatttgtcttatttaaaaaatttatataaatataaaaagcgaaaaattatacttaaaataatttggataataaagtaagtcaaaaaaaataataattctaactttttaataagacgagtgatcaaacagtgcaaacaaaaactcaaaattccttatattatgagacggaggagtagttagtttggttcattcctgataattatttgatccgtgagtagtaccgtcatgtttttttttaaaaaaaccattaccgtcttgtgagtttcgtcaagatataggagtagtatagaactctgtaacacctgagttccaaaggaggcttgagaggggaaaagaaaagttaaacactcctatggtttaaccgtgacacactgacactcctaataaaatctggtcaggcaacgtttggctttacttttaattagaaacacactattcatcatgacgacagacgagaattgccactatcattcaacgactcgtcaggactcaggagagcttcatctcgttttcctactacccgattaacccgtacgcgcagcacctgtccggcaacaattcaatatttctttttttatatatagcacctgtccggcaacaattcaatatttcttttttttatatatagcacctgtccggcaacaattcaatatttctttttttatataaaggagacgactattcaatatttcaacgtgaccacaaacgtctcagaacatgttggaacgcacacgacagttgacagcctgaccgccgaagacatacgtcggcacgcaacgtcgtcgtgcattgggaccagggcacacatccgcaccgccgatggatcggcgcaccgtgcagctagctatagcgtagcgttccactccactcaccatatacacgttacacgtacccaaagaccggtcgaacgaatcggcgtaatacgacgacggcgcccgcacgcacgcgcgcgcgaggggtttggaccctttgacgacgcgacgggccaaagcttagccgccacgcgggacaccgtcacacaccacgcaaacccgtactatgtctatgtacttcatgtcagtatgtgcatcgccgcgctccgccacgttccgcgaccaaccgagccaacacgcgaggctgtgtacgtgtggaaggggaacgtacgctagctgagacgcccgcccgcctttcacccccgggcggcgcaccgccgcgagtacgtacgccggctgcttttccacaccgccgtaggcacgtataagggctggtttggtttgaggcctaaattaggcttaccaatatttagtaattttaatagtgtttagtttctatttggtttgaagctaaattttaacatgcctaagaaaatagaccatttcaatagtaaacttaggctattttgacttcaatccaaatacaacttttccttaccaaaattagtcatgccaaaatttggcattgacaaaatttggtaaggcctatttagccataaaccaaaccaaccctaaatgcgcgggcatgtgggtacgcgctatattaaacgcaaaatctatttccagaggcatctcgatttagacttaacgagcgacgctgacaattacgtgagaagtactagtagcattacagacatgcatataagtagtttttgctattaggttgtgcattttttttcttcttatgaaattttctcttaaattacttatccgatatataatccgattacaccgttgtgttcataacaattaaatctttacaacaagatctcacatgattatattttgatgaaaaatcacaaattacttttatgatatgtctaaattacttttagatttcactaagttacttcttagacatacaaaagtaaattcagtaaagcctaaatataatttatatatattatagaagtaacttagacaaaacgaatgtaactttggcatgtcatttgaagtaaatccgttgtagatataaaaacatggctctatctagaaattaaattaatcagcacatattatgaattaactaaaaacaataataaaagtaatcacctcagagcattatgaatgtatagaaagtattttaatcaaatctaaaagtgatatatatatatatatatatatatatatatatatatatatatatatatatatatatatatatatatatatatatatatatatgataattatatatatgataatttgttcaatgaaaaagggtattaattaaagttactttctttttttataagttacttctataatatatgtaaattacttttaaactttactgaatttacttgtgtatgtctaagaagtaacttagtgaaatctaaaagtaatttgtgatttttcatcaaaatataatcatgtgagatcttgttgtaaagatttaattgttacgaacacaacggtgatatcggatcgtaaattggatgagtagtttaagagaaaattgtatttgaattatagatggatgatatttcttatagatggagtggtagctggtttagggggtgtttgggaactagggactaaatttagtccctctcacaaaattataagtccctatggtagggactaatgtttttgtgagagggactaaagtttagctccactttagtccctccaaccaaacaccaccttagacaaaccaa

SEQ ID NO: 9121 - DNA, 7476 bp, Oryza sativa
ccaaaacgtcagtgtccgtagagacttgtttccacttgaccatccatgtaatgcaattgtgtgtgtgatgttgccaccctttggacattttcttcctactgacagatcagcatgatgagctgcagacgccatggcatacgtacagcttcgagctaagatctcatttctgaaatatatttgagttcagacaatttttgtgtatgatttggtcaagtggtttgttagttcgttgcagagaaaaatttgatagactgatgacaactcagagatgtgaatcgtgcagagcttatctttgaggctttgaacatcttcatttcgagatatttacacccagatcgagaagcaatacgctgcctatcttaaacatctcctcgtcacaaaaatcaaacaaacacgaaactctctccaaaaagagaaaaaaaaattgaacgtaatcctatcccctttcggagcaataatatacaaacacaaaaaaaacactagtcctgtctccacatttccagttcttcttcttgtttttttttttcagatagacgtctgcgtcggcgtctctgacgatgagaaaggctccgtttcatcagtggtgctgaacgatctcatgttggatgaccgtgttgtctcgttctccttctgctggctgctgctgaccttgaggtcggcgaagtcggtgatcatggccggcctggtgatccggtgcaccgagaagtgcttctccccggtgagcatcctgacgacggtgctcatgttggggcggcgcgccattgcgtcctgtgtgcatagcaggccaatcttcaggaaccggcatgcctcgtcgacgtccaggtcattccccaggtcagcatcgatgatctcagccaggcgttcttgctcgtagcgtacccatgtctgcaggttttctcgcattcagtaatgtttctttgtatggtggatttggtggtaagtttctaatttagttgattatatgagaagaaaaaaactgagttcattttgttgtttacagtttgatgatgggaacttaccctttcgagaagaaattgatcttcataaggcaatcttgtgttggtgttgcatctgccgctaacgatttccagtagaagaacaccgaagctatagatgtcggatttctttgtcacctggcctcggatagcgtattcaggtgccaggtatcctctgaacagaagtgaatttcaagtcagaacgaaagaactttccgatgtaaaccgagtaaataaatttggatttagttatgcttacaatgtgcctgcaactcgggtgctcacatgagttgcgttgggtggaaggagccttgccaatccgaaatcagaaatttttggggtgaggtccttgtcaagaagaatgttgctcgcctttatgtcacggtggataatcggagggcgaatttcctcatgtaaaaatgcaattccacgagcaacacccacagcaatttttacacgggtcctccaatcgaaccggatgttgctacccctagatcctgtaatatcacagccagaacatttgtaagtatggcagcgaaggaaggagttggtaaaggacaagttcgggaaaataatgtgttactacttgctttttttaaaagaataatgtgttacctagcaatgtctgtgcaagactgttgttctcaagataattgtaaacaaggatcctatgagatccttcagcacagcaaccaataagtgtgacgaggttttcatgcttgatgtcagaaattgctgtaagttcagtcaagaactctcggacgccttgtcttgaagtagcagacagcacctttacggcaacggttgtcccatctctaagcactccctgattaacaaaatgaaatgtaagatgatttgttttgacactatgggcatgagacactgatagggtgaacaaaatgtaagacatatttaccctgaacacagagccaaaaccaccctctccaatcttatttgccccactaaaatcatgggtagcctttctcaactcactgtaagaaaatatcttcactctatgttcacctggaacaacaaaacaacaaactcaagcatgtaagaatgatgaattgttttgaacaatacaggtaagaagcgtgctaatatacaaacgctgctcaccatcatcaccttcaacaggttgtttttttctgaacataaagcagcaatccatctgaaatcaaattgtagaggtgcccacaggccacaagaagcaatgaattggaaagaatttctgcagagcaaaggtaaatagccatcagaacaactgtaaattcatattgcaacaataaactaacgtaaaatgaggtgtacaggactcttagcaagttaatgaccccacatgccagttgttattgtttaaacaacaatttgcgcatcgataaccaccaactgcactgaaaccacatctttgcttgtttgattaatggctcaagttactatcaaaaagtctacatttagtacgatggaaagaaataaaaatgtgaaaccacccaagaaagaagatgtaaagagacttaaaaccaagtcaaggcagaagtcatccaccccatttgctgagcaatttgaagaaaatgaaacgtcggttgccacaagcaaccttaatcctgtctttctgaaaggaatagcgcctgatagacccaacggaccaactatccccgttgacgagtggaaattttgcagcaaccaaacccgttggaaatgaatttcgattcagatatagagcaaaagcctgttaattttcagtaatactaactatctataactaattccgcaattgcacagcagttgagtaactatttatacttttgtagtacaagaaagcaacaagctgcatattcccatacgccgatgagtaactagcatttccttcaagccaggatttgcctcatagctttacctaacaaaaatcggatttgcagctacagaaaccaaatcttgcatgcatcaaaatgagatgatgcatcacaaacacaagaaaaggtatcccctttctacttcccgctgacctaaaccaagcatcacatccatggaactcgatttcgtagaacgggaggaggtcgctcccgcaaaggcgcaatcgatccccaatttcaagcaaatagagagcgaggaacccagcaacatactcctccacatagaaacaaatgtaaaagcctaacgagttcttggtcatcctcactcaaacgcccccaaattaggaaccaaaccaaccaccaaccaatccaaaccagaaaaataaaagaaaaagaaagaactccacacacacagacaacaagaacgcaagaatcacctgcagagcaagcagatcgagccccggcagtgagagcaaagcaagcagctacacgccgaccaacccacagggtgaggagaggcgaggagaggaggcaggagagagcgcggaggcggcgctagtggtttaagaggggaggagagcgcggcgtggggaggaagaaggtgacgagaaggagagagtctttgacttctctctctaagctcctcctcctccgatttttttttttgcttctctcctaatatttctaaacaaatatagagatcagaggccgcctcgtgtggtggtttgagctagctagcgtggaaggagaagtcggttaaaatggttgggaggattggagctaactgcttaacgttcgttttcccgcgtgtacgcggacgtgtgcagcagcaacgcggaagcagccaggaccgggtccagcgtccacgtccgcttccacgtggccccccaccgggcacgtctcacgcgaatccgctattaatcagcaatttttcacgtaaaagaattacacgtcgatacattagaataaagatagttttgttacacaacacaatcagttagactggcctatgtcaaaagaagggagaaaaagcaaaacaaaaattgaaactaaaaaataaactacagcggctaaacacaactacaaacagcaggaaaaggcaaagccacgctacactctcgagaaatccctacaagcggtaacgccagctaaagaccgagaggatggactccagaaccaagttgttgttaatgagcaggctaattcctttgcttaatcgcgcgttaaacatcacgtggttaattcgtgttgctcacggggagtaattgggaccgagttacttctgaaaaccgatcgatggcgtggcgctcggtttggctcgctcgccggcgccgtagggcgaggagacagagactgtgatgtggtctttgagtgcagttttagctgatcagtgatggagtctctgtgattttgacgtgcaaagtggttaaaggcacaacaccggccactagattagcttagttaggagtagcgtatcacgtgtacctggtcatcagttttgtactctactctattctctatccgcgtacttatggttgagaggtgcccgatgcttactctgaatatacaaatacaatgtgtgcgacaagggtccaaaattcagacggttggatacaaagtccgagagattattagattaaccaactgattgtcgatataagtatatactagcgcgaacgtactgaccagcaaaatccacgcagaacacggagtaagtaaagcataaagaaaaaacacagatcagatcacatgcagcttgttatcattttatggtcaaaagcaatccggcacccatgccaggtgagctgcacctcgcacccccacctcatgtgctcgtgcttggtagatccatgctatagatactactcgtacacagcaaacaaaattaagcacgtgcatgtgcctgttatgtctatctgttcgttcaaaaatgtcagcttgttgttcaataggaacagtctgggtgtcgttcgcaggagaatagaggaataaacaaagttgctgacgaacgcggctgagagcaagtttaagagctcactaccagctatttgcatattttaaaaccaacatatatatgtaataaattaattataagattagctttaattttaatatatttgtcttgtaacatgtattaagctagttttacataagagctcacactcttcgtataagtgtatgatagaattatcctcactacaaagtacttctattatacttgctgtgggtgatgtggcgcgtcacccgcccgcccatccgaccggaagaacccacttgggaatagcgaaaacgaaaattccgcagtcgctgataataccacatcttgccgagctcgagcgcgtgcgttcccaccacctcacctgggcgatcgatcgatcgatcgctacagcgatccacgcagctcagccagccgccgagccgcggacgcacgcaggcgcaggacgtacgggtagtggtccactcgatcggtcccgcgagtcgcggcgcatcgctggtcgcgatcgcgcgtacgaacgtactccgtatacgtacgggtacgcccgcgggggcaaggcgtctcgctgtcacacataccggtctccaattttctcgtcgtctccccggcgcgcgcgagcgttcttcccgagcgtgttggctcggcagttatacgtatgttaggaaacgatatacaaacaaacgataaataataataaatcaatcataaaaacacgagattttagcgtggagctagcctttattaaatgtaaataaatttggaacataacacaacaacgtacgtggacgtgtggtggcgtgtgggtgatcgatcgatcgacgaacgtgtacgtcccgtcccgtcccgcgttgtcaaaggctcgcgcgcgtgcgtgcggcgccgccgtcgtattttgccgattagttcgaccggtcttaggtaggagtagtatacgtcgtacgtgtacagtactatgcgcggtgagtagtgggacgccgtacgtacacgatcgatcgatggcgcggatatgtccagccgagtggccgacccccacgcaacgttgtctgccgccgtacgtacatctccggcggtcagactgtgatcaactgtcatatgcattccaacatgtggtgggacgtcggttggtggttaggctgctcctattcccactgtcccaaagaacgatctattgatgaaatatgacatttattagtacaatgtatattaaaaaaacatcatgttttattttagattagtttttatgaaaaaaaatacgttgaatggcttgttcatattgatgtcatttcaaatcatattattttttggtagagtttttgcaaaactttagtatataagaaatcctactaaaattttaacaatattattaaattgtcaaaatttaataagatttattttgattacaatttgaacagcccaaaatattgaatggttgtcagataggtgtgcacgggccctattacaaaattgatgaatgatagtgccaagttgacaacaaacgagagctggcaatatttaacaataaattaaataatatgaaaaaaattaataattacttaatttttttaataatacgaacggtcaaacgtgttttaaaaagcaatagcgtcaaatatttgatttagagatgaagggagtattgtactagtgttttaacgttttttattgcgacaagtgttacgtatctctacgcgacagttgctcaccgatcagcacacgttgttgaacttgaacttgaacacatctcttcgccagaagttaatgagcaccaattaattagctcttggcaaccatttggtcctttttaacatctgacttccaaaaaaaacttgggtcaaggaagtcgttcgaacggattaggccattcctaacctaataaatggtgtccataacattaaataagttaccacctaaaatgaaaaatgatgtggcaagtgaataaatgagaaaagagaatgacaccatgttttgcatgagacatggtttctacacaacatccaagacatcatgtgagataaataacattaaatttaagtatggaacagtggtgtttgtattggaagagcaatgtctagtactagtttcttgatgatgtggagtttatggaaactatgtctagtgtgttgggttggaaatggccttagatatagtactgttctatttttaatgattctcttatatccatgttttaatataggacgtgactacactgctagtggtagttggtttgtctaaggtggtgtttggttggagggactaaagtggagctaaactttagtccctctcacaaaaacattagtccctaccatagggacttataattttgtgagagggactaaatttagtccctagttcccaaacaccccctaaaccagctaccactccatctataagaaatatcatccatctataattcaaatacaattttctcttaaactactcatccaatttacgatccgatatcaccgttgtgttcgtaacaattaaatctttacaacaagatctcacatgattatattttgatgaaaaatcacaaattacttttagatttcactaagttacttcttagacatacacaagtaaattcagtaaagtttaaaagtaatttacatatattatagaagtaacttataaa

SEQ ID NO: 9122 - DNA, 9336 bp, Oryza sativa
aattttagcttcgactgtgtgtatgcccgatcaaattttctagcaattttttttctaacctgtacttacgtgtaaatgcaatactgatttcctcaaatgggtgaatgttgtacaccttgtggtggctttcagtacagagttggaggcaggaaattctgaatttacacccgaatttgccggtacaacttttaatttgccaagtcacatttgcaggtatggacttcggtgattctagacgcaagcctaatgtcgtcgggaagttcaccgtagctgttgcactcacggtcatgtgcatcattgtgttgaaacagtcgcctggttttaccagtacaagtgtggtaagtgccgaatctctccacaactagcccacttcactgtcgaattgttgattgctgttgagtcctcacttctcgttgttgtattgttcaaacttgatttaattgtgacacgtaagtttcatttggaacaatcgcatattgtctgacagaaagaggttcctttaacatgattgaaagaaacacattgatcgtccattccatttgatgaattcactgttcatttatctgtgttctgtgctagtagtggttattttctatgcaccatcgtagtttccaataaagcacattcataattccattggaagcaaagctgtttttgtgaagcatttcagattgtcatctgatctagttttcatgatacattcacatgctctatagttctctcgccatgaaattggtgtgactcatgtgttggtgactggaggagctggatacattgggtcacatgctactcttcgtctacttagggacaactaccgagttaccattgtggtaaatttcttattccagcttcatgtttttattcctaactcaaagagcttttatgttacagcaatttcttccatgtgatctttacaggataacctttctagagggaacatgggagctgtcagagtccttcaacgtttgtttccagagcctgggaggcttcagtttatttatgctgatttaggcgatgcgaaagctgtatcctttttctctacaatgtgaactttaataccttattatagccatttttccatacattcatgtgttggtgtgatctgttttgcacttaaccaatagccaggttaacaaaatattttcagaaaatgcattcgatgctgttatgcactttgctgccgttgcttacgttggtgagagcacgttggagccactgaggtaaggcattgatgtgctaatgttcttgtattcatgttacatagatggtggttatttatatattgcatgttcatgtgcaatcctttgatgtgttcagagcaatgcaaactgctcttggttatctctattattaaacaaaactgctaaacatgacaatctatattgaaaacatactatatagtgaaaatggaaaatataggcattccatctttttcaatgttggcattttttgccgataacatacttttggcacgagcaatttgaactgtgaagattagtgtgaaagactgcctaatgtaaatgtatgtgattttagttgataatttgttttccttttttgtatccttcagaaataatctgttgttaatgctgttactattacatgatctgtgctaatactgcaataacaggtactaccacaacataacatcaaatacattgacagtgcttgaggcaatggcagcatataatgtaaaaactctgatatactcaagtacttgtgcaacatatggtgaacctgacacaatgcctatcacagaagcaacccctcaggttggcttatcaatgcatggacttcttatctcaaagtttaaagaatatcatgcacaattcactgattctagacaatcttttaaccaatgcagaatcctatcaatccatatgggaaggcaaaaaagatggcagaggacatcattttagatttctctaagagatcagaaatggcagtcatgatcttaaggtccgcctctcctatagcctatactaaaatttaattcgtagagaaaactcacttcgttttcttttgaattagatacttcaacgtcattggatcagacccaggggggcggttaggggaagctccacgaccagagctgcgtgagcatggacggatttctggtgcttgctttgatgcagcactgggaatcattccaggtttgaaggtactgaacatgctcacttcagcatgtgtcctgacttttcacatggtaacatactatggtatatgactttcaccctgctttaggttcggggaactgattaccctacagctgatggaacttgcataagggactatattgatgtcacggatctcgttgatgctcatgtgaaagctcttgataaagctcagcctggcaaagttggaatctacaatgttggcacaggacatggttgttaaaaatatcactaatcatctcaacacatgcacaattatgtactcatttctctgcatgtatttccttgtttctgattgtgctttgctcatgattttatcaggtagatcagtgaaggagtttgtagaagcatgtaagagcgcaacaggagctagcatcaaggtttcattccttacccggagaccaggagactatgctgaagtttacagtgacccatccaaaatccatgacgagctgaactggacagcccgttacattgatcttcgcgaaagcctttcaactgcatggaaatggcagaaagcacacccgaatgggtatggatcggcctgattcagggtttaatagattcagacttaaggtacacagattctcaggtccatgtgcagaaatcatatatccttcagaaaattggttcttcagcacaaacatagtgccaggcacagaagtgttctgaatttttttggcagcatttggaagaagatacagaaagaatggcccctctattcctggcttaggatcatacatatagttttttttttccttgacattttttttaatcttttctactcgttaaagcataatataataaccaatagaaaatgtgttgtagacaaggtagataactatcatgtatgaacgttcatggtgttgaatgaaaggatatatgaataagtagatgtttgcttattagtggaagttaaatttccattttggcaagctcagcggttaaatttcttgtatgtgaagcaaggggtgactggggacaatgcattgctgtgcacaactcctggtctcacttgcaaaaacatttcttacatgtaactagagtacaagtggttggattataccgtatgtacatgaacgtcaattcgcagctacacttcttcaaagagaagattaattatgtactacatgttattcgcaactacagttcttcagaagagaagaacaaacaatgcaatggtaagcacctctaccgcgtattctgaagaaaacgaaaagagaagagaagaataaagaaagaaagggctacgtttaccctgaacttgatctgctgtctctctctgcgcctcgctgttcagacgaaaccgagccattctgcaagaagagggcacagcagcaggaccatcaccggcgtcggcagcggccgctcgacgccgccggcgttccagaggaccgccgccgccacgtccacggcgcggcggaggaacaggaccgcccccgccggcggcggcggcgcggcggcgccgcgcccccgcatcccgtacatgatgaacagcagccccgccgcgaggatcgcgcacgccaggacgagctgcagctgctcggctccttccaccggcggcgccccgcccccctcgccgccgccgccgccgatggtgttgagggtcaggaaggacaccgccgtgagcaccgtcgcgaagcccgtgccgacgaggtccccgccgcctccgcctcgcggttggtaggggcgccctggttgccggcgcattgttcgtcgccggcggcgagcggcggccacgaggaagaagctctgcgagaagcgggatcgcgagccaagttaaagcttgtgtcgtgtcagtcgtctatatagctatagctatctagagcgaggtggaaagaggtgtgtgagcatggccgcatgggaatttagcccgaaattgcacttgaaaccatagtagtattatcttcgaaaatttacgtcgagcttgaaagataatcgccggttcggcgtcgtcacgcgacgagtgcttctcggatacttcccaatcttgcaaaaggaaacctgccctttttaattagttccagcttcgcattgcggcattggacttgtccacgatcaacaaattagttaattactactccctccatttcgaaatgttggacgccgttaactttttagcacatgtttaactgttcgtcttattcaaaaacttttgtgagatatataaaattatatacctacataaaaatatatttaacaatgaataaaatgataggaaaagaattaataattacttaaattttttgaataagacgaatgtttaaacatttgataaaaagtcaacggcgtcaaacattttaaaacgaagggagtagttgagaagccatatgatgaggcggatgctcgcgcgctttttattcagaaaaggcgctgcgggattgacatgtaaaagagacggatctattaaagttttcagacgatttcttgagttcttgaccagacaagcttcatagtagcaggttggtatatatctggtgatttatttcatactacgtacaaagatattatatgattttatcatcaggtaacttctaagaaaaaaaaaaagcagacaacagtatgcagtctgcaattaatattgcttccaagttctgagagtggtttgaggtgaagagaaaacaagaatacgtgaaagacgacgggaggtttggactttggtgcttctagtatactagcaagtagcaaagcacgttaatatggtaatttaattttcacatgatttgcagcttcctggctgctgcggccaagagagtgaccggtgttactatcttataatctcgccaggggaagggtttggtagccacattcgtaagtcctgcatagtacaggacatttttcctgaattttcctcttctgtcatcggtagtgagtagtgacagactctgatctcacaaaagccgagctatgtactaccataattgagtacgtacaaaggttcttctgtttgtctgaaagcctgaaatcaccggcaaaaaacgatggtgtgatctgccgtcgccgtccgctcgtggaggagcgcacgtcgctagcttctcccgcgagattgacggcgccgtcgtcgccgcgggggaaggtgtttggaaggggcgcggaaactctagcaccagatgtgtgggcgtcgcgtacgtcgtcgtcgtcgtcgttgtcatggttcaaagtacgagtatgagtgtacgacgtacttgacgatgacggcgcggtgaggcgagaggtcagtggagacgacatgtgtgtgtccatgtcgtcgttgttccatgggaaattttaccataggtcgatcggagtcagcgtttgcgtttccactttccaccgccccaacaaagcgccgcggcccaggcgcgtgcccgccgcgtcctctcgtggcctcgccacggtgagggcgcgtcgtttgattgcctctgctgctgccgaggcgtgaccgcgtgacggtgaggtttcgtttgcgttttatacatagcatgatgtgggctccctcccggtttcgtttgcgtttttatacataggaagaacgtaaaagggaataaaatactggtttcgtttgcattttatacataggaagaacgtaaaatggaataaaatatttcaaaacgtttgcgtttttacatgcggaattgcggaaagcgtaaaaagaattttaaaaaatagtattagaaaaatgaaaagaaatccgacctgccggattcgaaccagcgacctaaggattaatctgcaacactacagtcctccgctctaccaactgagctaaggtcggtctccgtagtccgtccagctaataaagtatttaacattattcgttggtctgcacaaattattttttttttagaatacgcataaggcttgcgtatctttcgacgctgagcttgctgcagcaacgataaaagggctgtgcacacaaagagttcactatgagtgcttgcataaccataggtctgatgaatctgcgacgtggcgaacagtggattggtgcggaagtaactgcgtagtctgcgtgtaatccccactcccaccggccggcgccgaagcggccgcgcgcgccccaaggttcaccacggacaaaccacttcaccggcgcccgcgcgcgcgcacatgccgcgctccatacctccctcccccgcgcgcgcccgtgactccgcccctgcactgcatgcacgtacacgtactacttccccaagctagaagacgcgcggcgcagtcgccgccttcacttctcagttttcctctcctcggcagtccactacatcgacacgacacccctgctccatcctcgcaatgttgcaccatctcgcctataaatatgcccatgcaaagttgcaaacacaaatcaagctaagcagccacacagcccacagcgaaagaattcgccgaacagtggaaagctatagcagcagtcatggccaagcaccacaatcgtcgtctctccgtcgtcgtcgctctgctgatgctagcggcgtcgatcgtcctgctgcttcttgcgccgccctgcgatggtaggagacagctgaggggaagcgaggccaccagaggcggtggagtcggcgaggagaaggcgtcgttgctgccgcctccgatacccaacctgccgctgccgcccatcgtccccgggaatcctcctgctcgcaactccgtcgtcaacaacaaatctccatagctctcttcatcatcatgtctttttaagataagcttgttgttgagaggtagtaataatactctgttgtgtaccaaagcagagagtccttgagaggatcgttgtggtgtgttctttacgtgaaaaccatcggtctttttatgacgtgtcagctctccttaatcttttgcagttaacgatgaatcgtaaatacacgttgatatgtggtaaaaatataggtaacactaatataaaaagataaattggtgtccgctcaataggtaccagattttctaaccgacacccggcaaatgtctctagtgtgaggaggaataaatgtgtcggaactgacacttttgaggttttcgagccgatttatcgagcagatcgatctcaatcaccaagctccccccgagttcaccatcatccccgtcacctaaggacacaatcacaaaatcaatattgaacgtccccagagtccacacagagagaagatgaagttcatccaaaaaatccattagaaataaaatgaagttagatttcacaagttcatcgacgaattaatacacaatcaacattgacacatccagacacaaccgattggactagttgcttgtattagcagatcccaactagtcgtaaaattcagcgttccatggagattgctcatagcaataccgtcattgggggttcggagttcaaagtttcgaaccatcttgtgaccttcgactagtgttcaatcacggatttttttattattttttttagactttttatgttttaattttatttatagatcattcccaaaagtattttcaaatctaaactttttggccacaccagcctgcctgacatggccaaataactctatcacgtcacgcgtagctggtttggtagtgttattctgccacgcaagcctcttgtcacgccaccaccgccagccactcggctgggtggccaaaatgttcaattttcaaaaatattttctaaaaagatctattaataaaattaaaacataaaaagatctaaaaagagagatcgcactccacatatgcaagtgaggatcactgacatgtggacccatagaccctcagacccccatgacatgcaagtgagggtcactgacatgtgggcccctagaccctcatgacagtgagcagtaacaagatcacactaatcaagtactaaaacaaatgtaattcatcggcaaatgatccaaatccacaactggctggagtttcgccatctgaatacaatcgcaacagaacagccggttcggttgccctcgtagtacatcggtatagaagtacagatagatcaagctgcacgagaataacaaaccaaacaatgtaggatgtatatgtgcagaaatcagatatgacagttgagctgagcatgataaatatcaagatacagactgcctcacacaagtttgtactttgtaccgtgtacatcgatatcttctttttacaaatcgctcatgttcatcaacggtaacatgagtcaacctcaaatatttgctttctcagcgtctcccggtacgggtagtttggtattaagttaggtcattctcgtccaaagaatcctcgccgtcatcgtctgccaatttcttgatggtctgcagatcacccgtaggtagtttctttgcaagtcgaattacctgcagtaatattcaccataaatcgaagtgaagaaggatgaacaagcacacgaacaatcgagcagatatcattttagatggaacagactatgttttagctgataatactattatttgtcctatggtatgatgataagtgatggcctgataattgatgaggtatcactgcttaatcaaatgatccaggaatcaatatagtatagagcggtaatgttgactaaaaaagagatcatgagtaacatcttcaacctgtaacgcctcagctcctagcacactgttttacgcatactaactatccaatctgtctaatcgtataaggagattgaaataacagcctggtatatatagttcagatatcggatggccttgtaactaagaaactcaaaatattaccacatggtcaaggtgtttgatggcacttgattgtgcagcctgtttgattccttcagcatcaccttcctcataagcagacagcagtttcattgcacatcgattctggtcactgttaaggaaggcttgaaccctgtaatgtagcagaaggtaataacaatgaaagtgatgtttgggctttggtgcaagaaaatatatcaatggcaatgcacatgtaccaacttttacagtgatagtaactaccatgaatgtacaacttactctgagcagtcattgtaacatttctgagcttgttgaaaatcatgggcataaaggtagatgatgattgcactcaaatagccctgcatattaaaagtaacaattacagaatcagataagtttattgctcaaatttcgataatgcttacatggataatcaatatttattccattcccatttggaattcataaacaaatttacaatttcaaggaagtttcttattatc

SEQ ID NO: 9123 - DNA, 38826 bp, Oryza sativa
  unsure (1)..(38826): unsure at all n locations
tgaattttttctcaggtttttttacatgtcatgtgccgttggtacctggccctgtcgttgctgtcggtgagggctcgaaatctgctccaaacctgcagcagcagatgcgctagaaagctactactaccactgaattcttactcacagttaagtccactgcaggttcagttcttcggtccctttgaaggtggcggaggcattgctcccagcatgggcgcttcgtttgatgttcggaaaagtgctcgacctggcaaagaaatgctgagtaacaggtttctgaatatggcaagttggagtatatctgtacgaggcacacattaccaaatgtaaagtaattgcgtaatggaacatggaatatcatagccacctttttggcccatagcatgggcgtcagactcctaggatgctctttctccaccacagagaggccactggcgttggcgtcacttgctagcctaaaatcatattgaaattacacaatatgatttaaataactccaacatcacccaaaaagctcacattgttgtgtatttctgttagcaatccagaaaatggttttgcacttaaatgtcagtataaatactgaacatacatacatgaaatagctgtgctcaatattaaaccaaagaaaaggaaaatctggggaagaaaactactatggatcataaacccataaacctatgaattccaatgaaggccttagaagatgcaataataattaagaaaccatagtggcatactaatatcaaaacacttgaacttcaatgttagaagtatccaagtctgttctgaacataccttcattttgcattgccacttgacttaacaaggtatggtgttttgctgagagcttgagctctcatcttttttgcagacattgaaagcgagtgagaggatatcatttccttggtttacattcaggcatcttgtctgctgcatcttacttggtgacaaatgcctccgtctgtaccatataagaaaaaaggacataggaggtcaggataagcaccatttgatgcatctgttacaccagaggtcaaataaaagtagcatacgaaccgaacaagcagaaattatcatgaaataagaaaaatatggtatatctaaactctacatatctagaggtatggaaaaaatgaaagaggccataaaaattggctaaatcattagtggctcaaagatgcagatcagtacatcagacttattcattatatgcatgggagacccaggagtgagaagggtaagacagggtgctaacgagaactcaccagtcaccacttgatcaaattcatcagttctttctatgcaaatatattattgtttgtggttgtgccccccaatctgagccctcactgagcacttcatacagaactgcaaagcaccagccaaatcattgccaactagaacaacttcatctacaatcatattcagttcaacatcttctgccttttcatcttttatcaggtcttcaatgttagtttcctctttgatcactgctaacttgtcatgtccttttgctagatgacctgaaggaaaccgttactgtgttcatccataaaaacatctcttgcttctggcgcgcatgtctctgagaaaagataataacacagtcaatatcaatacaaccgagatattagtgaactctagcatgcttattccaaattcatttaaataaaacttcaggcaggttaccttattcggaactacctgagatcacaaacttcatttgtaggccccacacaaactctcccacctcagttattttgtgtggacctcctgcagctcttggtctttgctggcagtagctagtattgctacagcaagaggaccagaatctgcagtctcttcctgcttgctccagtgatttctgcagatcttcgtagtcttcacccaagaactagttttcttcaacttcggttgtatttttcaatgctttgtatgcctcttcttccttttgcaaggactgctgcatggtagacagctttctcttttcagcatcagtcttcctccctagcagatcacctgctccctatgcagcagcactaagttctgattcgagttcatcagatcaagtatttccttcttcctaagggatttctctttccctggtttttcaattgaaacatttcatcaggagcatatgtctgatatcatgttcattgcagaagtaaggtttcctgctctttttcttggagataacggccttccaatcttctgcagagctggcaacatgaaaatatcaagttatcaacatgaaaatccaggtaaagcaacaactgcagaattttcaggattgcccacaataccaatgttcacatgtaaggtttctagggacaaaattcagttacctcttcgatattattttctaagttatcattgaaattcccagcttcatcaagtgtcgttccctgatgagtaaagcaaacagttaaaataaatatcaacatgtgataaagcaaatgaagcacaaaagcatgcttagtttacctcttcttcctctggatcatcgtaaacacgagtataggtttccttgagaatggatcatcactgaacatacaatcgacatgcaaattaatagtacaaaaagtacaatctaagaaacattttgtaacaacacagctatgagtgtagtgagttgcttgtcatcatgcattacttccttattccgtttttcgtggacttgtaaggttgacggcttattcagaacacaggataggaaaaatgcaagaacaggaaaaacacaggaatagtataggattacatacggaaaacagaggattgaaaactaaggaatttgatgacatgaagcattcagaatacaggaatacatacaacacaagaattttacaatcaagtaacctcatagattataatctaattaagcaatagaatactattttctatctagtcactactctcaagtactctctagacaggaaagccttatcttatccccttcattcatcagttcattcaccgcatcatctttttccccaatgttccagaggcatggggagcagcaaacagacaaaatcaacagggatggcgagctcggtggtaggcggagcaagcgaggcggcggtcgggtgacgagctcgcacgggcgcgtggcaggagtgagctgctgctgtggccactcacaaggtcgagcagctggcaacctcgacttgcttcttccccttgttctttttaattggattgtgtcttattcctatccttcatagttcttgctcagttgcttcgcttgtgtttgtaaaagttcttgtgtattgcttgattgcctcggtcttacgcgaaggaaaacaaaaatgaggtcggagtgggtgttatttttcctgtgtttttcctatgtaatcagcagcaaaggaatctttccttagattatcctatgaattgtttgtgccttccgaatgataggaaagggaaaaatcccaatgaacagtattcctccaaaaatcctttgaaaaatactgtaatccgaagaggccctcgcatctttgcttctgctaacagatctcaatgtactgaaactgtcaagcataccagtttgacagagtctacaaaattatttttgcttaacttacaaaaatggtcaagtagggaacaaatatgtacacatacaaaaacaattactaccagtaataaccgatgatcccattggtcagaatgcaggtgtcatatccaaatctgtaaactgataccgaacaaagcattcactaactacactaaacaattagttgatctaataacatatacataccacatttgaatctgatgggtattcaaatgtttccaataaaattggaccgatgagtccattgcgtaaaggttcccccatttcccattggtagctttcccactaaggtcccgatcaatcggagaagatccaacactaaactaccgccacgcatcaccaaacacaaccgatcagaagttcggaacctggataaaccctaatccttgctgagcactcgaggtatggaactcctagtcacaaactgaatcggaatggtagacggaagaggacctcgcgttacctaggggagggaagaggcaatgcgtctccgaacgccgaggaagaggacgcgcgaacccgcagaaggagagatcgtcggcgccgccggccaccggccgcggcggcgccgccccggacgagcgagggaggaaggaagtgaggcggagagcacgacggcgagggcaattttgtaataagcgcattttgggcttttactaggtaagcattagctgtgggcctttagcgaggaggagagctacggcccaatatgctcaagtcgacacgtggtccacggtggtgttgggcttccctgcctttgaatggtctccaagcccactacgaatatttactttatgcctttttctttttatcttttggatggaaaaaaaatattgtccatcccactagctcttttttggaaaaacaaatgtcatctgcaaggtttgagactttcagcctttcaggggacaagctataatttatggcaccacattttcaaaagaaaaaaagcagtcaaattattcgtttttacactgtaaattatctacatttgcacactaattattattatgtaaatttcaaaagtatatcataaattttctaataagctatataagtgaattatgtttaaaagtaaagtgataggagaggtataaatatatatactgtacatagagacaacaatcacataaggaaaacggttattggaatcaataaaaaaaatgcgtgtcatattttagtaagattgtttttcaaatgtacttaccttcttcaggttagagagtccaaattcccaattgtgattaggactttgttcattaattaattcatataaaaatcccaattacatttagtcatttacagatgtcgttgcctgaatttattgtgatgacaaatagtcatgccgaacaatcatgatgaaggacaaggtttgtgggttatcttaatagaaagaacaaggttgcacgcactaagcgtaattatattgttcaatcaacacggggatgacaattccatgcaaggcaagcaatctaattaagtatcagtactcgagcatgcatgtagtttatagtatactcctagatgattaggtttgaatagttttctcacgtacgcgtatgtacgtgcatgaaggcatctcatccatgaaataattctattttattcgtaagcaagcagaaatggtcagcacagtgattttcttaacacgattttgctgagttggctggcaatttggttcaccgatccgctgataaacagctcgtcggaatgcgcacgtgtgacgttgtctgcagggaaagtttgacaaaattatggggtgatgccaatttacagatttgggtcagattcagcgaattccagctcacgtggtttcagcatgtgcttaaatgattaatttacactcgtaatcttatctgaaatgtcatgaaaggagctgattacagctcaattcatttttaatcatcatactcaaactgtcaaacttatgcaaccttcagtagcgtggagtagggggcagtaacagtgtgatgttcagatgagatggcaagttaggaaatgttcttatgattaacaccaacttagcatataattatatatcatgctgccgccctgcaggtagcgggctgctctgcagacctcactgctttcgtcaaaatcacacactgattagatgtgagtagatatatatctactgcaagacggctatgatcttccctggtaaattaatttgaccaggttaatattttaaaggaggtgaccagagtgaaacctgcagagccttggcttacgtgtttgatagccttaattttatcccatactgccaaagatgacattagtttgttcaggtgtatcaatcacagtatgttactcagaccaactcccatgtacttaaaaattttctgaatttttgacttgatgctcagttagatctccgtggctcattctgcctctggtgattttaattgatgatctccttccctgaaaaggaccggcatgatgacttgtaatgagaggactggacaaaactggccactgaactgcttatcaggcgatcagaaaattcagaagttgtcaaagtcatcaccaagaccaagtacggagtggatggtgttgtgttctttctttcttcttctccccatgttcttaattttgatttcatcacgagaacagtccattccatccgtgtgccttgttacctgacgatgagatggcgaaagcagttcgcagagtagactttgagaagttcgtgttcaaactttcagtgagacatattgcctgaattcagtgacagacactgtgcaagttccttcgaggcaggccagtggtaacaagagacgtacaacaaagcacttggactagatcactcacttatcagttatcactgttaacctcttccttttgccgaaaatagttagcagccagcaagtttttcttcacaaatcttcagagaaaactagcagagaactactgaggaaagctgcagcctttgtcacaggtttgccgtcaggtcaggagttgctcggtagtagtgaacaatatgaaaatgcaaggcataaataatactgctaataaattcaggagcagccatctgttcctgacgtaattagcaaaacttttcttcaggtaggcgctgctgaaatggagatatgcgcatcatgaacatcctgctgctgatcaacaggcgcgacctgttgctacgcatgctgggtgatgccattagacagtgtttgttcggcggatttggactagtaataaaccagggttaagttcagggatcaaggttatagctttggacgcgagtcgctgatttgatgttccattaattactagcggctgtgttgaagtacttgcgtatcatttcttgggcggttttggcccatggatttcgcacggatcgtagtacgagaggccaagccgaccacgcgaatacagcctaatttttcgtcgtcggctccaacgacagcagattcactgtgtggcggtgttgccgtcgcagtgacaccgccggcgatgacgctcagtagatacatgatggaacgataggacactcgtatggggcaccatggtgcccgggcaccatggtatctaatgcacaaaatcactcaaatttttcaaaattttcaaattgtgagtatatacctagttataataatttgattcatacctatacttatcaacaaaacaactcaaatttaactttatttcacaatccatgattacatacctaactaattatatgtatggatactatatacctagaatcaaaatctaacaaaaacaagttcaaattcagttcaaacttgctttaaactagttagtaaagtagttaatgttaatacctaagtaattgaaaaagtttcatactcatttgaattgggtatatactcaatttcaacaatggtgcccgggcaccatggagcaccaaacaaatttactatatatatatatatatatatatataatccctccgtctcattttaaacgtagccatgagttttcttgtcctactttaatcgtctgtcttatttaaatctttttttatgattaatgttttaattgttattagatgataaaatacgaatagtactctacgcatgacttatgtatttgttattttttaaaaaaatttaataagatggacgatcaagattaaacacgaaaactcattattaccctaataatgggacggatggagtatacgggaagggatatctgacggctgaacggatcggatgtgatatgtgacttcaaattctcatatgatttggctgttatatctaggttaatgtttgactgatactccctccgtcccataatataagggattttgagtttttgcttacacggtttgaccactcgtcttattcaaaaaattttagaattattatttgctttttttgacttactttattatccaaaatattttacgcataacttttcgttttttatatttgcataaatttttttgaataaaataagtggtcaaatactacgatcaaaaacttaaaatcctttatattatgggacggagggattactagatttggacatttggaggtacatcaggataactacaacagaataatgttcggggagaaaaaacatcacctagtgcacatgcccttgtacgggaaaaacatcttttttccttttaaaaaaatatagattataatttcacataggggtatcatttttatatagataaatgagccaggataaattaagtccacacttggaattaaaaaaaaattcaaatctagtctagatatagttagatctctaattaaattcaaggagctatagattcggatttacagttggtaaatgtccaactaactactactacatccgtcttaaaatatagctacattacacttgatgtgatatatcctagtccaacgaatctggacagccacttgtctaaatttattgaactatgatgtgtctcatctagtttcaaattgctatatttttagacggagagagttgtagatattagttttttttatcatataataactacgtatcctcgtaatccggatgagaatatgtttgatggagcaagagactaatggagtatacttgcaattactataagctccacaattcaaacataccatattcataacccatccattttagatattacatttttttatggcatcaaacatggcagatgcttaaaacaaactggcgcatatgccttgagcttaaaattccaactccgtatagtatcaagtacagcaatttctattgggtggcgtgcgtcatccacagtagccgtcgttgcgtcagttcttttcatggcacaataaaagaaaaacatatgtggtctttgcctacctacatagatctcccctattaatactccatcgtgtccgtgtcctagaaaaacttctgcacacgcagccgacgcccttctctatctagctaaatctccattttaattcctctctctctctctctttgtgtctttctcaagggagaattaaccatcaaatcaatatatacaatgagcttgatcagcatgatggaggcgaacctgccgccggggttccggttccaccccagggacgaggagctcgtcgtggactacctctaccacaagctctccggcggcggcgagttctacggcggcgtggccatggtcgacgtcgacctcaacaagtgcgagccgtgggagcttccaggtacggatcagatcatctcgtgcaaaacttcagcttaattttctttcggaaaggtgatggcagatgcgtatattgattagctccgagcagcacgaactgtgtgtgattaattagctttgcaccctctgcaccgatccaatggtacatgcataattgcatagcagtcgcataacctgaagaaagaactgtgtgattatttaacatctgcagcttgcacccatccatctgcaatatctgattttcttttttcagaaaggctatacagaacatccgcagcctgcacaattcagaaaatgtttttttttaaaaaaaggatattcagaacatatgcagctttgacgaattcaggccaaaaaaaaagactcagaaaatgaaggaaagaaaaaaaaaagagaaaaatggcgtcgcccggactcgaaccggagaccttcagtgtgttagactgacgtgataaccaactacaccacgacacctttgtgttaccgaaatttagactaaattatatatttttgagaaatcatcttgcacgaattactatgagcaccagctgcatctctgtagatctcgtttcgattttcctttaattttgaaacaagttccatttgcacatttcttcacgtcactagttgcacttgacctatctgaactatatggttttttttacttgccatgaatcgttagcatatttcttgcacaatctgatcatcttccctgcacgcgcacgcgcacgcgccgccggtcgccggcgacgagaagacgccgcgcgggtgggcgccacggagtggtacttcttcagcntgcacgaccgcaagtacgccacggggcagcgcaccaaccgcgccacccgctccggctactggaaggccaccggcaaggaccgcgccatcgtcacccgccgccgcgccgccgccggagaggccgtcgccggcggcgaggtggtcgggatgaggaagacgctggtgttctaccaagggagagccccccggggcagcaagacggagtgggtcatgcacgagttccgcgtggacggacatgccgttgccgaccacccctcctcgtccacctcctcctcctcatctaatcttctcaaggtactacatgccagcatttgttttgcgtgatctcagcagtaattattagtgattaatctatcatcacgcaggtaaaagagtgaaaaaagagagagagagaaagatgagaagtactcactctattccaaaatataagacacaactacccttaactcaaagatcaagaaataattaatatatcattatcgttgtcataaatcactctaattaatacaagagatgcaaccaatagaattaaagatcttgtgagtataggatttaaaataataataacttaggggagagaatgtgataattaattacatgcgtgcgtgcacgtcttatattatgaaactactttaaaaaatagatgtgcctatattttagaatggatggagtaaataattactccctctagttagaaatattttgtgtttggggcgagatttatttagttgaaattttgaattctgataatcagttctcaagcaaaataagtttatgaaatctaataaattcataccacagtacctccgtattaaaatataagtattttttactttgaatctggatagataaaaaatgcttatattctaattcagaggtagctgtattccttttgacacatctacacacgccaatgttttcttttaaaactagtattttagaaattacgaatggttaaaatttcaaaagttgattagatattgtcttatgcatcaaatatttatgattctaatgcctagattaattacgtactgagaaaatacttatataaagtgcgtactaggaagcttcgtcagtgttagaagagttctactcttgtaaatgcccacgattgcacgtctcttggtaagtgacagccagaattaggatagtagtagcaacatgtttctttcacagttttgttttctttggctctacagactttagccgaatgctgtttttttttcctttttctgaacattctgatgtgataaactagttatgcaacttgccaatgattgtttctacttgacctagtcccatccaatcattcccaaaccttgtacgtatcaccaatgcttgccactcgaggtttgttcgattggctacatcgctgtgcatcatcagcaacactaaattacaagcctagatatgtaggggaacaatttgaaaaggatttgactgcttttatagcacagattctttattccaagttgttagttgttctgttaaatgatgatttaaggccctatttagatgggactaaaacttttaagtccctatcacatcggatgtttgaaaattaattataaatattaaacgtagactattaataaaacccatccataatcttggactaatttgtgagacgaatctaatgagcctaattaatccatgattagcctatgtgatgctacagtaaacattctctaattatagattaattaggcttaaaaaatttgtctcgtgaattagcttttatttatgtaattagttttgtaagtagtctatatttaatactctaaattagtgtctaaagacagggactaaagttaagtccctgaatctaaataccacctaagcatattcagattattgaggtttccacaatatcaagcatcgtacgaactgtatatatatctatctatctttacaagataatataaacttcatcccaacctgaggtcaccaaatcttattttaaacacgaatggtaagttaagtacaacttaatctactttgtctgaatatttcttttgacaaaaaaaaaatgcaggaggactgggtgctgtgcagggtgttctacaagagcagaacggctacaccaagggcagtagtctccggtgaggctgccgtgtcactgtccggtgagctcagcttgccgccgccgctgccgccgcccgttgcccccgccgtcgtcgacggctacaccggcggcggctattacgagcaagacagctcagctgggtaccaccaccaccaccaccaccggccgccgccgtcggcagcattgccgttcaaggacctgacggacttcagggacctgctgagcaacatggcacaaggcggcggcggcggcgctgccgccgccaagacggaggggttccatcttggctggagcgaggaggagtcctccggctacgtgcagcagagcgccatggcgtcgcaggcgtggaacccgttctagcttagctagagctagagctagagctatatatagctgatataagctgatccagttctgaacttttttcagaaatggtgatgatatacaaaggcaaagtttgtaggtgtagcttagacaatgtaaatgtaatttatcttcgttgtttcagtaattttcctttgttaattagcgtggttgaatcctagttgtgctactgctagttaacagcgtagtgacaaacaatttgtaaatgtggagatggtttggtttacagtaacttttgagatgtacaaaggattgctccattcagttcattggttgctaaagaagagaaatagattcgatcgttactcatcttccaatgatcctcttagcaaaagtggtgcaattagatatctgttttggatgctttgttttgttcaacatttgctttattatgggctgcaagttttattagcatgcattgtgatggtccagtgaagtccaattatggcccataatcaaggcaggcccatcacagcctgcctagatgaatatctgtctgaagtctgaacatatgatcctcttgtgatttttcatcagaagttgatgtactgcacttgttggattcctccccattacggcatcacggacatctgcagtggttgatgacacttgatggtaaggcagttttgtaccggagtgaccagactctgatatgtcaagaacagacataatgtttctatgcctcaccgaagtactatagtaatcaacatggttcaaccatgcattcttaaatgttaacaaccgatacctgcaccaaatgtttataattgagcttatgcttctcatcgaagggaaaataaagggagaagagcaggagaggatgattcacaaacatacctgatactagttgctaatagattacagttcactacttttcagagacaaaaatgctctagttgaaatgattgccacagggtgtggccttgctagctgttgcccttgtcagagaacattcttcatggaagtatcatagtgttgtgtctttaggtagatggattaataaaatagattgataaatgcagaaagctttggtaaagtgattagcagcaagctaggccatgttccaaaatccaaacggcctcaaaaataaaagcaatggtttgcttcctctgggcggccagatgaagagggacccaagtgttagagcatcttttgctcatagccctcacatggattgccccccatgccggagatcacagaggattaaaggaaacatttgtgactgtttaatataatagtgatcatactaagcactggtgtcccaactagtacaaatgttgcaagcttctttcagagacctgtcccaattaatccagcatctggtgttaagtcaccacacttcttttcagggagtctgattgatccaacatcttgtgttatgtaactcttgggatgctaaacctaaaaaaatcaaatgatagaagagatgattaaagaaggggtaggagtactttgctagttctacatgcatgacagatttcagtaggtttggtatagtttgattgatgagcaggtaataaagacatgcatgtcctgcagagctagattctttttcccctttgtctttggcaagggtagttgcaacaagctagtaagccaaactgccaagacagtagacagagactaattgatctctagctggattagtatattattactgtggcatgtcgagtaactaaccaacttgtgagcaacttcttgattgattttgattttggaatttaggccttctcttgatctgatctgaacttatggtcgcatttacttctttatgttttatcttaacgaaagcgtataggggcctacttacgtatctctgttgtaataataagatagaaaaaagaattagtccgcaattcggattagttcaactaaacaactatgtatatcatctacataatgtacatctttattgcctgtctcctgcatcacggttttctggtaaatgtatcaatcaagtttcaatgaaatatgtcggctgacaatattacatgatctcatataagaaacagtttactggaccaacggaaactgaacaaaaaagttcaaaatggaacctaaatcttcttcaatgatccgattaaaaaaaaggcagattttctgtgtgtttgttagtgaacgtgtcgttcatctgatctaccaaagtttcatgtgcgattctcatctatagtcagaggagagatatcgtggtttcattacgaagatcccaactaattagaatgtttgtcctctgcatgctatgcagctcacatgctaaataggcacggtacgatgacctctttgtcatatctttcaatcattcgaccattagcaagggcacaacacgcgagcttttgtaaatggaaaccaggacatgctccaaatcaaacaacggatacggaaatgtaaagaaatggagcaattataaacaccgacggatttacgggctctaaaagttttgataaatttcactacagaacatcacgacctcgcggttttagctataagatgaagtacaaactcatttttgaaggaaaaaaaaaactctctaaccgttgttattttctagcactcattaaaataatgtatttatgctgacgaggtaacaaggggcctgatattttacacgttgtgacgccgccactattctccccaccatcctcgaccaacctcatcgccgggatgcaaggctgaacttcgctgtgtggttcgtgtggatctgagtaacctaagggtccacacagtattcacctcttggctgttgtggaagaagcagttttcgccaccgtcggactacacacccaaaattgcctcgtcggcgtgctggagactagtttggttcgcgtctgttcaagccaaaccagctcaatatgatctggacccgcacgcaggggcagtttggtcactccgcgtaaaatatcgggccccctattgtctcgtcagcatgaatacattattttaatgagcatgatgtttattgtaaataaccatgtaaaaagagtgttttccctcaaaactgagtttgtgtggtgtcttacagttaaaacttcgaatacgtgatattctgtagtaaaatttgccaatttctttcatgttctgccattgttttttatcgaactcaactaacttatgtctaaatattttaaaaaagtttagcagtatgatacttagtttgaatgtgaggtgaggattggttagttagtgacatggaaaacaaagcgcgcgattagagcatattaactattataaatttaaaatattattttattaaaaatcttctctatatatattttttgtgaagcacaccgtttagccattcggaaaatatgctcacgatgaatcaggaagtagctgaacaaataatctacttagaattccctaaatctagtcgcacaattagttctatgaattcttgagttaataatctgatatgacaagcaatgaatacttagaaaaataacaacaccataatccttaagataagataagtagtgactacaataaaagcaataagagttggcaccgccgatgaccgcggcggcggcggtattggcgacatgttcatctaccacacctcattattgtatcattagtcttagaatgtttcatttcgtagctctctacatacactatttgctccattattaaaaaaacacatacattatttgcacaagttttccatgggaaaatcagattggtcttagccgctgtggtgcaaacctgaaactatgcaaggcaggtccacgcctccactagagccatttcagctgcgctgctgattgctgaagcagtgaagctgacctatgcacaccggtttgcctcgtattctctcttatcggatccggttcacccccgcccgttaacccgaaatcacccgaatatatagcgaactttccgtgacacagtggagttaaccaccactccgctaaccaacctcacgagctgagcttaattgatgcgccatcgccgccggcaatggccgccgccgcagtgaagtcgccggagccgccgttcgcgttccgccccgcccgtcccccgctcccgccgctgctggacgacgaggaggatggcgagttcgagttcagcgtccccgcggccgccgccgtgctgtccgccgccgacgagctgttctccggcgggaggctcgtgccgatgctccccccgccaccgcggcgtcccccttcttcttcttccccgccgtgctcgcccccgccgtgcctggaggttcccccctccgagccggcgtcccctcgcgccccgcggtgtggtgggcatcggtggcgcgatctgctcacgctcgtgtcgaagaggacgagcgacggcgaggcgaaggatcgggtggtgggtgggagtccgaggcggcgggaggcgcacgcccagccgctcctctcgcgggcctcgtcgtcttcctcgtcggcctcgtcgtgcgactccgggatcaggaacgcgcggcggccgccgcggacgcgctccgcgccggtggcgagcctcctccacctcatgtccaagaagcccgccgccgtggacgcgccgccgaagcggcgagaccatcatcaccagcggttcctggcccgcgcctcctcgtcgtcgtcgtcctcggcctcctcctcctccgactccgggaggaactcccgcacgccgtggcacccgcccggccccgcgcggccgcggccggcggtggccgccgagagcccgcgggtgagcgcgtccgggcgcgtggtgttccgcggcctggagcggtgctcgagctcgccggcgacggcgggcatcggcccgcggcggccgcggccgagaggcatggagcggtcgttctcggccaatgtgcgcgtggatccggtgatcaacgtgttcggattcgggcatctgttcctgccatcttcgccggccaaggagaagaaggccgacaaggacagggacatcgccggcggcggcggcggcggcggccggaggaacaggccggcgaagctggccatggtgctgagagatccgcaagattaggtggtggccatgctggaaataatgcatgatattcttccagtctttggattttttttgtaacttcttgctgctgcttgatctaattcttctttgtctttcagttgttgtacacttgcactgtaatatactctagatttagaacaacaatttgcaaaatttcagagacacttttggtgaatctgaattcactgtcagctgtaactctgattataaatgcctatgtaaagaaaggaacttgatgaacataaaacattcggtagtacacaaaaacccaactaaaacaaatgactaaaatgagtactggtactaaaatgcaatcaagctgcaaataggatcaaagatgcaatgtcaaatcaaaagctcacaaccactggagaaaatgtgacaccaaagttttgaaatttctcgtcgtcctcgacagtacggtagaacaggaggcagtgactcctcctccccctgctgctggagtgagagaaatgggttgattagcctcgtgatctgtgcaggttttggggctctgtgctgctctgtccccacggttgtaattcaaaaagataaaaatatggtttgaactaaccagttgtatttggatttatttggttccaaatcattttaaagttcacccgtcgtgttttgacacaaacatgaggatctctcggtacttgttgccgatgctttctttggtgccggcagggacatattcttacgaatctatgcctttttcttaaagcgaaaaatgtgcacacaagttcaagttgtgttcttgtgaggtggatcaagttccagttgtcaccatcatcctcgttgatgttagcattatctcggatcggaagccaagcagaggcagcacgactggaaactcatttttttcaatcgcccaaaagcagtagaatactcatctacctaaccaggatttgctgccgttgatggcgacggcttccggcgccgctgtctcgccgccacacgccggtaaatgtgttatatgcgctaatgcgcacaggtcgacggcgttggtggcgccgccgctgaacacacaaaaaaagaaaaaaaaataagtaagatttggagagacatccttccaaacagttttttttaaaaaaaaattataagctattaagaattgaacaagagacatcaggattgaaatcacacaccccgcgttgcttttggacacgccgggactttggcacagctccagcttcagctccagacaatttcagctccacttaaaataggagtggaactaggtgaaactctcacaaaatgaactagaaagatggagctaagtttaaataggtcaataactccactttaaactttttatagctaaatttagatattggagctatatcaaatattgccgctacgtgtttttctagcttttgtgctgccaacgccctggagaagaaaagatggcggagtggttgagctgacgcgtgtgacccgagagaacggaagcgaaaaccgcaacggccgccggcaacaacaactactcccgtattggcagcaacaacaacgcgacctgacgaaacttttcagctccacggaaaggaaaagggatattttcctttccttatttttgggtgatatatcatatgatctctccccggtggtcaacgactccgccccgagtcccgaccgcgtcacgttacaactcacacgcgacgctgatggatggatcacagcagcatcagcctgattcagcgttggatcggcaagcagcaaaaccgctcgcgaggccgtgaccaactgaccaccaccaccaccacatgtacgtccacatgcgcgaattggcgatggaaacgggacggcatcccgttgcggcaacggagccctgcgagagacgagagacagagggccaaagtttggggagcttttgcgcttctcctgaaatttcctgctgccagaaatttcctcaaacggtttagattttcacacaatttctaagaaactgtacttgtagaatgagagagactagagaacatgattccgttagaacatgatattttaagtgacttcttcctggtacctgatagcctagtatcaagctgttacctaggcatctcggcttcgcttgaggcggagagacaccaccgccgaccgcagcggctgctgcttgcatggggcaagaccacggcggcgcagcacgtggtggtgtggcacctagaccacaccttcgagaagctcgcgtcggcgcacctcccgctcgtggcggcggcaccgctggtggacgcgctgcgtgcgtcgcccgccaagccactcgcgctcttcgacctcgcccgccgcctcccgctccggctccatcggcgaggcgcgctctacttcctccacctctcccctcgcatgttcggcctccgcgccccgctcccgctctccctctcgctcaccgcgcccgccaccgagctcctcgccgttgccgcttcccccacagcggcggccgttggctccggcaatcggtggggcgacggcgacggggagggctgcacctcgggagccatctgatttgtgggaggagagtgagggtaggaggaggggatccggattagtatagattttctcttgtagaattcagaagattagttttctagcttctctatatttttatttattacctctcaaaattttaagcttgtagaatttagaagaatagttttctagcttctctatattcttatttattccttctcataattttaagctttcttaataggatcggagtacacgctgctgagacggcgggatggacgcccctgttgatgggtcccaattcgcgtggaatctcgccgcctcgacgacatgtcacggcgccaccacacgacccgccacgccacggcgcagttcgtgtcgcggaacaggaggatgcatgggcctcgcgcggcgtgtgggggaagctgcgaatctcgcgtgcggatcgtcgcctcgtcgtcgtcggcgggtggaaggatttcttggcgcatgcggtgacggcacgcaccctctggcccagtagtactaccagtagggcccaaggtgaaggcctggctgataattgcgcacgttgcgtgatgggccaggcctggctgggctatcaggccgtacaggccgagatttgcaggagccgcaggttttttggctggtgttgccactgccgggaattcggtgccagcaaaaggttcacgcacccgatcaccgtgtgtgcgttcgtgtttttatgatccttttgtatttggacatttctaacacggagtaatacatagtatgtttcatataataagttatttaactttttctcagttaaactatagagaaatatactaatatttttaatacaaaataaataaactatcaaaatatattcaatgttaaatttaataaaactattttggttttataaatgttgctaatttttttctataaatttaattaaccttaaaagctttgactaagaagaaaatcatatgacttgtaatatagaacggatggagtacatgtttcaccgatctcactgcggcagcctgcatgtcccggtggttgcctcacgacagcacgaggatcattactggtctgcctatgatgtcgttggtggagctaaacatcctgaaaatagctaagtattccctccatcctataataatataatatagcaatataggataggacgagacatttcatataacaatgaatctggacatgcatacgtccagattcattatcctatgaaatgttttgtccggttctatattgctatattataggacggaaggagtagtgagttaaataagaattaagaaaagttaatattggtaaaaatcgaacataaaattctaaaggtcgctccggttaacagaaacttcataatttggatctatatctcctctcgggcagtgtgtggtatgcggcagctgatgctattgaggctaaaccaaacaacttcaatgtgcaaatatcaattcaccaacagaaaaaaaatatttcacacaatcaacttctgtatcctaccataaagtttgaggataatttcaactagtaaaacaacagagaaataataacgtttacatgcacgcaagacaaaatgatttacgtgaaaaaacatcctcagcgtgaggagtaaaaacatcggtccactccaagcatccactatagtacaaataaaatattgtccagaacacctagaggcatatcatagcagcatcaaaatcgtcgagttatacacttggcatcaacaacaaccataacaactaagaggtatagcaacaataagcgaagaaatggtagattatatctcatttgttggacctttaagctacaatgggctaagagcaaaaagctcctgcagagagaatttagcccaacagatgcctgtacaattttttttttgagagctctccgctttgagtacaagctgtagtatctgaacatacgtgcaaacgcactccaccacgcacacacacacccctacacgcatgctagacctatcaactatacacacacgtgctaatgagatgcacaaagccacctaagaaccttgtgcgtgacgaggacgtcactctactattgtggcgctggcacgcatgctagacctatcaactatctgaacatacgtgcaaacgcactccaccacgcacatttgagagctctccactttgagtacagagtacaagctgtagtatctgaacatacgtgcaaacgcactccaccacgcacacacacacccctacacgcatgctaaacctatcaactatctgaacatacgtgcaaacgcactccaccacgcacacacacccctacacgcatgctagacctatcaactatacacacacgtgctaatgagatgcacaaagccacctaagaaccttgtgcgtgacgaggacgtcactctactattgtggcgctggcacgcatgctagacctatcaactatctgaacatacgtgcaaacgcactccaccacgcacacacacacacccctacacgcatgctagacctatcaactatacacacacgtgctaatgagatgcacaaagccacctaagaaccttgtgcgtgacgaggacgtcactctactattgtggcgctggcacaggagagctggaaatttatttgggaataaatcccggtgagacgcgcggatgatgatcccagggatcgaacccgcgcgggctgctcgctcaccagcgatgctagccaaccgagcaacgctcggttctcgatgcctgtacaattggtccaattggtccatgggctaagagcgactcgtggaaacgacagaagtcctctcaaacaaaagaagtaaaagaaacaacagtactagtcaaaatcggtcgttggccactgatcactcgctgactcggccttcagaatcatgcatggcggctgatggtggcgccggtcgatcgagacaaaaacgcatgcgtggatgcatggacatgtccccctcctcgcatcttgcggtttgttgcatgtcgcgcccactcgcgcgcgccgccgtcgtggtgttcgtccagtaatccggccagcatttgcgttcagacttcagcaagtactgccactcaggtggtgtttgaaactagggacttaactttaactttagtctctgtatttaaatattaatttagagtattaaatatagactatttacgaaacaaattacataaatgaaacctaattcgcttaataattttttaaacctaattaatccataattagagaatgtttactgtagcatcacataggctaatcatggattaattaggctcaatagattcgtctcgcgaattagtccaagattatggatgggttttattaatagtctacgtttaatatttataattaatttttaaacatccgatgtgatagggacttaaaagttttagtaccatctaaacagggtctcacgttgatgctagactgctagtgctcttgattattgctatattctctcataatcagatgctatggtttgtgataatgacagttttctaatctttagttatagccgtggtccatgatattacctgagctaatgataagtcaaaagtatattcaattgaatccttccttttggcttctaaatatggataagggcccctttgatttgtaggaaaaatataggaattttggaggatctcaatcctatggaaaaaaaatcctatgaaggcctttgaaacaaaggattgaatcctatccaattctttaaaattcctatggaatgggtaatcctatgcacattttggaggaaaattagcaagaggtctaacctcttggaacatttcctctgagtctatctctctcatctgattcctgcgtttttcctgtggtccaatcaaacggccattcctgtgtgtgtttcctgtgttttgcaatcctctgtgttttacagttgtattcctatcagaatcctgtgttttttctattcctttgttttttcattcctacgattcaaatgggccctttgggaaagtggccttggtagttgcagaaaagctgtacccgatcttaaatttgaatataccaaacaaacagatcagcaagcgaacttcgttgaaaactactactaatggttattggagtacccggctcgatctatgtcttgttattttcccaagatcgttcaaaattttcagcttggtcggtgaagccaacaaaaattcccctcggcaagttggtacttggtagcagacgacgactaagcaccatgattccgagtcgttgcccttgtttttagctaagcatgcgttgatctgagcagtccaacaagtgatacacagagtttttttggcaaaagaaaccggtgcattgcagttagcacactgcagtattcagatttcagtatcaactcgcctgctgttctggaacatccttccctaactcttagaccagcaattcagaaagtactactacaattcagaaagtacttggaaatcttgatctcaatggcaacaacaatgaacaaacagaattgagcttttacactcgaacagactaacagaaccttcagaaatcaagaattctctggtcagtaaagtgacccaggtctgaacattttggcagtagagaaattttacggttcttaaaaagtacctcaagatatttattttttcattaaaaatcttagtacctcaaaatatttagcatccaaagttaccaaaattttatagtagaaaatatggtacctcctgtactttttgaaatatatgataaattgtccttgacaataaggcaatcacagatgctacaattatgtcggcatggcaaccatatctcagaatttcgatgcaactagccgtaggcccgtagtagcctctgctagagtgctagttgacttgcccgtaacgtaaagccgcatgcatatggtacgcccatctcaatcttctcctgcatatatcgttcccgccaaatttcaagtcaaaacctctcgccaaactgacacctttcgtcaaccgcggactctgaccgaagttgacggctgatgcaatctgttctctatatgcataatgtatttgcgaattgagatttgatcatgtgtttgcgtgtaaaagggagaaaatttgtgagcaaaatggcgcatcgcaattcgccagccatgcatacgcgtggtggtgggctgggctggcctccgcttggccacgtccgttttctcagtacaacactgacacttacaacacatccacactcatccctatagatgtatgtacgtaaattctacacctataagtatcttcgaagattggaccaataaatcctataaatctttggtacttacagtatcggatgcatcgagagatactaaatcttacattaaaaaataggtatcttctaatattttctcaatgactttaaaatcactctacctcgcttagttgcacgcatcgattctttgcatctgtcacgcatgtgagatgccactcaccgagatggctgcgccatcttgttgcttcatccactaacgcaagatttgggttcagacttcagctgaattctactggttttgtagcttctttcttttttttcccctctcttttgccggggcagcccaagcagagtgctcctcgcactatcaggttgccaatgatgatgacagtgttctttgattagtccatgctaacggccgagcgaaaccaaccgaaactaactatattcaactaaaatcttttcctggctttctgaatcatgcacggtatgctggaagtgtattcaattactagtgtctgatttttaatttttttaagggtatttaacacacgtctcttttccatatggctaagatttcttttctttttctttttcttttttgcggggacatatggctaagatttctgattagtggtgaagccaacctttcttaacattaaccaaagcacgtgaacttgcttctgtcttgttcgtcttgtgcacgctgcacagtccaatattttcagcatgatatcttgtccgaaaattttatactactgttctctcggtgatcaactgatcaagtaccaaaatgactctgaaatgcagtttaatatatattttttgtgtgtgtcagtactagtattctccattgtgcaatcttaattttctttctggcagatatatgaacatgctttaaaccgctcgtacgagaggttagggtttattattggtcctgtgttgattagaaaggtgcctttgtggaagccaggctaacatttgccctgggtcctgggcaagttggtacgaatcaaagacatagagtgtcgtttatacctaagcatgcgctgatcttaatcctgattcctgaagagtccaaaaagtgttcgtcctatctgatggcacaactgattgctgaaaagaaaccactttcaactggtacaaggacaaatttagcacggtggattcagaatataccactttcaacaggtctaccgtttgaccacccctttttgaaccagcaaaggattttacaacagaagaaaaaagaagtccattttactctcttaaataatttcattagatcacttaacgcctaaattacttttggctcattttactcctaaactattgaaattagtccagtttactccatagtagtaacatttttcttttttgtttctctttatataagctagtagtatattttaagctataattttttagagtcatatgataccattatcaaagttctaaaaatatattcattttctttcacgactgttttcttcaacttcataatctcgatgttcaaatcaatcccctaggtacttccaagttccaactcagataaactgtggtatgaacaaaaagtattgagatgtgagatgtatactattatcgtcctaccaaatttcattgcaaaatataacttatacatggaaaaacataaaagataaatactgttagggaataatcaatcgtttttaatagtttgaaggtgtaaaataagcttacgcggttaagccatctaatgtacggaataatagtttgaaaagattaacttttttcggagccaacagaaacgatgaagccttcgccgtggtactgcccagaatgcggccgcgcgcggcatcttggatcgtttggtcacatggaggctacgaccatgtcggcacggcaagcaaacgatatctgaatttcgatgcaggagtaaactctgaatttattggttgcgtgcagcatcgggccgtatggcccccatctcgtcctcgccgcaacggccaacctgccaacctggtgtcctcctatcctactacttcccgccacttttggagtcaaactgtggcctatctcttcacacgttgacgcgaccacgttgacgcgatcagggagctcgttgacttcacagtggattgccacaccattcgaagttctttatatgcacttgcgattttgattttgatttgatcccatggttgcatggagaggaataaatttgcaagcaaaatgtcgcagcattacacgaagacgatttgcattgccgtcgtcttggtggccgtgctgttctcgttgtcgtcggcggcggcggccggctccggtgcggcggtgtccgtgcagctcgaggcgctgctggagttcaagaacggcgtcgccgacgacccgctcggcgtgctggccggctggagggtggggaagtccggtgatggcgccgtccgcggcggcgcgctgccgcggcattgcaactggacgggcgtcgcctgcgacggcgccggccaggtgacgtccatccagctgccggagtcgaagctccggggcgcgctctccccgttcctcggcaacatctcgacgctccaggtcatcgacctgacgtcgaacgccttcgccggcggcatcccgccgcagctcggccgcctcggcgagctcgagcagctagtcgtttcttcgaactacttcgccggcggcatcccgagcagcctctgcaactgctcggcgatgtgggctctcgccctgaacgtcaacaacctcaccggcgcaatcccttcttgcatcggggatctgtccaatctcgagatcttcgaagcctacctgaacaatcttgacggggagttgccgccgtccatggcgaagctcaaaggcatcatggtcgttgacctcagctgcaaccagctgtctggctcgatcccgccggagatcggcgacctgtcgaacctgcagattcttcagctgtacgagaaccggttctccggccacatcccgcgggagctcggccggtgcaagaacctcaccttgctcaacatattcagcaacgggttcaccggcgagatccccggcgagctcggcgagctcacgaacctggaggtcatgcgcctgtacaagaacgcgctcacgtcggagatcccccggtcgctccggcgttgcgtgtcgctgctgaatctcgacctgtcgatgaaccagctcgccgggcccatcccgccggagctcggcgagctcccgtcgctccagagattgtcgctccatgccaaccggctcgccgggacggttccggcgtcgctgacgaatctcgtcaacctgaccatcctggagctgagcgagaaccacctgtccgggccgcttccggcgagcatcgggtcactgcggaatctccggcggctcatcgtccagaacaactcgctctccggccaaattccggcgagcatcagcaactgcacgcagctggccaacgcgagcatgagcttcaacttgttctccgggccattgccggcggggctcggccggctacagagcctcatgttcttgtcgctcggccaaaactcgttggccggcgacatacccgatgacctgttcgactgcggccaactccagaagctcgacctgtcagagaacagcttcaccggcggcctgagccgccttgtcggccagctcggtaacctcacagtgctgcagctgcaggggaacgctctgtcaggtgagataccggaggagatcggcaacatgacgaagctcatcagcctgaaactcggcaggaaccggttcgccggacatgtcccggcgagcatctcgaacatgtcctccctccagttgctcgatctggggcacaatcgcctcgacggcgtgttcccggctgaggtgttcgagctgcggcagctcaccatcctcggcgccgggtcgaacaggttcgccggccccatccccgacgccgtcgccaacctccggtcgctctcgttcctggacctgtcgagcaacatgctcaacggcacggtgcccgcggcgctgggcaggctcgaccagctcctcacgctggacctctcgcacaaccgcctcgccggcgccatccccggcgcggtgatcgcgagcatgagcaacgtgcagatgtacctcaacctgtcgaacaacgcgttcacgggcgcgatcccggcggagatcggcggcctcgtgatggtccagaccatcgacctgtcgaacaaccagctgtccggcggcgtcccggcgacgctcgccgggtgcaagaacctctactcgctcgacctctccggcaacagcctcaccggcgaactcccggccaacctcttcccccagctcgaccttctgacgaccctgaacatctccggcaacgacctcgacggagagatccccgccgacatcgccgcgctgaagcacatacagacgctcgacgtgtcgaggaacgcgttcgccggggccataccgccggcgctggcgaacctgacggcgctccggtctctcaacctttcgtcgaacaccttcgagggccccgtccccgacggcggcgtgttccggaacctgaccatgtcgagcctgcaggggaacgccggcctctgcggcgggaagctcctcgcgccatgccacggccacgccgccgggaagaagcgggtgttctcgcggacggggctcgtgatcctcgtcgtgctcatcgcgctgtcgacgctgctcctcctcatggtcgcgacgatcctgctcgtcagctaccgccggtacaggaggaagagacgtgccgccgacatcgccggcgactcgccggaggccgccgtcgtggtgccggagctgaggaggttcagttacggccagctggcggccgccaccaactcgttcgaccaaggcaacgtcatcgggagcagcaacctgagcacggtgtacaagggcgtgctcgccggcgacgccgacggcggcatggtcgtcgccgtgaagcggctgaacctggagcagttcccgtccaagtccgacaagtgcttcctcaccgagctcgccacgctgagccggctgcggcacaagaacctggcgcgtgtggtcgggtacgcgtgggaggccggcaagatcaaggccctggtcctcgactacatggtcaacggcgacctggacggcgcgatacacggcggcgccgccgcgccgccgccggcgccgtcgcggtggacggtcagggagcggctgcgggtgtgcgtgtcggtggcgcacgggctggtgtacctccactccgggtacgacttccccgtcgtgcactgcgacgtcaagccgtccaacgtcctgctcgacggcgactgggaggcgcgcgtcagcgacttcggcaccgcgcgcatgctgggcgtccacctgcccgccgccgccaacgccgcggcgcagtcgacggccacctcgtcggcgttccggggcaccgtgggttacatggctccaggtaaaagctacttcctccatttcagattataaaacgttttaactttgattaaggttaaatcgttttaagtttgacgaagtttatgaaaaaaaaataataatatttttaactcacgacaaaattattataaaaatatattcaattattaatttgataaaactaatttagtttgtctataaacttagttaaacttaaaacaggttaattttgatcaaaattaaaacgtctggtaatcggagggagtaccaaactaccaatccaaccatttcgtctcagtgatctctgaactgaaaacgtctaactctgtgctgaaaaaattcagagttcgcgtacatgaggacggtgtcgacgaaggtggacgtgttcagcttcggggtgctggcgatggagctcttcaccgggcggcggccgacggggacgatcgaggaggacggcgtgccgctgacgctgcagcagctcgtcgacaacgcggtctcgagggggctcgacggcgtccacgccgtcctggacccccgcatgaaggtcgccaccgaggccgacctgtccacggcggcggacgtgctcgccgttgccctgtcctgcgccgcgttcgagccggccgaccggcccgacatgggcgccgtgctctcgtccttgctcaagatgagcaagctcgtcggagaagactgaacaaaaaaaaaaaagaagagaaaagctaaactctcgctgcaattctgcagaatgcagcagcgaaaacgtgcaaatttcttggaagattcagagttcagttcatgatgatctcaaatggtttttcgagttgtttgcattgcgaactttctccattgatgaggtgtactgttgctactgtgcatggtcaaggagccgttcgtgtgagcttactgagggtgtgttagttcttcgggagtaaagcttttgaattatacagacacatatttgaagtattaaatgtatactaataacaaaacaaattacagattctgcctgtaaactgtgagacaaatttattaagactaattagttcatcattagcaaatatttattgtagcatcatattgttaaatcatggcgtaatttggctcaaaagattcgtctcaaaatttctatgtaaactgtgcaattgtcaaatcatctgcaattctgcacaatgcagcagtgaaaacgtgcaaatttcttggaagattcagagttcagttcatgatgatatggtttttcgagttctttgcattgcgaactttctccattgatgaggtgtactacttatttgctactgtgcatggtcaaggatccgttcgtgtgagtttgctgagctgaattaattgcgaggaacagtgcaggtgcagtggttaggtatcaatctcgcccatgctgcctgaaagcatgggtctgaagtggtaccaaagtttctgccttttgaccctcccaaaactttcagagctgcaacatacctgtatgcgcaggccctgcaggtgagaatggaagctgaaagattgaaagattcgacggagctgaaaacaatatattactcgagctgcatgagtgcgaacaaaagtggtgaactcatcacaaacatgttaacgtgaattatggcttctcagatgtagatgtgtcttttgaatccccggcagtagcttgttgctgggcagaagaatgtctcctgataactctcatttactactactcaagattaggtgcagataatcaatgccagttttgtcattacaatccgttcataccacaagtacatatttagctaggaaatatccattgctgcaattctctggagtacttgattaaattagccatgttgatttgcttgtcagagcacataagcatcagcagcaggaagtagactgtctgctaatatacagtacagagatcacaaaaacgctttaggtcttgtatgcacagaacatgacgaggaagcaagatcaggatcaccactatttattgacgtacaaaattaactagttaactgcatgcagtagattcatcactccattgagcaacttgtttcatctccaggaacaccatgaactgaatgaaggttatgcagtctagagtagtagagtctagactgcatctgcttctggatctcttagtaactcgtcaggtggtcatcactccaagaagttgtacgatgaattcctctccgtgatccaaccgctgttgtggccactgctactagctagacctcttctctgctgctcctgcattagggatgaacaactactcatcagccatgacgcatagcttttttttttgaacgaatcggcaagctgccaatttcattgaatagagaaggagtaaactttacaagtaagaaaaaccaggcccaggaccgaaggtcctactgagctaaaaataaaaagcaagccagctaccaagaatgacgcatagcattgttcatgtgcagaaagtctcctttttctcaagcacttatagtacatgtaaatacttttctgaagtgttaattagtacatatcatgtaacaatcaaacaccatagacatacataacctcatatcaggaagataaaagctgtactaataatggcgataaaggagtatatatggactacgtaccggcgtgtacaactgcaattttggtggtctgaggaaattttgaggtggctctgaagggtgcaaattctgcatctggctcaagaaatccgactcgacgttagactgtctctgttgggtggcgtgggttatctgaaatggccgcggctcggaggggcgtatgggaggaatttgagaaggatcagctgtgatatagtgcatgtattgttgcagctcaggaggaacaaccggtgccattcccttccccatgaccagcatctgtgtgcatgacatgattatgatcagaaatcacatgaaataaattgcatcacttgatctctaccacagtttcagatataacttgcataaaaagatcaggtcttggttctaataaacctgatcatatcttatgtttgatgctatttgtacctggagttgtagttggagtgatttcaggtagtcgatcgcttcatccagcatcgaaactttgtcggtctgaagaaacaagaagattagaagttcagaactgaatggctctacaagatcgagatatgtatgaccaaagatgcaccacatattgcataccttggtgcaatttggaagtagctcttgcagcgccttcagcttctcattgatcctatcccttctcctctacaggtatccagatcaaagataagaaacaccaagtgcttataaaccagcaattctgatcgatttgcatgataacaacctaccctttctgaaaaattgtggaactcagcagatctgcttctcctggtaggggtaggccttcttgcttccatcggatcttttcaagaatatattcaccttcctggaaacaagatgtgcaataacagatctaacatttaaagataacatacaaacaagaacaatggtaaaactgtctgaaacgtatgaactactcctaagatcatcagcagagataggatcatgttcttccttgtcatgcatacctgagttttggtgtctgctcttcttcttggctagctgcctccttgccttcacctcctccccttatgaactgatacaggctaccaatggctgctagctggtccagccctaagctggcctagagatggagagttctgagagctttcttggtgacaagatggtctcctcgacccaccaacctttagctccagggatagtagtatttatggcatctgaattctataagcttttgcaccatggcatgcagggtctgcgcactgtagttatccttatctttttcactcaccggccgtggaatttcttgtttggatcgatcgtcagcctctaccatgtatctgagtctctgatgggactttgtttacgatttttggagaggcgcccataaggtcaatcatttcacctaccttgctataggtgatggctctaacttgacttgcaaagaaagagttcgtcaaggtacagtactatgcatagattgtttcttcagagttcagagtagtgagggctttctgcataaagacatatacagtagattagtaaatgttgagagaaatcatgactgatgaatgtgaaactagtatgatgtttgtcctactgtaatctgtaatccttacatgcatatgttgttcagcaatattttttttgaacgacctacaccagacattgcgaagattcattgaataaagtaggaaaaaaaattgcaagactagaaccctgggatgcaatagccaggaaagaatgaagaaataaccacccccacgcgccgacaacaccttcacacaacccaggagaaggctagcactggacagaccgcgctagaccaacaaagaaactacaaccgagatcgcccaaaacccaaacctaacaaccatgaccggacaccactctatccacatctttggattgttcagcaataatttcaattatgattgaggatttgttaatacttgggtattatctgaaaaatttagacatgattcttgagctgctaaccaccaacactgtttgctcataaaaccgctaaactttatttttagataatgatagaagaataaaactagtgacaagaaaattgctagtaataaaaatgatagtctggttctggaaaatttgaagatccaagattaattagcatctgattggctgctcatgtgcatcctttatgaacagatgtgactactgacgatcacaattaaaaagcatcgagtagacatgtgcagtgaggatgctggctgctgctagtagtgctagtacctaacatgatgagcagctagctagcaagcagcccatgcgttatttctgaacacaaaaccctcggaaccagaagaatgcatggtatggtgaagcaaattgaagcagcaaagaaacaaagaacacaatcttctcctcacccctaacccctacacacatacaattctccttaattaattcgatcgacatcgatcttgatgattccctgcaaaaccaagagataactttcatcattacatatatacattcaggtgaagaaattctgacgatgatgtggtgaggtgaggtaattaagggtgagctagcatcgtcagcggaaagggtagagtccaagaatcgcccatgccgctgttgcgagggggggatgaggtggaagacgcaggaagggaacaaaggaggcagtcacctccattattttggttgctttcgtagcccgaatgcagcagctagtagaggccaactcctagccctagccctcctcctactcctctgcaatggtagattgcgccggtgactgcacgcgcgtgcgagcgagcagccgagcatgcgtactgccaggttcaggttcggtgaccacgctgacaacagacagattccggcagccaccgcgcgcacgcgtgacaacgcccgattcgctgcgtgcgcgactcgtcgccatcgccatcgccgccgccgccgccgccgcaggtgggcggtgcccgcggcggcggcgttggttagttggttagggccgaatagatccgcgcgatatgggccgaattcgccgggaaaaattgggcctcctcgaggagactcatgggccacgttagggtggagctgaactgatgggccgaactatgtatggttgggccggggatgggccgacgccgcgcgaatctcgaggaggaaccggatgcctcgttctcccttctccgagacgagatcacgagacagcttggctgctcgactcaacgcagcacacgcaagaggagtcgtgggagtccaggagaggaggcggaggcgcggaggagagaggaggaggaggaggaggtggttggtctccgccatggcgagctcgtcgtccgaccccgacaagctcatgtccaaggccgacaagctgcaagtcccttcatccccccatctctctcgcttttctaactccagatgatccgcgagcgccccatccgatttctgtcccttgtttttttagattacggatttttggcgtattttctgtgaatgaggccccttactcgagcgtattaagctgcgccctcgtcaaattcatcacgtcgtagttggcgaatgttagattttgcgttttggatcaaggactgggaactcgtgtggatctgtacctgatctgtagatgggggcagggctaccgttcctatttccaatttcgtggtaccgatttaggattttctcaggagaggaattgcctgtcagtttagttttagcttagtttgtttggtgcaaatttggtgagattttattcaaggtcatgccatgttttggggggaaaggtcatagaagcgagcgcggacgctttgttttgcggcaattttgtttacatatgtgtgctgtgtgggagttaccagcagactttatctcctactatgtagtattcgattttctgttcaaatatcttcagaatacagaatgcaagtacgatacttgtgctacctgtatcaattcagcagtggatgtgcttgtctgtgtaacttcagaagtggaaaatcagccactcgtcatcatttacagtattgttcagaatggatatatgtggtgcaccattgtttagacatgcaaactagagttcacttccagcactcgcacagaaagattacttctcaatgtgtctgattgggatatcttgtttgctctcgttttcatgccagtgcttttgagttgattttgatttaaatactgtcattgttttcatgtacttcctctgtttcgcgttataagacgttttgggttttaaatagattcgtgtatgatccatgtatgtgcttcatatgtatgtcaaaattcatatgaatgttagtgaatctagacgagtgatggaggacccaaaatgttctaagtactctctgtcttaaattgctcccagttcatccacttcagagttagctatatgctaaatatgaacattccttttgcttcgcagaacaaaattgagcttcacgagatggaatgccgattggaagagtgctacctccttgtatgagcaagctggtccgttactttttttgccatgttctattttctttctgtcaatttgcttccctgtggtgtatatgacagaactttcatatctactttaaagctattgcttataggttcaaaaaggagaatgagaaagcaaaggatgcctttgagaaggcttcaaaaggacaggaaatgatttcttcgtatccttcagaaaaaaaatttatagctgttgtattttcacatgattgaactatcacttaatgcacccttaactagtttaatataccctgggatgctgctaaacacatggaatctgctggtgctttagcgaaagagcttggacgctggaatgaagtttcagatttttatcgcagagcatcagaattctatcgtgaatgtggaagagcacaacctgcctctgatgctcttgcaaagggtgccaggtaattcaaaagaaatctgaaacttacgtgaacattgtgaaggattattgttctaacttgatgatatcagtttcttggaggataacactccagacgaagcaataaaaatgtatgatgaggcctgttcaattctagaagaggatggaaaggaacagatggctttcgatttgtatcgtgctgctgcaagtttatatgtcaagctcgagaagtaaggatattccaacatattccaacctgcttaatatttgtttattatattattcttctttccattttttcttttacggatagtttttaatctttttctttcttgctgggtaagttgtcattgtagaaggaattgtcaagtaaaccaataatatttgatcctttgtggcacttgctttaatatcgattatatgtggactgtctctgttttgatataatcacttcccatctcacacttctcattaattacaggaagttcttttcatagacctactagcatatctgtgccggtccatttttcctgaacagtttaaccttactactgtgacggttcttgatagatttttacattcaccctttgaatgattagagcctatcaaattgtttaattgttgatgatttccattcttactacaacctttcaagcttgaagttatcgggaatcaataaattgtcattactatgcatggttttatttaattctgcaacaatactaggaggtttcgctgtacgtctgtttattataactattgaggtcaaatgtacctggctttgatgtgctgtttaggcgtacccttttgctctttgcttgcacatgttttcacactttcttctatggttttgctctttgtttgcatgcattactgctaatctcatttctttgctcattcgcatttattcctatctttggcg

SEQ ID NO: 9124 - DNA, 1633 bp, Oryza sativa
agcatcttcctcttgtttattggcccgggggaaaaaagggtaaaatgcggctaactctttcgagtttatgctcagttattagcatcaaagatgctcaaagagtaaaaaaaaaaaaaaaaaaacgcagccgtgtaggcgtgtgtagcttcaagcagcaaccttcttgcagtggttctccagccactccatggtgacactcttcggtctttcgagcggcaggccaagagcacggtcccaaatgagctgcgacacagataatgtgaaagaattggttgatagaatgaagaaggatcctctgcattgtagtacaaaatgcagagaagatccaaagaaatgaggtagaaagtggaaagtgagagatacctgagatcctattccaatgctccttgaaactccgaaaagaacagtgtaatacctgcgcagttagagaagttttcttaagtactcgttctaaagttagatttgctactctatcataagttcaagattaaattagacatggcattagattgtttaaccaatacagataaacataccgagcttcagataatccaaagtggttcagtagaactccgctgtgagcatcaacattaggccatgggtttttgacctgaaaatgtgaaggatgttcttatttcttagccaatgagatggaagtaaactgaaggagccgtaattaaaggagcaataattattgatcaatctagtagcattaccttgccaagctcagtgaggataggaggcacaacttcatacaacttggagacctgaaagaggataggtcgatataaatcctattgagacagtgggactgaagagagccatgcagctagaatttagactaaccagttggaaaagtggatcctcaggcaagtacttcaaagcaaactccctctgacatgtataccgtggatcggtcttacgtagaactccatgaccaaagccaggaacaacctacgaatgaatgtgtcatggcatactatctgtgaatttttcagttagagttcaacaaaaagagaatgtttattccagatcattagaaatcatttgtttgtataatataagtagctaaagaaaacagatccaatataacataacaaacttagaaccactgcttagcaatgaactctcagaaagttgagttttcatttcagttaaaacatgatgatatgcacttcctcatcaaatagaaatataacacggagataagctacctttccactttttagtgtcttccacacatactctttgagttgatcagttgtaacgtcactaccagtctcacctattacagatttgatccacaacaacacttcctgcattggatgtgaactatggttagttcacacacacacactaaaatatcaatttaaaaatggaaggaacattatgttccttcttccaaagataatctgcgacatattttgagtatgcaatgcagtgaatccttgtttagcaggatgtggcagagaagatccagtacaacaaactgagcatacctgattagccaggccgtgcaacggtccagctaaaccattcagtgcagctgcaaaagaaagataagggtctgacagagcacttccaacctgtaattgaatatcatgagcacggaatgaagaggtcagtgcccata

SEQ ID NO: 9125 - DNA, 2283 bp, Oryza sativa
ccgaccccaagcgggcggtctgaccggcgcataaggccggtctgaccggcggcacttgcccgatcagaccggccccctggaggccgagatgatgctgctcgggatggccgaaacagagccgacggagccgtagtcggtctgaccgagccgaggccggtctgactgcccactcaactccggtctgaccggccaggccgatggggccctctgacagcacttcaacggctagttttctagccattgcagagtagcacggtctgaccggccacatacctccggtcaaacaggcagagcacaaagttgggggatttcgcccccaacagctagttttggcgggtgggagtataaatactcccccaccagcagcaaggggactctcttggcacccaattcaattgcatacatcccttgcacctctctcacacccacttgagctttgtgttcatccatctagtgtgttaaagggttgattagccaagagtcaagtgcattgcttccatttgtagagctagtgtggcacttgattgatcatctccacgccgggtcattgcttgttactcttggaggttgccgcctcctagacggcttgtggaggagttgtccggtgacctctccgagaaaattgtggaggaggcccggcgccggtttgtgagtggtttggagttcaccaccttcggagtgaagaaagaactaccctagtgatcgaggcttgggtagtcctctccgtgggccggctcccgccttgcccaccccttgatgaagggggcgtgcggtggcttcgtggttgagcggtggagttgggctcgcctcaacgaggagtaggaaaccggcgagtttccgaacctcggtgaaaaatctcttgtctccttgtctcatttgattgtcgcatttacatttgtgcaaatttacttttctagcacctaagtagatatcatatcaccgtaggtttgctagccatcgacataggggtgtgctgtcctttctaagagatatagttgagccacaatcaccataggtgtgcaagacataagtaagttgattagttagagttgaccctcaccaagcctagcaacttaggttagttttgattaggtgtcatttagttttaaatcgcctattcaccccccctctagtcgacatctcgatcctacagggtggccgacgacgacgggtgcgcggagtggccgacgacgtcggttgccagatccccttccctctgccgcggggccgtcgccgtcgagggtcatcgccatcggagtggcggcggggtggccagatccggcatgggctttccggatctagcctcgggcagcaacggcggtggcttgctggcgaggtcagcgcccggtcgccctcctcccgctcccctctctccctccagccgtcgccgtcgccaaccccagactccgccgccccgtgccgcctcacaggtcacctcgccgatgactccgccgccctcggcacccccgcccagcgccgcctcgcgggtcgcctcgccgatgtctggctcgcccttctcctcttcaaggccgccgagctcctcctcgccgtcacgatggcggctggtggagcggatcgacgagcgggcggcgccgtgggagagaggcaagggtaggagggggatttggggggagcggcgaggagacaggagcctgcagtgggtctcctcccagggacgagggttgtgtctctgcgaaaagtggtcgctccttgcaaagacccgcgttcctctgcttggcgccacgttcctagcctgggagacgactcacgctgaaaaggggatgggaggcaaacggccgtttgcgagggcacgggtcgagggtagggatggcaacgggtgcgtacccattgggttcacccaccccatacccacacccattgaaatgaaatacgcccgctccaatacccacacccgctcacgggtgaaaaattcccccatacccacacccgcatgggtgacgggtacccattgggtacccatacccattagagtatcaaattgagcacaccaatgcatccagtcagacagcagggcagcaacatagcagccagagatttttacaaattaggattgaaaagcacataaacaaaccatgcagccacattgcacaatcagcaaatcaagtgataattggaacagtgatataatataacccattaagtttaatagcaagcatgctgtccactccaaaatacatccatccatcgtacaatacataaatcctccagtgatccagtctcaattgagcaacagtccagccaattcaatggcatacaagtaca

SEQ ID NO: 9126 - DNA, 1960 bp, Oryza sativa
ctgtgcacagagcctcttaaagagctccataagatgcttgttcttgaattgcttgtagaaatttgcacccatgtgacgcatgcaccaccgactccgaacatcaggccacttagctggaagtcccttctcatcccaaccgttctgcaagtagtcaatagcccgcaacatacccgcatgacgatcatgtataaggcaaacgttgggcctcatacacaccactgcaatgtgcactctctctaggaaccagtaccagctttcagtgttctcactctctacaaatgcaaaagccataggtagaacctggttgttcccatcacacccaattgctgtcaatatctgacctcggtatttacctgtcataaaagttccatctatgcatagaacaggtcgacaatgcacaaaagcattgatgcaagcacccaatgagaaaaaggctctttgcagcacactctttgttcgatcatcaaccgatgtaaatgtatgtaggtcatagtacgtattattattcctctgggcaatggtggctaacaaacgaggcaaattatcataagaagcttcaaatgtgccatacctcatctcaatgatcttttgtttggctctccaggcctttgcatagcttatggtgtacttgaatttgttctcgatgtgcctaataattgattttggttcaaagccaatgttaccaacaacactgctgtacatctcacttgccacaaaagctgaagtgatgtttcggtgatacttctccaccccttgtaagtagcacttgtgctcggtcacaatgctaactttccaataatcattccatttacccttatatgcatggacacgccacggacaatcttccttcatgcacctcacttcatacacataatttgttgacttgaccaccctaaactctctctgcaaggaaactgcccaatgcttcaccgcctccttcctctcatccttatgagcatatcttgcaccctcaattacctcattctccttatactcccagggtacatgatcaccctctgatataacaagtccagagaagtcctcatttgcccaatcagtggccattacatcaccttcctcatcggatgatgcgtcgtcgtccacttcctcattatccgaatcttccctctccatttcatcaacaattataccgactctctccccctcatccgccatgcccatagcctgctcctcccttggttgattttcctcattttgcatcgatggtccaacaacatcccctgcattgataggaccctctacatcttcggtttgcattgaaacatttatatctttctcttgtaccgacacaaatataacgaggggccatgaccgttcaaaagccatttccacataccgtctccaagcatcagtgctgtccatcggcattagttcccaaaaataaccttctgttgcacgactcactacaactgacactgacattgtgtagacttcttggtctattctaaatcctctcaacaaccaactataaattgactgaaatgttctctccgcaggcctatcgatgcccttagatgtcattacaaaatctgacagatcaacaccatctggaccaaatctaatatttccttcaccgtgaactatctgaaatgtgaccttacttgacattgtgcctgatgaaaacaataactgcgttaacctcgcatttctgtactacgccctaagttacattctctacaatattgttctctaaatttctaaaattacgttacattctccagatcaaactaaactacatcttacaattaacactactgtctatgtctcaattcatactattatattctatgctctggatctacacatatgtgctgtgtgctacagatgtgctaaaatatatggaactaaaactaaaacgcaacatatatactcaaacataacatattagtacaaatgcacaaaagatgtatgggagcatacctgtgatgaattgagcgaa

SEQ ID NO: 9127 - DNA, 32788 bp, Oryza sativa
tgtatttccccttgctcttgttctgggccttgtgcacaacattggcactggactgcccaccatcgccctgagacgcggcgtctttttcccgagctttctcctcaacatcaagagacgctatcaacccctcaacggagtattccggtctcttgtgtttgagtgcagtaccgaaacttctccatgatggaggtagtttcgcaataatgcacccggccacaaatttatcgggtaagacacacttaaggagttcgagttcgttagccatggtttgtatctcatgagcctgttcgactacagaacggttgtcagccatcttgtagtcatgaaactgctccatgatatacagatcattgctagcatcagtagcaccgaatttagtattcagtgcatcccacaactccttagcgtcggtcatatgcatatacacctcgaccagacgatcgccaagaacgctaagaatgcatcccacaaagagagtagtggcttcctcgaattgcttctgctgatcagcagtaagaattccttcaggtttgccattactcacccagaagcatttcatagccgtcagccacagagtgaccctgatctgccatctcttaaagtgcacaccggtgaatttatccaacctcagtgcatcggcaaaaccagccatagtaaaatcacagcgcctataataaggtttttggattgttgaaattataagcacataatgatttaatttattccataaataaatcatgacattgcagatgtaaactagattgaacacatcattagatctacacatataaactaagcagtaaaacatgaacagatcaaatatgcgcaacatgtcgaacacgtaccaaggtggcggaaagaccggttgctcggcaggaactactcgcggttgcgagcgtcgacgaaggcgcgaagcacgcgagcggagaggaaggcgagccgtcgcggacgaacagggagcagtcgcgcaaagcgcttcccaaaaaccttattgccgccttctcccggtgcaggacgtcgaaggcagaggttccggagacttgctctaccgatcgccggtgcacgccggtgagcgggatggagtagtctacgagcgatggcgcagcacagagtaggaggcaaaccctagattgatttcgcgtgtgttgcgtgaaggtggcggctcggtttatatagagatagatcgcctgatcagggcgcccgcgtaaaccgaaccggataagtcgcgcgtaacctatccggactccatgccgttttcacgcaccggattttttggagtgtttccaaaacaaaacaaattcgaatttcccgcagcaaaacaaaactgcaaaaggaggctgcatctgcgtaagggtgaggagccaattttgcggaccattcgacgcgtacgtcgtgcacgcgcgccgcctgccaggccaggcgagcgagctcgcgcgtgtgtttcccctcttctctccaccacacatgcttcaagtggctaggagggcatcctcccttttaaggagatcccctctcctagaataagcaaggtagtactaaaccccatatgcatgccatcccatgaggtgggcttttgtgattttccaaagaattaatcttcgaatgggccttagcccatctattaattccaatatcatgaatttgaaagttttgaggagaaaatactgacgttccctttttttaagtaattccatttttgcgttacaaacggtcaaaacggcattgatgacttcatttacttatcaacaacccatggactcaggatgcaagcgggctgactcatgaactcacttataagtcaaataagtaatcatccatggattttcacgtcaggatctagcttggcacatctattataagtggatcaacctataaacatatttataggttaacttagtaggtaatccgcgagccaaatcacgagttacccgctaaattttgcctataaacgtgtccacgggttggcacaggcacatccctagaatggaccgaacatattcagtgataatcaacagaattcagatctcctttttctatagtgcatgatatccggttgccataacaaatagagcaattctacggtacttgaggaggtaccatgagatatcaaaagtttagtgtaaaatttggtacctcatagtatctaggtaccaagaggtaccaaatttacaatagaaaaaatggtacctcatggtaccttctcaagaaccgtaaaattgctcaacaaatagtacaaattttgtgtatcaattagaatcccaatgaatttgggacgctcctgatctatgcctggatttctggagctatgaagaggcctgaaccttctaaatttggggcatcagctcttgccatcctcaaattcgccaaaccagtgtcttccttgttatcgatgttgaggaactttgagcttggcccatgaagacctggcccaaatacacttatttggcacaaaccttctatatttgggattgcactatataaaaaaaaggtggctagtcatttgtatactttgtgtctccacttctcttcttagattatacaacctcattagactactttgtagccggggttgtataatacattatcaacgcgaagctctactggagatgaaagtagaaaaggataagaaacttgaagatttgttttgcatcttgtagattgaattgcaaaacaaatcccttgtatcttccttgtttcctttttttttttactcccgacgaaaaccaccattgctgacatggagtcgtcggcgctctccaacagcagcgaggcatccttcgtccgggacgtttttgcgagcaaaaaaaaaaaagaaagaaagaaagaaagaaagaaaaactgaaatagatgcatgttgcggcccgttaggtagaaggccgggtcacgagcagcagcgcggcctagtagctgccgccaagcctctcggtgagaatccatgggccgcttcggggtggttgtggtagtaagttcacttttggtccctcatcttgagggcgggtttgaaaaccttccttgaacgataatactccctccattccataatataaaacacaacctttttctagatgttccataatataaagcatggatgtatgtaggcaattaactatgacctcttctccattaaattattacttttttaaattctccactctcatattctctaattctattggatgcatgcattatatttattagcatgatccaaactataagatgataataattattttcttggtctttaggttaggggtgattaaaccttatattttggaatgtagggagtagcagataaaatgtgtctctaatattgcaagatcaggttaaacagggtatcaagacagtatagctccttgtttcgtctgacgtgacgctttgaccgtggtctgctttgctgagtcaacgtagcttactgtggggctgtgtttgaaatcatcttctccccccccccccctcttcctgtttctctatcttcccccacaatggagcgatggtggcgcccggagcagtgcatcagcgaggagagcggcgtcgtgttgggtttagtcccacatcgataattgatgatgggggagcatgacttaaaaggtgaggacagtccttatctctcatactagtcttttgggttatgtaggcccaggacctaaagttgtgactccggttgggcttgtggtggagcaggcccaatgtgacctaggtggcccatggttggtgggccaggctgcacactctaacaaagtggtatcagagcctaggtttggaagccggaacaattaccttgggtcacatggtagggaggccaggtaacaagttttcacggtcatatgggttgaggtgacgggggagattgttggggccaggtaacaagttttcacagtcatatgggttgaggtgacgggtgagattgttgggcccgatgtgtgcaaggaaggcgcaaaaggccttgtcggaggcaacaacgaagtcgtgtgatcaagttcgatggtggacgtggaggccacgcggagcggagtcgcaaaggtggcacggctcactaggtcatgcaaatgtggcgtcgagccaggttcgatggtggacgtgaaggccacgcggagcggagtcgcaagggtggcacggctcgcgccaggtcatgcaaaggtggcgacggttcgatggtcgacatggaggctacgcggagcggagtcgaagggtggcacggctcgccaggtcatgcaaaggtggtgacacctcgacgaaggagccacgacctgggcttggagaaatgattgaatgatttgaattgaaatattatgaaaatgatttgagaatgataatttagtgctagatgtttgttgcggcatatatgttagatattggagaaatgatgaaatgatttgaatagaaagttttagaatgtaataaattgtaatataattaaaatatgcttgtatattaagctttgtatgcttaatgggttaacgtcgcatgcttgcatgtaggttttgaaagtgctactaaatattatgtttgtatgtttagctttagatgtttagtgagtattagctttatctttataataagaaaggattacaagttaaaaggacatgtcgttatatatagcattacgtttcaaagatacgattcaaaactcgatgtcaagatgagctagggagaccggagacgggcggtatggaagcaggtccacgatcgagatgcccgcacgggagggagggagccggtgccggccaaggaaaccgattgggaagcagccgagaggagagcgagtctcagtcgtcaacccctggtcggctgattcgcttcactcgcatagcatatgatacgcatacgtacgtacgcacgcctgcattcatcatcgatcgagccgaaagtatatgtgtattattactttgttggtccttgtttaattacttaggtcagcctgctggtctcgcgacgactctcgtctatccgaagaacacggtttaattttagagtattgtgcattttaggagaatggtaaatagtaaattcttccgcgtccgtgtctggattttactttacttaggatgcttatacattagttgccccatcgtttagttttcgactcattagttataagcataaatgaaaatttgaaatttaaacttaattttagatttgattttatggctttttttcaccgtagtatattttcagtatttgtttttaaatcgttaaaaacatgtatataaaaaaagtttacctacatataaactattttgtagtcgctagtaagccattttgctagggacgtaagtgggcgatctcacaacccgtacaaaaatatatttgctaatttatttcttatataatagtacatattttttttaaaaaaatacactaaaagtaggataagctggtaaaagaatcttgctttgcatccctacatttctataagcgaaatgatgtggttgtagagttgatttttagactgttttttcctttttcgacagtatatagtttttactttggtgaaaattaaatctttctccctcctgtttaaattgatagatattcgtgatttaattatccatgcctatatatatgtgtgtgtgtgcaaaaaaaaaatattaacgtatgcttctttacacaagtacttcctccattttaaaatatataagatgtatattttattttgttatgacagagcttttaccaacaagtactatgtaagaatatactaatattttgacacaattttttataaaattagagcaattgttgattaaaatcttgtccaatgaaacaatatatgccaaacaggagtatttcagtatcttttcttacctttttccaattgaaatgacctgtttgctgccggcatgcaagcaaaactattcttatatatcttcgcacgtacgaggatattgataccatacatgcaattgtttcttcttcttcatcctagataagatcaactacttattcaacctcatcaagttaattcgttttgtgtcaatttcatcggataaaaccgatcgaggtgactacgctttcttggacaggataacaaatttcttgtacacaggagaataattgatcaacctagtgtcgtctcatgtgtccattctacaatacagtcatacagataagatgaaatccctatatatccttgtgtgtgtgttttttctctgaaagacaacacttgagacctatacatctttctagccttatccatgcatatgtaccaactcgtacgaatatgctaccatgtcagcgtatttggacgttctgatcaatctgctcatccagcaacaagagctagaagaagcagggaaagttcagataaaaggcctagctaccacatgaaagatcagataaagttcagacagtgagacagtgagacagagttagcagtttgcaagggcatcgatgctgatgctcactgaattttcccagctcgtgaggccgtctgcatttgaaattgcattgcattgcatgcctgaattgacttcaaaactaagaacatgttctgttctgcaatctgtactactgtccatgcatggcgacgccatgctctgaatttttcagtacaggatcagacgatcagttgcgctcgcttggtctgtccatcgactggtctagttggtcacacacctttctgccaagcttcttgattctgtggataacagcttgagatcactgcaggtctaggttgctgcctactacactgaagcttcctgtcaagcaatccattcgttggtagtattggacatcttccttctcaagattgtcccaaattgacctcaaggctgaattgttgtgttccaaaaggcagtcttccactatttgcttcaaatcccaagagtagtcaatttcttgtactctgtgattaatttcaaaattttaattactagtaaatatgttatggaatttggttagctccgtaattcgggcgggaaccgtggtaaatataaaaccaagattagtactgtgagacagaatttctactcttctaggctgtcactgagacaggttgtactactgatcacaagaatgttgtccatggtgagcttttgcatgggcaaaagaaaaggagcccaacttgtagtcttgtactttccaggtacagaaaagagcacaacttgtgtccattgatttcaaaaattcaatgaactgagcaatacgattctggaattcagttcggcctgtaattctaaatatgaaatcaagactagtacttacaattacagtcagacagaattttctactctcttcttattctaggctgtcactgaaacaggttgtacatactactaatactactgatcacaagaatgttttgtccatggtgagctttttcatgagcaaaaggaagagagcacaacctgtactttccaggtacagaaaaagttcagtcctatatactcctgcttggatggatggatgagtgagctgtgatcattcagttcagagatcttcaatccttcacacttctgcaacagttttcagacggctctcctccgtccaaatggtccaaattgttgtcaaaagcatcaacacaattccatcctctcctcgctcgatccagctccactcccggaaagaacgacgtcgcagcgtctcttggaaaatgtgtcgcgcgatccgggccccagctgcaagcagcaacgctgcaaatgctaattaacctcgtgagattcttgagctactggggaacgacgacgagcatctgatcagtggtgatgagtaatctaattaattagctcgacaaattccttaagcaaagtctctgattagtcgaagttactaggaaatcaagctcttggagaaaatggcaaagatgcaagtgcgtgtgaactcgtgagctttcttgcatttggaggattttttttttgtgcattccacatgcaggagaaggagatgatgccgttgcaatttgcaaataggaataggagagataggatggaattatttttttggttaagtttcatcaagagagtatcttgtgcaggaggacattgttttcgatggattagtggtaaggttgacggaatcggtacacatgatctgcaaaatctctgacataattccatctctgtaggtgttactgtgttcttcagacatttttcagaggcttgagattgcaactttcatacaaaatatctatgttgcttgcttgctggattgcagaattccattatcgaaaaaaaaatctgcggtttcttgcatgtagcacagcacaagggacgatgaaagtgacaagcatatgccaggggaacattttgcttttcttccatggatggcatttcggccatttttcagggaacattcagagattcaccggcattctcactactttggtaaaatctgtggattggacagtcaaaaaaaaaccatgaacagtgatcaactaagaacatcagatacatagatgctgccactactgagtgctgtactgctgtgagctagctgaagctatggcattttgcagatcaagaatctgagcagtgaaaagcaactgatgattccgagcaattggcggcaaagcgacgatcgatctttcgaaagatcgatcgaaagccaccaggtccaatggattgtcaggcatcattatattggcttgttcttatctatcaaaagtgacaattgccatgaaggaaaaaagagatgagagggaaggctcatttgccgggaggaaggatttgatgcccctacctctaagggaattcctttttctttgggagctcaaggagaaagagaggatgagagttcagagacaagtagttcatgcgatccctgtagtttgccgggaaaatgtgaatcctatgattctagggaggataggtttcaaatgatcttgcttgaacatgtttcttaccatgaaaacgacatggcaagaatttaacatcaactctttatttcaaaactaaaatcatacttgtgttcttgacaccgagtaatattgtcgaaaacaaaaaccaaaggtagtatttttgaaattcagtagcttcaattcgatagttcgattcactggaattcagtagattaattgtgactaaacttcagtaaattcagtagctttgattaattcaacataattgtagtaacaaatggtaaaaatactttccacagatcaaattcaagtaccaggagacatacatatgcctctagcgtcgtctagggtgcttatcatcagacatgagtaacggaatcatgatgttccactagtgaaacttcagtggcatggcataagcataattaaactggcttgagaacagcaaaagatcggccagaaaaacaagaaatgacactttggcttttgcacgtatttacgtacgtacgcacaagattggaccttggaattggccctgattgatggataaggtaagaacagactgcatgtgtccctttttctcaaaaagaaaaaaaaatggtcgataaaaattctgtcttttttaacaaattgtagagtactacttttaaaagagaccactataaaagttgttatgaactaaggcctgtttgtttcaacttaagattattgagccagattattataagctggattataataagtcggcatagaataaattgttagctgtttgtttctctagattattagatgcttgttagctgttagcaacccaataatctaaaaaagcacctttagagtggattactatattatagtaatctggcttacagattataataatctatcacaataagctatctgtttgtttcagcttactcctaataatccagattataataatcctaagctgaaacaaacagggcctaaggtattctttagaatagaggaattttgtgagaatttcccagggaactagagtgattcatgtgaaatttaagtagaattcctgcgttactaaggcatggtttagttcccaaatttttttcccaaaaacatcacatcgaatctttggacacatgtatggagcattaattatagataaaaacaaaaactaattgcacagtttgcatggaaatcgcgagacgaatcttttgagcctaagagcaagtttaatagtatagccaactactcgctccaaatcacctatagtcaacttaatagccaattcatacaatagttacatactacactattaatatctggtcccacctgtcatacacatattgtgtcttggagtccgtgctacagctggctacaaatctgtagcccgctgctcctctctctcctctattatctccttaaaatatgtttatagctagcttatagcctgctattgtacctgctctaattagtccatgaatagccataagtgctacagtagcccacatgtactaatgacggcttaattaggctcaaaatattcgtctagcggtttccaagcaagttatgaaattagttttttttcattcatgtccgaaaaccccttccaacatccggtcaaacatctgatatgatacccaaaacttttcttttcacgaactaagcaagccctaagaggctaagagacctaacaggaagaggtgatggaaccgagctggctgctgacgcctgtgagcaaaatataaattattaattcctccggtcaaaaatatttgttgtttaggacaaatttgattaaagaaattccagcaactaagtttgtgtccgaataaatttacaaaatatgataagtttgtgatattataatggtacacttttcagtgaaatttatgtatatagtttgttttggttttaaacaaagcatttgaaaattattaatggctgaaattttaaaggtttgaccaaatattttcctaaacggtaaacatattttcatcaaatggagtataacagagagatcagcaaaaagaaaaacttatcaggccagaaaaacttgataacaaaagctctcgagttcactaaagaagaaagtggggaattatgacaatcttacaaattactaccattgatatgctccccgagaaccaaaacagcaatgagtaaaaataaatcataaattaattaatcaccggaatttgtagaaagtttttttatttccgaaagcacctgcgctcctgcatttatgtagtggaacagaattggtcggcattctctaaattcgttctgattgatttcttctcctttttgttttcctttttgtgtaaactctgcacaatttgcactttatttatttgggtggaataaattccgaaaactaattttatgttagaaataaatttaccaaatctaataaatttatgatactagccaaatgtttgtgcttttgctatagataaaacaatatattataatacctaaaataaattttaaaataattcctcataaaatatgttatatatcattttggcataggaaatattcacttaatttgattttatatatgtggctatccatctagatttgattgatttttaatactaaaaagctttttaaggtgtaatgtatagaactacaacattcatcgctgttcttctacagcagtatagattataataatacttttggaggcaaatctatgtctatcatttgttttggtttaaattaagcattaaagaaattgttgatggttggaattttaaaaacttgaccttattttatcctaaatggcagatatttttaaatgacgaaggttgtataacagagagattagtgaaaagaaaaacttatcggaccagaaaaaacttgacaaaagctctcaaggtcactaaagaagaaagtgagtaaggatcccatcggatgccctaatcagtcaaagataaagcgaaaattagaacttttaaacttaattttgagactaattttaacatattctcaatgtagtttatttttcaacattaactttcaagtcaccaagaagctatatataaaactttcacctataaatttatttttattttctaataagtcgctttggcttatcagggaatatgagcaaacaatgggacagtaaatatgccaatattcttacatttgttatgctcccccagaaccaaaccagctatgagtaaaagtaaattataaattaattaatcaccggaatttccagggaagatatttttttatttcccaaaacacctgggctcctggatttatatcgtggaacaccttcggtgccctcttttgttttcctttatctgtaaattcctcacaatttgcactttatttactcaggtggaataagccgtgcttctcgtggaaattaatcgcgatcgggttggcatgtataaactgaattttactgagttagacctaacgaagtaaatcactggtatttctaccataagctacatagttaaaaataataataataagctacatgagaatgccagcgcgcgatcgatcaaatctcagaagtaaaataccgccagaagatgcacgaagaaaataaaatttggatcaaattagtaaatacaatgcacgcacctgatccaaaacgcatcttgaacaaaacactaattctaagttcaaacatgacttttactctttttttctacaaacacggtacaagcacaagcatccacgcatatatgcgtgcacactcaccgctatcaatacgcatacgcacactgaacctaataattaactgtaaacataggctgttaaatctagaatttgaacctaatcaataaattcaaccataaaaacctaacaagttaaatatatgctcgttctctaatcataatttctccggagcagggcaaatacaaatataaacatgcacgatcgtatatttatatatcaatactattaccggccaatctggttaactagatgaatactccatcacattgctgcggaaaattaagttgcataatatgtacaaataagatgtaatttgattatcaaaactaaaacaatttgatacaattttgagcctaaaaataattgagattgcatgtttttaagagagaagaaagaagagacaatttgaaccatagatctatcatccaaaggttagaaataattggagtgatgtggcttaataagagaagagagaaataacattaactacacttagtggtgatgaactatataagtatgtatataggataccggttacgtccggtcgatttaaacttctactccctccatcattttaatgtgtgattttgttagttttatatgtaatgttttgttacctgtgttattaaaagtttagtgtaaatataaaaagaatacaagcctaatatttaattaaattgaatggttaaatcaaatgtcatattaaaataaacagcatcctacatttaaaaacaaaggtagtatatatctagccatagtttcaatattccgtcacgtactcgcatgaacctcctcctcttcttcttttctaaagaagacaataagctctagcgttcactgaggaaggatatactcatatacatgtgcataatcgcattctaagaaaaatttatgattttttactgatctcataaccaaataactagcactggtagcacacttagtgtgctataattcacccgggttcaaattctccattctaaattaatattagaacttcattcttaagattttaacccgagtataagtggagggttcactacccctatctatatattggcttgtttgtagtgagagagaactattaggcaggtcagacagtcgcctggactttgcagctaccatcttcactattgacaaatgtcgttacctgtaaaaatcagttgatcaccaaaaaaaaaaaacgctattagtcatatggactcgacggtaatgctagctctgccactgcttgttcccgtcatgcatgctgatataattcaaatcacagttatatatatgatttatttatttatttatatttattttttgcgaacacgctgtttgtttctcctcaaccatacacatgtatttgtgcgaagtgttcacttgttatgacctaagagattaattaaaactgattgtatacatttgtagcactgtcacaacatcaaccagagagtgataattatttcatattttcattcccatccaaaaccacttatattcttcaataaatttacataattaattaagctgcatgcatacactagtattattggctagctagtactaacaattataccagtataattaattaacacacacacctcttaaattaattattcattagtagcttcatccttaagacttagccgaagaacaacaacccaatctctgcatcgatctctctctcgcatcgcatggcggcggcggccggagctcaggccggaggcgggtgcgccgccgccggaggaggagcccgcggcgtgggcggcgccatggcggcgtgctcggcgcagcagttggactggtactggtggaacttggcgatgtagacggccgcctcgaggtccaccgtccgccgcccggcgagcggccactcgccgtcctcgtcgctcggccgcacccgccgctgctgcggcctgtacccgccgccgccgtccagctcggtcgacgacgacctcgacgagcagcaccctcccatttgcaagcagtttatagctactcgatcgagctagctagctagctatagcagtggttggttgggcttagttaatttgcttagctttcgccatgggaggtggtgaatttataggcgccgcgctgatcgaggtgtggaggtgggaagagaggatggtggagaagaagcgcacgcggaatacgcgcgaacgggggggattattcccgcgcaagttgcagctgcgcgcgttagctgctattgcgcggtttcgacggtggggatttgatcacacgtttctcgaccccttcacccttgagattggtgatctgcaggaggttccatgagctaactagctggctacactctccgtcttaaaaaaaataaaaaagtaaatctgaacacgtacttatctaagttcatttagcattttttttttggacggagagagtagttgattactgatcgatctagcataagatcgatgtacatcagcagtttcgatggtgggaattgactgtacgtttctcaatccctttgatagaggatcgatgagctatctagatacgctctctaaaaagaataaactttaacaacaaatgtgaatacgtacttatttaaatttattatcagtttaatttggaacggagtgatgagtagctgattatatactgatcgatagatgtacatgaccacacacaagttgctgcaactttgcagccgttctttatcttgatggacctggatctgcaagagcctgcattattgccatgaaatattgctatagttcacaaggagtatatatgtatgacgtatagattaaatatggatcaatcatcaatggattcttggtctgtaggacctgacaaatgatttggtgattgagcatttggacttgatggattacactataccaccttcatgaaaatgtcagttttggatattttcgactccaacattaaattcaatcatattgaaaatagaaaaaaaaagattggatcactactatgaaattttccccgtgctctctcctccctacccccaagaaaaactccatgggcattccatgaaaggagacaaatgtggagaacgccaggtgaggtccacattgtctgttactagaaacaatttaagtggaccgtctatctaaataggaccatttccataattcactgtgtttaaaatatattatcaaagacagtggagtaagttgtcggggctcttaaggaggtcacttaaaaatagctacatgtattaataattctcacaggcggctatgttaagtggccgcctatgtacacgattgtttgtacagccttttgcttagaaatgaccacaaggcacatctatgaaaatacttttagcctgtctagaaaaatgttcatcttaatagtggatgcatggaggttgtatgtatcgatatatcttgtttttatcgggtttgtaaaatatattataatagaaattaaatgttaaagttgtatcttggagaccatgtcgatatctaaatcaaacgattctcatgggcattggcaaaatagccaacttgatgtaatcgtatgagattaataaaagcttcctttataaaaaaaatggcaaaataccagaaggaggtttattttgtaaagaaaaggataattcctagtaccttccaaagtactgaggtaccataagattaaaattatgctgcttgacagtcgatatattcttaatagccgtaaaatcactcaattagacgctaggacaaaataggccctaataaaaatcattaagctaatataccaaatgtaactacggcggtagacgaagattgcctaccgtacgtagagaataagaaggcacctgtcttgggataaattccaaccgttggattggactgcgaaaagaatggcctagatcttctgctacagtgattatggcctactagtacggaatactgtggctacagactacagttaaatgcatttctttttttaaaaaaatcagcaaacaacatgatgacaaactaactattccctatagaacaaaaaggtgcattctggatagcatttttaggagtcaaattcaggtgagcttctgaattctgttcaaatgaaatttttctgaagttacagtcacagaagaaatttctgaaatgcattgttgcagttacttgtcatcggatcttcaaagtttgcatgctccagtatgatttggaattttggattagtataaatatggtgtttatatttagcgtttcatatagcaagcgttaccaataaaaactgcttccaacttctgattcaaatgtgatttttgttggggagatcagtgaatggtaagttctctctttcgctaatcaagaagagaagttcctgatggaagtcctagaaagcaaattatctggcatgcatgctactactagttaggcataattttacctctaatcaacctcagccaccctctttctttgaccggacaattaggtgtagtaggtactcttttgatcttgggttgcaagaaaaattaatcattttcttagtactagtaatgtgcagctgaatgtgatgctctcacagtacattgtaaaaatcacaactgtcaaaaggatcattcagacttctggaattgttctctgaaaaatctagctgtgcagcaatgctttcctctctgatgctcacagtagattgtaaaattagaattgccaaaaaaaatcaaaataaaaaataactattgccaaaaggacaagttgttctctgaacaaatctagctgtgcagcaatgcaaggatgcattcttccctgatgctgaaagtacactgtacaattacagtttccaaaaaaagtcaaaataaaaaattgccaaaaggatcattcagacttcaggagttgttctctgaacaatctagctgtgcagcaattcactcctctcggattagaaatgacatgaatatttaactgctaatcataggagcaatatcccagttgagcttccacaatccacagcatgcagtgactctttgcatcatccattagggcactgattaaagtaaattcagataagggaagcgagaacaaactgtttagataaggcagtttatgacgataagccagcatcttagggtcactaacatgtttagtcatttcagggccattttaataaccagacatggccaagatttggcctacctctttaccttcagtactaacaagtcagggaccaatacctcctgtttaggagaacaagaggaacaaatcttgattagcatgcaattccgtgatcttacatcctaatcaaaactctaaaaaaaacacttaaaaagaagcattcacattaccccaaattcagtaccatgttcggtgcctaacaagtagacaggcaaaaagttttagagcaaattattcctgctccctttagctatataccgcgtataattctctatactaatctgtaattcagtatagtatagattataccagtttactactgatcagtgatcactgagaaagaccagtcaaaaagggaattctgccatgtaaatgattctaaccacccaaagaagatatcatacagcatattgcagtagaagctttgctgcatacagctccagtcttgcagtctcccaagtaccttctacagataaatttttgcctagttgtatcagaagacaagctgcaaactgcaagatctctttgcttttaggcctttggttcattatttaatttagtcctcgccgtacatgtaatgcgttcttgctgtaatcgcaatgttgggatgatcatgcataacaaattttaggcagaatcctaatgatgagaagaggtccggagttgttaggcgagagctacaaatttagatgtaaagatattagatatgttcatgtcataatctctgttagattaattaatttggattctcaatgcaataatgcagaaccatctccatctgtatgtctttgtgtccagatggcattggaagccgcagctagagatgaatcttggcataggagagtgagttcatggcttccaaagaaagatagcaaccaaagagaacaaagaggggattaatttaagatatttctcacctttaaaactgagaattgttttcatatgacaaagtgtttaccccttttgatcaaactagcaataatttatcgcctcctttccttttgtacgtgccgaacaaatgaagaacaatagaatcttacaaatggtggttactacttacaaaacctagaaagtataaagcaagcatcatcactagagtaacatggagagtatgaaatatctcacttagtttatgaggttccgatatgcaattctgagaagaaaaaaaacaaccggtaagaggttagggtggtttttttattaaaagaactaaagcaatgacctgttttgataaagaaaatattaaccaactgccgaatttagtatattctgatttttttttattaattatgcaacattgcactgttgcccaaacaatattgctacaagagttatttgacaaaattattaacagtgcatctattatgtttctaaatggcagctatattttctagacagacataatagatgttgactggcatcatcgcaaaagcaatataacgagattacaaagaaatcaattttcaaatagatacatcatcaagtggtttaatggatcacctttcctaaagctatcgcgctatcaaacgaactatacgagcgatttgacacaagttgaataaattgcacagtaacattataccttatcaaccattgtctgttgcaagaagattttgcctttatgaatattatgaataaagcacttccagagtccagagaagagagttaggcagtgataccctttttttttatcagccaattaaattcagagtttcacttgtacagtcctaactgccctgtaaaaagcttcttttcttttcattgttatcccctcctgatcatgattcctgataatactgagtttaaacttgaggcagtataggccctatcatattcccctgtgtgtagagttagaacaaatttcagtcttttctcctctgctttttctataaagtgtgtatgaatttattctgctcaagttcagcaagaagcttatatgagccatagatatactagtgccggcaccaagaactctagctggaattttgacttgtcctggcaaaattttctgtgcatccatggccattgaattgcgcggttcgcgagacgtttcaatcgaattttcttcagaattttccactggtgcactgaggtaaaagaaaaaaaaaagaagctggattcatagtgcattatattgcagcagatagggattcatgtgtgctgttcaatctgtcattctgctgtaactagtgaaacgggtggctgttacttgcgttcgcgttgtgccctctgccactgaaattgttccaggtaggtaccttttgctagctgctgttcctctagcttatcgctgattagcgaggtagatgcatggaacatcatcaaggaataaactgttttttgtctttacaatgcaaccaatctagtgctgattgtttttcaataaattggatcattatgtcaaaaaaatgttagcattgcttcaaaactatgtgattgtccatctgaaaacatatttgaaaaccagagcacaacaggaggctgcaactccagtacaaaatttccaaacttttcagcttctaacatatgccattgaggctgtcattgggaatgtcggatgtatgcatcctgggcatgcgcatttacaggataaacagaacgaatgcatgcatgataaacattgagaatctccagcacgggcatattattaacctcccagaactagcagtgtatatctcatatcatacatgcagcatttgagtttgaactaacaaacaatcgactaactttgacaaatcaaataagaatcaacagttacagctcttgtcagaattcatgcttccatgggttgcctaacctggaggcttgaaggtataaaaaaaggcagttaaaacaccgacgacaagtttacactttacagaagcattcccatcttgcagagcattacttctccagactatattcaggaatcacctcatatcagttaaacgacaagatttggtagctgtggaaaggaaactgaactctggtgtacaaagcagcgcattgtctcttttgccaataacaatccatcagtagacaacttttgccgatttatttacgtccatgaggtgcttggtaagcactgccaggattagttgctgcttgcccagctccatactgcggaggctgtgcacctgacccatagggtgacaccccttgcgctggggcaaatggaaatgatgcttgcgctaatccatatgaggatggtagctgtgcgtgtccatatgaaggttgctcctgtgcatgtgcatatgatggtaaagcctgggcagagccaaagttacgtgctgttgttgcactgtaggatgttgattgaacaggaggtccagatgcatgtgactgtggcacttgtgcagatccataagcggatgcagcttgtccccaagcatatgaaggtggtgttgcctgatttgatccatagtaatcagcactactcccatgagcagctgcagctgttgcctgtcctccaagtgcaggtgctttagaaggatcatatccagcacctttcaaagaattgtagcctgcggcaccccttgatgcatcatgtcctccagcttttgaagaactgaagctagcaatacgagaagcgtcatacatattgcctcttgatggatcaaatccagtccgaggagctgtgccagctgggtttccgcttaaagagtctcccagtccagcaggtggtgtccttccctgcaataacatttgaaataccatcgttactaatacataaagattgctccagcaccagttagaaaagcagaagacaaaatatgaaattgtcattgctacaaggaaaaaggtatcgtaattactttatgatcaagggtgcaccgcaagaaaagcatccattaacttcaggacagaaaagaaacgcacaaaggaatcaatgaacaaaagtaaaaaagctagttagtcctgctttcatttacggtattctgtactttcgatgagattgcattggaagcccatgagagcttaggatttgatccaaatccttgattcaatcgtatctttgttatgaactcattctacagtaggtgtaatgatctttgaataaactggtacaatgtattttgtataactcagtgccataacttgaagtcttaaaatttaaaaccaagcaaaagcgcaaaactagctaatggcaaggggtatcccgattgtgcaaataaatcaatttaattacacaagtatagaataagaatttaatatttgggactgaaaataagatggcaattgtataaataaacaaaacaatatccgcaaaagttagcaaaataataattaaaaacttaaaccagtgacattggaactaacagaggccaaatcctcgtgctcttgctatttactggtttattgacctgtgctactgtgcataacttaattcaaggtatatgcataaacatcatagtagaagtgctttcatgatagagactagcccatgaaggtataacaacaaaaaggctcaacttccatgacagataaattctgaaggctatggagaagtgaggtttgcctagtggagttgcaacgacaatgaaatgatatacatagtcatccagatgaaacatgcttcacaaaataataagttccaccgtatgctggttatctatttaggagttataaagatgctcacctgcgcagctccataaccgctatcataagcaatttgtccaacaggaagactaggcgcgccatcatccttttgagcagtattagtattgtatagcatacctacacatagaaaatgtctcatggtgtggtttctatatatgctacccaaaaattgtggtaaaaaaaatggaacaacagataaacggcatgcctcctctgtcaatattagccgtgttcatcagctcagcacgaagcttgtctagctcagcgaccatggtgtcataattcctcttcatcacctgcagcgactcggagtgatccatcctgagtttcctttcgtactcatacgtagccctgagatttcgaccggtgcgcacgcagaaatcgatgtcagtcataaatcaagtaaattcataactaaaaggcacaaacgcggagcatttcatatcgcgcggcacctgaggtgctgatactcctgcctagcggcgtcgcgctcggccacgagcgcggggagctgctgcgcctcgccgaggttcctctgcaggtccttgctcagcttctgcgtgtcggcggccagctgctgcctcgcgacgacgaggccctgcgcctcggcgtgcgcctgctgcagctcggccttgacggggtcgcgggccttgaggtcggcctccatcttggcgaccttgtcgaggatccccctcgcctcctgctcctcggccgccatcgccgcctgcccctgcgcctgcagcctctgcgcctcctgctgcgccgcggcgagctccttccgcagcgagtcgtggctcatcgccagccggtcgttctccaccgccagcttctgcagctccccccgctgcgccatcagcttctgctccaggatctccggcggcggcgccgccgccgccagcatgtcgtacgggaacggccccggcatccccggtgcccccccgtacgggtcccggtgcatcatcttgtgcgccccccggtggtggtaaggcggcggcgccctccccttgctccccatggtgggaaggagagggagggggagatgcgggaggagaggtcgttacctctcgcggtggccggcggcggcggcggcggcggaggaggcggcgggtctagggttggtcgtcgtcgccggcgtggggggaggaggaagacggcttcggatttctcactgaaattttcgtgctatttcagcccacgagcccaggaatggggcgagaaggaccggattgtaaaattccggcccacctgaggaggacaggattgtaatttctgtatttgtgcagggacctattagtattttccctatatttttttttctcctcccccttccttcccttaccctagccggcggcggcggctgcacgagcacgagcacaatccccgcgagctccaaaccctagcctagccgcacgcgcgcgcgcccgccgcgcgccacggtggccggcggcgctccgtccgccggtgctcgcgggctgggaggtgaggccgtgatttggggggtgttcctggcggcggcggcggcggcggcgtgggtggtgagggagcggaggcgcgactactgcatccccgactccggcaactgcagctgtggaagcttcaccgtggccggtaaaaattccgtgcgttcatatgtaaataaatataatggaatatcgaaaatatttgtggaaataattggggggcttcatttcgtgcgttcgtatgtaataaatataatggcttatcgaaagaatttgtggaaatagttggggggtttctttgcttttgatgaatgtttagacattgagctgttcgtgggtagaatttgtggattttgtgagggtttcccgtgatctttctgtcctgggggatggagaggagacgggattagggttggatcactgacgttttgggcgtaggtttgggatctgatgagtaatcatcatctcaccacggtggcgaaaagtgtgtccagaaactaatggatggtcatttctccagtttcaagttttccactttatgtgatatagatagaaccctcagttccatattcttcaatttaagcactgggaccttttgttttgagttatataactaaattaaactgttgggaggataaggggtaagaagaatattttctctaccaataataagctgttgtaagcaatgcagagaaaagtaagggagtgatgggcagattagagtttctgccaaagtccttcaagtcttatctaattgaaattaggtccaaaagttttgaaacctatatgtatggaggggatatgtaatagtaatatggaaattagggtatcctgtgcgttcccagcattccagtaccaaaagtacacttacataaatagtaaattgttgcacgcaaaattaatcatctgactgaacagagagtaatatatattttatggttatctacgattggctgtctaaaactcatttgcctgagtagttaagtggtagcttctttaaaaggattaggataccaggaaactcggtaaaaaaaatgttctgttattattttctgtctgtatctctgttaatatagtggtatagattatagtagtattattctagtgagactagataattcatgtgctggatgctgtttttatgtcctgccccatttgtttaaggatggcctgctgcttgtgtctctcaaaactctttaagtttttcactcggcaatatggtagcctgataatatcttgaacttgatgcactgcctttaactggtaaacaagtatcggctgcacaataagtactttcccatgtagattaacttgctgagcatacatccttaattctgcaaatcattaacactttcattgaacctcttcttaggaaagtgtaagtcatggggagcaaacagatagtagctgttcttcaagtaggtggagaattcaaaactgatgatgatggacagatgtcctattctggtggagaggcgcacgcgatgcatgtgaaaagtgattggacttttaaaacattcaaacatgagatatcttcaacgctcaataacctcaaacttgactcctatgtgttcaagtacttccttccgaggaataacaagactttgatttcaatttccaatgacaaagacctaaaacgcatggttgaattccatgcagagtcagagacaacatatatttatgtcatgaagaaggctgacaacaggtacccttctgactggcataaacatcttcataagtggatatccaaaaatgacatgagacatttttttcagggtaaaaacatctgccgtggtgcctgctgcttctgcagatcatgctgtagcagcaactactccagatggatctaagaggcaaaagatttgtgcaagttgggagaatgcgattactggagctggtcaagtgtttgaaggtccaaaggaattccgtgatgcactacacaagtatgccattgcacataggttccattacagatttgtcaagaatgactcttctcgtgtcactgtggaatgtaccgctgaaggatgtccatggcgtatacatgcatccaagtctcctgcaaagaaggatttcatgattaagaaagtttttggaagtcatacatgtgaatcagagtcagtcaaaagtcatcgtctagcgtctcaaaagtgggtggccagtgttattaaggaaaaattgcgtgatagtccaaactataggccaagagatattgctaatgatcttcagcgggaatatgggctaagcctgaattactcccaagcttggcgaggcaaatcaatagcccagaaagaactatacagttcacatgaagaggcatgcaaccagcttccttggttttgccaaaggattgtcgagacaaaccctggaagtgcggcaacagtagaggccttggaagattcaaaattccgcttctttgttgcatttcatgcctccattcaaggttttgtgcatggctgcagacctctcctctttcttgatgtgatatctgtgaaaccgaacaagcattggaagctgttggctgctacctcagttgatggtgaaggcgatatgttcccagttgcactctctgtagtggacgacgagagtcaagaaaattggcattggtttcttgaacagctaaaagcttcattgcctgtgtctggagaactaacattcatatcaaatggcaaatgtggtctgttggatgaggtctctcttatatttccagatagctatcatggctaccatgtcaactattttattgaagaatttaaggcacaattggatgacagttggagtgaagaactaaaagatacaatggttgagcatgttaagaaagccatgtattcatgcaaagttgatgaattcaaccagtgtattgaactcatcaaagttgaatctgataagcttgctgaatggcttttggagactaaacctgagaagtggtcagatgccttcttcaaggggtcgcgacttggccagtacacctgcaatgttcccgagacaattcttcagtgggtccccagtagatatgagctctcagtagtgcagttggttgatacaatcagatgcaacttgatggagatgatgtatacgcgcagggaatattcgaattcatggacggaaccgctaactccatcaaccaatcagaaaattcaggaagagatgggcaaagctcttacacacagtgttgtttgctcaacaggcaatgacggaaacaataatgtgtttgaggtatgcgatggcgctgtcaatgttgtcaacattgatacatgggactgcacctgcagaaagtggcatgtctctgggatcccatgctcacatgcaattgcggtgtttgagcgcactgatcataacccacttgacttctgtgccaagtatttcacaacagagtgctaccgcttgacctatgccatgtcaatcaatccaatacctgacattgttgtggctgctccatcaactgacccatcacaaggcgaggcattacatcaatcaccgattctaacccggaggcaggttggaagaccaaaggaaaagccagctgatcctcgaatcgcaatcaaaagggcggtgcgctgcagcaggtgtaagggttatgggcacaacaaggcaacctgcaaagtccctatcgcagcataaaacccttgccatatgttctcaagtgtaaattatgttgtgccttttgttgcccttttatgaactcgttctagtggaacctgtgcaatgccatcatgtatcttttatcagataacgtgtgaaacataatcttattcggtggttttagctccaagtatggtttgcctagcactagccggtacttttagattgaactttttgtggtgggcagaatctgggaaaaggattggagttttttgtacgttgttatccagcactcccttcctccatatggttgtaaattttgacatccgaagataagttattttatttctgttgaactgtgcaaatctttggatgagtaataatatctcgatactactcttaaaccgtgacatggatgagtaatagtatctcgatattactcttaattcttaaaccataataccaggttgatgcttgtaacaaatacgtgtttagcatcaatttaaccgttttaggttgtatttaaactcctgaaattttaactatttcttctaaatattatttactatcatatcaaaaatacgcattgttggggcattagaggtcatcagatgccaccaatcaacggcttgccctcgcctgttctgttacatcttcagtttcttgttcattactaatcactgctaataattcatgtcaaatgcatcgagtaatatttggttactgttctttgttttttttgggtgatgaggatagttgacattagaaatgttcattgaaaaaaaaaaacaattataacctctgagaaatacatttgtatagaatcttcatattatattaaactaaatactgcagtgtttcggttttactcatcagttaccactcggatattctgagtaaagaaatgacaattagtactcctttcgatttctaatatttagcatcattaacttatggaccatttgtcatttttttttttttttgcataagtcacgcttaaaatacatttgatgataaaacacatcacaataaataaatgatatttccgtgagttagagttggataccacaatgtaaccatgacgacttagccacacggggagatgatggtggtgtggccatagacttgtagcggctagttgctatgttgattggggagcagcgtccataatcatagtcacaaggatgtaggtttgggtgaacctcgttagcaaatatcatgtgttcctatgtcgtcatatggcatgtcttaggtgatcaatgagaagcgattaggaaggttggtcgtcattccgctatatcgactaaattttataacattatattttagaaccgaaggagtatcactaaataaatgtgggtttattaccttccactaatacaccaaaaatctgaatcatgacaacccatatacagcaaagatcataaatccgtgtaatctgtgaaaatcgcatagcaataaatatatccccattaaacacttgctacaatttcccatggaaaagttaaaacctgcctgaaatatcttctctatgtgtagacaccagccagtacacccagcgaaatacaccaccctagaaacagccgcgcggacggacaccacgtgcaacccgtgcgccgcgctcgtccctctcggtcactgacaagtgggcctcaccgcatcggctgggttccccaaacatggcccacgtcgctggccccactcatcctcatagtatagaatcttcatattatatttaaaacaaatattgtagtctttcagttttacttaccaggggtagagatattttaaccagcgtgccagttctccgggttccctgcttccagtatttgcatcccagtagcattttttttggtttgatgccattaacttatggatcattcatctcatccaatttttttatacatatgaaaaaaatcatccttaaaatatctttgatgataaaacaaatcacaacaaataaatgataattgcatactttttaaataagaaagtggttaaatatatttccaaaagtcaatggcatcaaacattaaaaaccggagagagtaataatatgatagtcaagtggtgaaactttatttaacctgggaaaaacatattacacacttctaaaaatgtttatagcaaataattgcaaaactcaatgaatttcttttttttgtttttattagtaaatactaagatattcacatcaaatcaatcaattctgattcctacaaaccattattctgagaagttaattgaaaacacaatatgaaaatttatactactttaagagaacatagtggtgatggtgattctcccccaagggctaacatccttcccatgaacctccactttatattttgttcattgttagtcactgctaacattttcacaccaaaaaccatagtatttgatcataatgaaatcattctctatgtatttttgtagtattataatggtacgtataatagatattttcaattttgagttaccacttaacactaaacttaacactaagatattactctattttcccccaaaatataaggtgttcatattacttttagctgatacttaaattacaggacaagcttagcataatgtatgtgatgtcgttagatttgtattaaaaaaactttttcataatgttagtttcgtagttgttgattgtatactataagtaaactaatgatcaacgtataatatgtcggaaagatgggcttagacagacgtgggaaaccacatgtctgtgattgactagaggctctaggtgaacttgatctgctcaagagtgcttgggagcaagaaatgcaaagcaagtgtttgggtttccccaaggataacaactatacatataaactagagtagggttattactcatcccgagggtctgaactagtatacaaatccctgtctcccgtctaccttatcgcaaactcacgtataccttagcactagtgttccccatactatactaataccgttgtcggtatagctcatcgatagatacacatcaacccgttttacttaccatgagaacacatataccccttcccggggtgctaatgggttctcgcggtaagacaactggagtgcggaaaccatccccttcccagaggctaccatgtggtggcccctaggagaggatgacccacctactcaccttgacttattttggtcaagccatgcctagcattcccctaccagtccttagtcatgacctctatcttaatacaatgccacaacctagttggccccatgtaacaactcatgggacaagcggctgcctctgagcagctttgcagacacgacttcgacccgagccaattgaccatagtagagtctcataagttcaatctttcttaagactttgatacctagacaggtgatgggcatatagacctccccaccagggttcgtatttggcctaggccggagaaacactcacccaccacccacacagttttgatgacttgcattccatgttaagcaaaccggtgaagtgagggactccttagccacgatgctaatcacgtaaaatgctaatatgtcttacttcctccgtttcatattataagactttctagcattacccacatacatatatatatatatatatatatattaatgaatctagacatatatgtgtgcctagatttattaacatctatatgaatgtgggcaatgctagaaagttttataacctgaaacggagctagtatatctttagaatggagggagtgtcattaaaagaaaatctgaatttaatactttccactaatacaccaaaaatctgaattatgactaaccatgtaaagaaaacaccattactccacataatcttgcaaaatcatattcacactaatacccacctgtattacaccagttattcacagcaagcatgcattaattgtttccatatctgagttcatactgatatctactccattaataacccccattaaagccattaataacccagcaaaatattttccaaaattacctctttgaaaaaaagttcatggagttttgcacaggaaaattactgctgctctgtgtacaccagccggagtacacccagccaaaaaacaccagcgcatcaccataatgtgttcatattacttttagctgatacttaaattacagtacatgctcaacatgatgtgtgtgatgtcgttagatttgtgttcaaaaagtactttttcataatgttagttttgtagctgttgattgtatactataaataaactaatgatcaacgtataatatgtcggagagatgggcttcaatagacgtgggaaaccacaagtctctgattgactagaggttctgggtgaacttgatgtgctcaagagtgcttgggagcaagaaatacaaagcaagtgtctgggtttctcgaaggataacaactatacatataaagtggagaaactggagtagggttattattcatcccgagggcctgaaccagtatgcaaatccttgtctcctgtctactttatcgcaaactcgcgtatactttagcaccagcgttccctatactatacaaataccgttgtcgggtataggccattgatagatacacatcaacccgttttgcttaccatgagaacacatgtactccttcccgggatgctaatgggttatcgcagtaagacagctagagtgcgaaaaccatctccttcctagaggctaccatgtggtggccccctaggagaggatgacccaccctactcaccttgactcattttcggtcaagccatgcatagcattcccctaccagtatttagtcacgacctctatcttaagacattgccacaacctagttcctaggtggctagctagttggccccatgtaacaactcgtgggacaagcggctgcctccgagcagctttgcagacacgacttcgacccgagccaattgaccctagtagagtctcataagttcaatatttcttatggctttgatacatagacaggcgatggacatatagacctccccgaaagggttcatttttggcctaggccggagaaatgctcgcccatcacccacacagttttgatggcttgcattctatgttaagcaaaccggtgaattgagggatcccttagccacaatgctaaccacgtaaaatgctaatatgtcttatatctttagaacggagggagtgtcactaaaagaaaatctgaatttaatactttccactaatacaccaaaaatctgaattatgacaaaccatataaagaaaacacaattactccagataatcttgcaaaatcatattcacactaatagccacctgtattacaccagttattcacagcaagcatgcattaattgcttccatatctggggttcaaactgatatctgctccattaataacccccattaaagccactaaaaacccagcaaaatactttccacaattacctctatgaaaaaagttcatgtagttttgcacaggaaaattactgctgctctgtgtacaccagccgggtacaccagccaaaacacaccagcgcatcaccaccagaaacagccgcgcggacggacacagccaccaccaccggggcacgcgcaacccgtgcgtccacgct

SEQ ID NO: 9128 - DNA, 14466 bp, Oryza sativa
gccctcacctgcgaccacgcctcgggcagccccgccgccccgccgccgttcacctccattcctcctcgccgccgctcgtcggtctccctccctctccgcgccggcgccgacgacgacgagacgaggcggaggagcgagcggaggaggcgcaattaatgggattggagagtggagtggtgggagagcgtgggagagagcgggggttttataaaatgatcccacgcacatgtactagtagggttttgtgtcactctctctctctctatctctctctctgtgcactcaccaagattaaaaaaaaatcccctccaaaatctactctactcttttttccaataaaaaatatttatctttttaggtcgatggaaaacggaatggtttatgtgaagtttccctcggtactaaatatgccgacatacgatggtcgaaacgacttaagttacacaaatagaaatagattgattatttatgtatggtttctcggttctaaatatgtcctgtgacagtcgaaacgactaaatttacacagagagtacaaatcggtaagaagtagaaatagactgatttctgtgaaaatttattggttttgagtaggtcatagaatcatccaatggtctaaatttaccactttgtttcaattttggcaaaaccatgaacctatccagcaagaaataattatgcatgtgaaagttgggctccaggagacgctccacagtgcaagggaaaaaggagaaaaaaaaatcacatgatacatgattgggtggtaatgtggtaataacattgcaaagtgtgttgaaggggggaggccatggctgtcgagtggggcccacagtgagggtgtcggtggtgaggagggtgtgcattaaacaaaaccaactggaggtcagtcagtttaatcaaggggtgtgtgtgaggtttcttgtgtggaggggttgagtggttactagtgatgatcaatcaatcttggggttgggttgcttatggctgctgcatgccacatttttagggttcctttggctttagccaaaagggcatatcatgcagcaaattggggagctttctgttactctaacagtgtggaaagagctgtaaatagatgagtgtactacaagggtcgaattcggcattgttcttttgtgcgggaactcgcacgggtgtatgtcatccaggtctccaaacttctgagtatcggaatggttacgttcgagctcttcttttagcaaatccaatgcttagcgttacacattttactacgagttgagacaacacagctgacgtagacatgaacaaagaacaacaagggaagagcatattcacaatgggaggatgggatctgacatcctacaacacattgtgagcttgtgttgcagccatgcatcccatgtggttttgtttgctggttcttctgacccaatctcaaataacaaaatgaaatgcacactgaactgaacaggcctcatgttcttcattcagtactgtcacaggctcacagttgggggaagaaagagacaaagcaacggaatttatttacagttcatgggcttttgtgcaaaatcagccaccatctgcagagagatatacggagggaaagctagacgactcccgccaaaaccgtcgcatcatgtgccagcgcttatcacgtgccacgacaccagtttcatgaaaaaaaaaagaaaaaaaaggagaaaaaaaatgagcaagctgataaatttttttggttgatgagaaatcaatggctgggtttacatgttgaccaaggcattattgcaagcgcaggagatatttctgaataatggtttggtagcaaatggtttgggacatgtacttggagccttcacagtaccagtttgcctagtctagctaggccctgtttttgatcattggatgcatattttttctttgcaaaatcacgagttccacataggggtctttaactaatatatgtgctatcttgcataagggagctacttctagctcttaagagcatcggatgaactaggactaacaatattggataaccgtctgggctcgtcagtatatggtaggatgtcagggttagtcgtcatagtgggttttgcttgggctccaaaaatattttcgagctcattattactcgagcgtatgtatcaccgtttctcgatgtggtttaaataattataaaaaaataccatataaaatgaataacataaataatttgtgtcacatatttttcgaaaaatatgtgatagtacaataatctaatagcaccgtcggttagccaacaaccaattgcatgtcagaatagcttattagagaaaaacaaaaatttatgtgtaaaatttttatatacgtgtgcacccttagcgacttaaaagccaatgaaaagaacacgttaaaaatactttaaaattaagttttacaatttaaattttggcaagggtttggctctttctagggcaaatgatggaaccttaaatcatcttttttttccctaaaattcactcgactatatatttagaccatataaaaatccatttctacaagtaccttacaccatgcccacacaaacatttattaaggcacaaagctaacaactttattatctctcttttggacatggcctacacacacacatacatagtccacaagacaaggcattaagggaggagaagacagtgcttcctccgacccggccacatgcagcttaatttcggctcctcttgccgcgccacaacatgcgcagctttacactacttcactcactaataaaccttccaaagtgatcactaaatcaattaattaatatagttgaatgatcctaaattggctttactaaagtacaatgcgattcaacgaagactagattgattattggtgattaattaattcgttgatgaaacccccaccattggtgacggcgccgattaacaaatcggcttttttctttctttctcccttcttctttgttggtacatggcagcaaaaaccgggtgttttgacggtaaccacgccatgatccccgctgcctaaccctaatgcatgaaaaatgaatggggtttgtgagacctactggggattgtgtagccacatggtgatcgatcgatcgagatctcgtttgggagaaacgccagctttcttgcttgcaaccgacacaatgcaaaacatgaacatgaataattaatggtctagaggactgttctccgtataaactttgtatatatacggtatttagatatacgatatgataatttgtgtaattatagtttgtttatttttattagattcgtgaaattagatttttaataggataaaccgtccgatgtagactaataggataaccgatattagaaacccaaatacgtactaactatgatgattgtacaacggtatcgttttccggccacccaaccatcccgagagtgaaaggatggtttaagatatcatgaaatgtaaacggcgaccgggaaacactcttcgtcgccctagggtcgacgacgtcacaactaactccgccactagtatcactcgcatcgttttctctactctttctctttgtctccgccttgtaaaaaccctacgtagcatctcctcctagatgctgacatcactgttcatgctctctctttagatctgatccggccagcaagaaaccgtcggtcgcccaagtcaactgcaaatgcaaattcagccaatgtgttgtgcaatttatggaaacaccacgggttgatgtggaatattcccttctacagcaacttccctgtcagtaatttactctccataggtatctctctatcttggcacccagtaattaatttatgttttgacagatgtactcccatgccaccaatttgcagtaaaattaactacttggaggtactagctagctagatgatctgatctgatgaatgatgcagttgacatttcactcctatttttttcccaaagttatgtatgagaattaattgttcagttcatggaagcaagaagagaccgacggtcacagcctcatctttttcttatgcttatacttattagctaaaatttaaattttcaacattaaatttaaagttgattttagggtttctttcatcgaaatttatttttcagtttttgtttttaggtcgctaagaacacatatataaaaattttattcacaaattgttttttatttgtaaatatgctatttcgcttattcctagagccgttttcggtgggctatgctgttttgcttgtacgtactaatgacttcactgtaccgtacaacatcgtttataagttccaagttgaaacaatggtaaccgtattttttgttattaatgacagaaactgcagcaatccggcaaaactattggcgatcgagaaggaaaaacaggcaaggaggttgcttgatcgatctgagctgacgaatcggcttctactactacttggctacatataaatgcagacatgaactactgaactgcagaatacttctctgcgagagtgtacctaattaagctgtattcgaatcttctgatcttctctgtaaattataagatacatagccctcttgcgtattgtcgaaaagaaaattctatctcgggtgctctaagcatgttctagcccaatgtaaataagttatgataagtatcagttgaccccaattgcagtattacagcagcagaacaggaagctctctgacgtcgagctccgaaacatgtgatcttgaacaattctttagctgaagattaatgtaagtcaaagaaagcgattaaacggtacgacggcatcgaaaagaatattgagttgtatgcaccaaccagttcggttatcccggaaaacttgaaccgacaagacaaaaaatgacgaacaaaacgttcaaatcttcagagatcgatgcttggcattgttcttcctccgatgcagtgatcgacacggcgtttctctgtcgaaaagggatcgatctaaagaagacaagcagagatgaacacgacctgcgaaaggtgacaccggtttacacgacgattcgctgtacagggtatatatctctgcatctcgatcgatttcaccgagtcacgaggctgtactgctgctgctggttcttcgctttggatcatcactgtcagagtctttggctagatttgcaagaaccaaagtgtgctctgacagcagtgagtgtgatgatgatgatgatgatagtggggatgagtacgtactgtatttacacagccccactttgtgcgctgcctgcaaaattccaggaccaagaaacagttgcctgctaattgccggaatttaatcgctcatttaatcaggcaggcagcacggcacaaagctgaccatcttgttcttgttcttgcaggtcaaacagctagtaaaaaaaaacactgtttttttaatcctgaaactctgaaaggctcggtgtcacatatacttggtgctgctaatcttcagactttcaggggaaaatcatgaatggtaggatgtgagagataatgctggattgcagatcaaagatgcagtgaaagatgggacaaggaaagttcagaaaagatcaaagagctttattctttccacatgaaagaacaagaactcagaccaacctagtactgtcactgctaaaaatcacgtgcaatgttctactaagttataactaacggtaaatacgatcaactgtagctcgtaaagaaactctgacgaggcagtaaacatttgcatatgcagatattactttcacctgagcacctgagctacagcattgtacaagcaagaacctgtacagggtatgctatgcaggagtggtcctgaactgtatgtatatatgtagctattgttctgcagcttctgaatatgtaccttggagacccagctccaccgtttgcttattggcttcagtcacagctaaaatttggattttaaagttgattttaatatttttaatcacaatttatttttcaatattacatttaagtcgataaaaatatatatatgtaaattttatttgtttgtttttttcacaatttatcaagtgtagaccaaattatgattaccagtagcagacataagcctagagcctgacccctaggtttgtctccaaaactcctactaaaatttatcaaaacttggcggagattttaaaaacacaaggtgtataagcaagttgagccctgctactgaagattttctgattttctggctccgcccctgatgatgatgatgatggtgatggatgacatggtgttggacccaaacagtgtgggctacaattaatacatatgtaatcagcttcttctaggttaattagagtggacgcatcaggaggaggaagagaaggaatcatggcacatggaagcacaggccccggaaatgccagatgccatgcgcaaagcgaggagatatgcatgagcactactatgagctttttggtcacccttttttctcgccggatttttgcggatacaaccttctcaaaaacctgaatttgcaaagataggcccctctcgcaaagagggaaatggccaaggggccacttatggcatattcgtgttgggtgctttcgcatcacttcgcaggtgacactgctgtgttaagcaagcacaatagttaagcctggggcatgtaagcttataggtaatacacgtacgtcatctaaagacacgttcatagaacaattgaggtattaaaagctttaactattaagtcaccaaaataatttttcattattcgcacttccttttacccacccacaagtaacaattttttcttttatcttaggcttagtcgtatttgtacgagcctagtatagtctcatactccctccatcccataatatagtaatctagtactggacgagacattttatattacaacgaatctggacagatgcatgtccagatttgttgtaatatgaaatgtcgcatccgatcctagattgttatattatgggactgagagagtagacaatacgtgttatctagagactcattcatataacagctgtgacaatcaaaggctctaaatattaaaccaccaaaataattttaattatttgtccttccttttgcccacatcacaaagaattttttaaaatcttaggcttaagaatcgtattgtatggctactaggctcataggcaatacacttcatctagagacatactacctccgtcccaaaataagtacagtcgtggatatccgtgcccaatgtttaaccgtccgtcttatttaaaaaatttatgaaaaaattgaaaatatttagtcacatataaagtactattcatgtttatcatctaatagcaataaaaatactaattataaaaaaattcaaataagacgaacggtcaaacgttaaacgtgaatagtgcaaaactgcacttattttgggacggatggagtagtcatcatacaagacaatcaaaacctctaaccatttagcctccaaaataattattaatcaactgtccttccttttacccaccctcacgtagcaaaattctttttatcagccttaagagtcgatttaagctcaatataaatatggagtcaaaatacaagttaattgttgttgtacatattctagtatattcttagggggtgtttggttcgagaagaaaaggggatacataaattaaacctaatggtagtgggaaatattgcgaccagagagcgagaggagtgatgcacaagggcattatacggcatatttctctttcctgaaaatgattcttaaaagtaagatttgtttttaggtacatgtgagatggggccactgtatgtctgtaggcagtgtaagtggcataacatatgcatgatgaatgattttgataaaaatattgaagaattttgttagtggccaattcaacaaactaataatgggcctcactgtagtctcttcggccctgggctctaagaaacagtagtgagtcttgtcggtggatggcccacaaaacaggttgggccagttgacctccatactgatacagcagaagtaacttctcaaaatctaagaactaacttgttgatagctagattttgagaatgtaaaagaaagaactgggtttttcagtttatacgttctagtctaagttctagattttataactaaagattttaagaatctaggtgaaaatcagcattatttggaagagttggagatttaagaagaagctatagctgctcctctaaacatggcctatacaactatgtttgacaatatactccctccatccaaaaaaaaaacggagagggtactttccaaaaaccataggccgtcgttgttgtgctagtacaaattcagtaaaaaaccataaattttctccacatttcaaacatggcctagcttaatttcccaattttctggtgcacgtgacgtaagcgatttcacagctttcatatctcgacatttcgtcaaacacatggtttgcaaatttcaacaaaaaaataaaagtagttttttttcttttgttattccgtcatttcgtcaagcacatggcatgcaacattcaaccgaaaaaaaacacacacaaaatttcctcttcacaacgacgacgctactcaccaacgcgcgagagcaacgggctgatcctgccattgttgccacctacgagagctcggattccatcttcagagcgccttgagcatctcctcggcgctgctggtggtgaaggcgccgccctcctcgaggttgagcaccttgacgacgccgtcgtcggcgaggagcgcgtagcggcgcgacctgacgccgagccccatgggcttgtcggagaggtccatctcgacgccgagcgcgcgcgtgagctccaggttgccgtcggagaggaggagcacgtcggcgtcgccgaggcccaggctctccttccacgcgcgcatcacgaacgcgtcgttcaccgacacgcaggcaatggcgtccacccccttggcgtggagctccccggccttctcgatgaaccccgggaggtgcttctgcgagcacgtcggcgtgaacgcgccgggcaccgcgaacagcaccgccttcctgcccgccgtcagctccgccaccgtcaccgtcttcagctcgccgtccgccgggtcgaagtaggacagcgtcgcgtcggggagcttgtctccgacggcgatggtcgccaccacggtggacgccgacgccgccgacctccgcgccgctctcgcccccgcggcgcggacgcctgttgcgagggggcgggaggagaaggagagggagaaggaggaggtgatgaagcgcttgccggaggtgacgctggcggtggagagggtggagagagctgctgcggtgggagcggccatggagggcggcgacggcgatgtgttcgaggaaatgcttctctgttgggatttggtttgggagtgcgcggcgcgacgcgagagataggaaatagtgggatttggttggtggggtggtgatggcgaggcggaaggaacgggtggacggcgtggtgttgcgctggattaggcgaggcagagccggcccacgggtctggtagcgacggcccaggactacagtgtcgggcctatttttgttgggccgaaacaggattgttcggcctgccttggtgattcgggttgggcctatgaaaatccagcccagttttccccgtttgactctgatggagttgaattttttttatttttaattttttttattaaaagttttacaaaaataattttctattttgaaaattgacggaagtagtcgcctaccgccctctgggaaggcgatttttaaaaatcgccctcccagagggcggcgaaaatgacgtggcagacggccgttcgctctcgggcgacggccgtcaacgaaatttgcaggcggcccccttgccgccctccgcgagggcgattttgtactgtgcggggggccgcctgcaaatgggcggcgaggggaggcatggaattttgcaggcggcccccttgccgccctcggcgagggcgattttgtactgtgcggggggccgcctgcaaatgggcggcgagggggcatggaattttgcaggcgacccccttgccgccctccgcaagggcgattttgtactgtgctctatatttttgtataaatatcaatagttatcaaatctttttatattgaaaactatacaagattaaaatctccaagactggtaaaatacaattttattattttttagggcatatttggattgttaccgtacaaatattttgttaccgtacaaatattttattaatttttagggcatatttggattgttagtgccaaatttttcttcacgaccaaatatttggtaaggtaaaattgcatttgatcatatttggtttgctgccaaaatgtaaaattgtagtgaagaatgttctacataatctcaaatctagattacgtattaccaatgaataggcttccattttcgtgtgttgtgtgctagtgggaaagaagatatgaagaggttgccttcagattgtcaattatatagcgtcgttttcactgcaatatatgtgaactcaatgagatacattattcattagatgtgacaagacgatcacgcgtgggcgtgattcactttatgtaaacaggcagcgccgaaagttgatagtgataactcgagctgccgcttttcatgtgtgctgttgtggactgtgcgcgctactggatctgacactaccgtgcagcgccgaaagtgtgttgtcgtgagcataagttgttctagcaccatatgaatgaaaagaactatgtagacgagacaaacacaagtagtactgcagtagtaatagcaaaagtagtactgctttacaagtttgtaagccaaaagaaacggtcacataaggactgaagaggtagaacactactgacgaggcctcttacccctgtccctcctaccctgcgccctaatgtgcccgtgggagtacgtgagtcggtccgggggtacggcacggccaacccgtcctgcctgtacaggtgtgacctctggctgctcctgagtgtgtgcctctggagctcctccaagctgagaggagcctagtacgtcgtggtggtctgcaccgtgcaagtcgtcgtcgtagaactggctagtaggaccagtcctaccggcgtgagacgaagaggccccagtaccgaagatcccggctgcaaatcctgctggacaaggaccatcagtttcgtacaggtatttaacagtattaataaaaagtaaagtaccgtgtgggcgagggatcgacgctccgtgagaggaagagctggcgaacgcgcccgaagaggtggcgaacgcccctgcggagctcgtggaagcgccggtcgtgcctgcgaacgcgctcgaaggcagacgaggtcctgcgatgaggaaacgtgcagttaaaacatggtgacataatcgtgcaaaagctgaaacaaaaatgaactaatatctaggctgaactgtaccgtgcgaaaccggtgctgtaggtcgcactgatccgaagctaggggcgctcgaaggcaaacgaggtcctgcgaggatggatcatcaagttacgacggggtgatgttttcgtacaaaaacagaaacaaaacttaagaaacctctgggctgagcagtaccgtgcgaaataggtgccgtaggtcgaggtcctgctccgacggtaggcgcgcgaggccgtggttgtaccggaccagctggaggtacgacgtccacagcgctgcgacaggagaagacgcgcatgaccgcacgcatcttctcctgcatccggtcgaaggtcaccctctgctcaacgtcagtcaagtgcaaacctctgttcaacctcacttggactgcggtgatatcggcactgatatcccgtgcggcatcagcctatgcaagatggaaataacaaattcagtagttgtcctatattatgcaagataaatgaaataattgtaagaagtaatacaaattggatgtaccgccacgaagtagtctcggtcacggtgcgtgggatacgcgtccgtgacagcggcaacgtgcggctctggggcgtctggagtgaaggtcacacgcgcacgagtgcgaggaaggtaccaacgaaggtagtcacggtagttctcctccgtgtgtgggaagagctcgttgatcacctcctctgtagctaacacccagtcgtcaacgtactgctgtacacgtggagcccaaagtgcgcctgctagctgtccccgtcgagtcaacctgtgaagagaggtaaattatatggctcgatgaagtaattatcataaaaatttagaaatgaacaatccgaactcacgagtggtcggcagggaggacggtcggctgcacgttgcccggaaacacctgcctaagtccgaactgtctcatcacacgctgcgggcagtgaggctcaacgaaaatgtcgaacaccatcggcaggatggtgagccagtaagcctggtcgcgtgtgcacaaggacgaaagtcctagcggtgctctcgcagcgacggcctcttctgtgtacggctcccagatgacgtcgctcggctggagacggtcaaactcgaacacgaagtccgggtaaccacgtctcacctggacgtgagcgtaacgacgctgcaataaacatgatcggaattagacatgttatgtgaagaaaaaaaaagacgactgataaacttataacgcagcgaagttgcactaaccccacgtcgacaccagtaagtccccatcgtgggaccgtcctctggccactgcgcgctgcgaccaaccccatagggtgcgctgtccaccactggtcgacctatggcaaacctctcggctgcccaaagctgaagcaacatagggcagccagcgatgatcgctcccgcgtcagtcttcgtgcacgcctcacagagggcacggtacgtggctgctagcacggcagaaccccagctccactgcggcacgtcctgtggctgagcatccgcgatgcaccgtgcgtagtggaccagccggaagtccacagcgtgcccgtgggtgctagtgaacatcacccacccgaacaaccacaacaggtacgcctcaagggagcgtcggaccgagtaatcatcagcgtcagggtgtagaatgaaatgttagtacaaaacactcattcggtcgcaaataagcacgtatgataataacaacttatttacttacagtgaactggagcaaccaagccttgctaggcccgactgtagagtacggaggaagggtggtggtcggtcctaggtgtggaaggcgcatcacctgctcgaagcgcgcagtgatatcctccttccacccaaaaacaccgtccacgggaccaactgctgctcccgccagcggtagcccgagcaggtacgacacgtcctgcagtgtcggagccatctccccacagggaaggtggaacgtgtgcgtctcaggtctccagcggtctacaagagcggcaaggagtgaccgatctgcatcccaccgcttcgctgggtcacggtcgtccgccgccgcctcaacaagcctacaaagtggtagaaggcctgccgcacgcaacctgtatagagcaaacttcaaacataagtacaacacaaagcaaagttgagttgaaatgtgaacatacgcgtaccaaggaacgtgacgggggtcgacacgcaaccactcgcgcgacgtgcgtggacggaaggtgccgagctgtgcaccctcgactgctgacaggaacgagcggtggttcctgtcaatcccacggttcaacagcgccggtgtgtcgtacgccatacctgcatcaaataggttgatcagaaacatataaataattagttcaacataagtaattagttcaacataagtaataaatgttgaactaagcgaattactaacacatattaaacaagagtacaaacaaacaaaagtgtttactccgaacactcatcacgataacattatgatacaacaccgaataattcgcaatactactagtacaacaatagtcggaggtactcattacaacaacattgaattgaaattacacgatagaagtatttagtccaaacactcattacatcacaacagcattttatttcctaaatcgaaagcattgttacaccatggaatcgcctgctgcggacgacgccttggccttgcgcgcctgcttgttgttccttcaccaggtggtcgcctaccatcacttgcctatccagatggactagcatctgcgccgcttggaacttctgcattcttcgggcatttcttgtaagtatggccgcgcagatcacacttgatgcagcgtaaagtcctcccacctgcttttgactcatccatatcatgtctgatgcgtctagtttggcgtcgaccctttttcacccttaacttagatggatctggaatataaaaaacttgggcactcagcgttgtgtaagatcctgagatcccgaacccatatatctcctcactccatgtatgaaagattgcttctttcctgaaataatttgagacgtacacattgggagatatgccacaatcaccggcagcagcaagaacgtgtgagcaaggaaggtgatgaagcttcggcttcatacaactgcaggtacatccaccat

SEQ ID NO: 9129 - DNA, 11188 bp, Oryza sativa
cgcaggtgaggcagtactggttgcactcgttcctgctcatgccgcggtgcgccgcgcacgcctcgaagaaccgcgcgccgagcagcgaccgcagccacgccgggtcccggtccgccaacccagcagccatcgccgggtccgcggcgccgccgccattaccgacctccaaaacgaaaaaaaatgcagctccaaatcaacaccgcatcgccggagacgaagacgaagacgaagacaagaacaagcaatgccggacaaaccattgctcgatcttgctgccaagcgactacaaacacataccttcggttaccactgcttgctcgtcggagaatcgatcgatcgggagagtgaggatctgtgccagattcgattcaagattgctccatatttttttttcttcttcttgatgagattgggggaggagggggggattgaaagggaaatgaaatgataaacacgggaggacagtggctggcggctgggtttacacacactacggacgcgagcgttttagcataatgcgattgtttctatagacggatggcacgagatgcaggagggaggggtagcctctctctctctctctctctctctctctccgtgtgtttctcgatttttatgtatccatttttgtactggaattcatcaatgtgaccctaatcactaggcaaagagattaagagaggtaccaccagggttaattgtcaaaactagccatggcacaacccacacaaaccacaagggccatcaaaatcaaatcatagatgaaggaaaccactcaccactgaactgaacacatatgtgtaccttgcatcttcctgtgatcacaaagaattaaaattaaaccatacaaaaaaatatgttgaaacttagaagtatagataaacatatacgacacacggaaccaactgcaggatctcttaaatcaccatcctcaacccgataatatggaatcagatgagatgttgccattcggcaaagttttctagggaagacaaaattcaacaaacagacacccctaacctgtaaaaaacatacctcataagcgttgcgccgagtagtaagccaggattatataatgattagaagagacttttcgtcccatggggatcggtccagtaccaccgccgccgccaccaccaccacgggatatctcatgaatctatccgctataacaagacgcgcttagggggattagccctcttctcttgtgcgacacgatgaggagtacaccaaagaagagagaggagccaccatcaaggttggtggcgttggcaacatagtagactagttatgcgttcgagtcttccgtatgcggcaaatgctttagatcacatgcatatatataggcgcacacagaaccgactgatctaagtactgggccagtgtaacctatattgggccgcatataaaagtttacggcgtggatcgatgcgtatcatttaattagatgttggggcgcatccttgtacgtctatttttttaatttttataattttgtcgaatactatattggaaagcaatggtcgaaaaccatcatagaggacaaatatggttgcccttttgtggagagaacaccatgttatatagttcttttcatgcgtagtcttaccttttggtgatcaattatcaatcatataactctattgaattttggtaaaaaaacaactttatttgaatttcaatcatgttactaaaacaaagaaaaatatagctctatgcttaaaaaaatatcaatgcaatagaccaatagtacaggctacagggcatttgtgtcattttgcaagaaggcatattaattaaattaaatcaaacactatataaatgcactattttattcctcaacagtttgatgttagccataaattcttgagcctgtatcttcatatagccatacgtttcattcattactgagtagatatattcatccacccctttgaaaacccaagcaaaaaccgtgtttcatcgcaaaaaaccaaaacaaaattactccagtaggagcaaaaaagaaaaaacaaaattactccagcaggaagcatgaggtttgccgttttgtccctttctgttactttttttatttttttagaagggtacaactcagaacgcatacacacgctagaaatgagattgcactcataccacgacacacgcacacacgcacgctaggaatgagattgcactcataccacgacacacgcacacacgtgtccctaacacacgctaggaatgagattgggcctcagtatatgggaaacgtgcagtccacgacacatgcacacacttgtccctaacacacgctcacgctaggaatgagattgggcctctgggcctcagtgcacgggaaacgtgcagtccacgacacacgcacatacgtgtccagtcccactaaacgtgcacgcgtgtatacccccggggaaacggagaaaaacccctgtgagacacgtgagttgcgatcccaggatcgaacccgagcgggctgctcgctcacctggcgacgcttgctcggttctctccttttctgttactaggtggaatgaatgatcgctagagtaagagcgcccaaccgttgactcggcccggcccgataaggccttgtgaggccccaatccgaagcggattggattacgtgcggcccacgcgatctctcggcccatcaagcactccacctctcaccaccgcaagtccgtaaccaactggagctcctcctcgtcgtcgtcatcgtcctcctctccggctcgatctcccaccgcggcggcgactccagatcggcggcgaagcccaggatctccggcgagggcaggagaatgtcgagataaaggtggagtagtcgagtatcgcgtaaaagaaagagaaatctctccccgtctcgttgtctcctccgctcctcgcgccgccgccaagacgagtcgcgggggaggggcggcgatcgagcagagcaggggaggggaggggatcctggtgagtatccatccgcatcctctttctgattcatctctctctcccaccccaccgggactacttatgtctggaattttgcttgcgttcgttaaccctagtagcttctcttctagatctggaaggagctcttctcctcctccttaatttgagagccctaaacctctcttaatacaactagtagtaacagtttgggggttcaattcaactcaacccccatgtcccaagttggatccacccctgttgctattagggttacggagttggcaaagataatatggtggcatatgtttgcgctagagtcgaatccctttcgcaatgtgcactagcatcgaactccatgaccaggagcaagaaccaagtcattatcttgaatggggataatatcttacattctgaaaaaaatagtttgtgtgtttgcacactctgataattagatttgcttgaggagcaccttaagtagtagtattccacatagtgctaagtgctgatctatcctattgaattgcctgctatattgttttgagaatgaattatatgtttatgattatgctttagtaaaatttctcacttgagttgcattgttcagggaggagtgaccggagggaatgcaagacccaagaggtatgccacgagatgaattcgcaaccccgaagacgcacaagagaaaggtcgtttcccgccccttgcctcccagccaaataaaagctgaacctgagctgctgcggagggaggttccactcacatccggcaagaccaagaaagcccctaagataaccttcaagaatgaacctcgccattcggctccgcaatctgattggggaacccccgattcggtgccagagttcggtccagctgatgaatacagagcgttacggaagaagtacctgctgctggaggatgagaacggtgagctggacaagcaattgagccaggctgaagaggaagccagcgttctcgaggatgaaaagtttgcgctgctggatcagcttgttgtgttggaaggccttgtggatccttcacagatgcagccaccgagaaggctgtgagattctatgcgtgttcgttgcctgttcatagtccaattaagttacctgttactgcttcctgctagatatgtaaccaattgtaatggaagagcaaagacatattatatcgtttattatggaagtttgaacatttagagcacttgtttggagttctttttgtgcaatatgaaagagtgctatcagtttaactgaaatttaatcgtggcaaaacagaaagttcagcaagcatgaagctttgcgcctttgcctcaagtttgagttatgcttttaagaactacgcaactggtcttggggaaaaaagctgaacaatttgtgtttcatgtgatttaagaaactaaatctgttcatgtgaagatcaactgatcatcacaaacttctgcgtaatgtttgcacaaacacatatactccagcattaacataaaaaaaacaaaactcattcatcacggcgaattgacgggccacaattttaacagtatgatttctcaaaaatctttctacaatagcattgtttcgataaccttttctaaccaaataattaattaacttcataatctacagtatattgaattaatctatgaatttatcggctaattagctgacaagctgaacagggctgagactgaatttcttcatagtgactctgccgtgtgagtgctgacgcaatcaagatccaacaattttaggcccacataaactttccaagcccaactcatgaaaagcccaattctttttcaccttatataaacccgagcagcagcagcatccgcctcagctcaacggtcaaaaatctcttccaatttgaatatctctcctcccaaacggtcggctccggagcggcgcccggacgaacacatggcggcggcgatggcgacgacggcggcggcggcggcggaagaggcggtggtggcgctcgacaaggagactctgatgctgatggggtgcggcgacgccccgccggctgcgccgtgcgcggagtgggagacgttcaaggagaacgtgcggccgctgaagcgcggccgcaacgtgggcctcctcaaccgcgccctcaaggcgcacgccgaccccgcccagcgcgccgccctcctcgccgcccggaggtaccgccgccgctcccgtcacccgcgtctctcggttcttgggtttggtttgctctggatttcttgatttgggggcgggtctctggtaatcttttttttttcgtcctacgtttgattgatctactgattcaggaaaatgatcgaggcaatcgacgaatacagcggcgaggatccgctccaaccatggatagagtaagcaatttcccctttgtttcattgattcgtatactagtagtagtaggttgagccgaaagatttgccatgtcggcgatttctctgcggtttccgcaagcttgctgctcatggcatgcctttgtctgcttaatccacacgcagctgcatcaaatgggttcaggagtcgtttccgacaggcggggattgctccgggttggtggtgatctacgagcagtgcgtgcgtgccttctggcacgacgaccgctacaagaacgatctccgctacctcaaagtgtggctggaatatgtgagtttcatgaattcaggattggttctgaggtggattggttggattggattggattggtttggtttccttttgacatccagtttggcttgatcttaatctgtatgcaggcggggaattgtgctgattccgaggtgatattcaggttcctggaggccaaccagattggtcagagccataccaattactacttgtcctatgcgtcggtaatggagtccaagaacaagctaaagaaagctaatgagatttttaaccttggtattgccaggtgagaattttatgggggattggtagtttagtttcttcagatatgagaaaggttgcggattttcttcagtgctagtctgctagtagattattttttagtgataatagataagttccttctaaatttccatatagcctttgacaaagaattcctgttctagatttgaagtctgttttcttcggatttttagtcaacaaacatatagtcttacatatccccatttactgttttagttctatgaattatagtaactaaaatgcattaaactaatttggagtaagcttatgaaccgttgtagctgaaaacttttaccttctctatttgtttttggagggatatgacttttcttgccactctacctataccttaatacctaaagcatacgatttatgcatttgtttgactgcaaggtgtatagtcttccatattcccactcaccattttagctctatgtattataactaaaatgcattaaactgattgtggagtaagcttatgaactgttctagattaaaacatgtattcctgacttctctattttttgttggagggatatgatataatttctcaattttctgctctacctacaccttaatacctaaagcatactatttatgaattttgtttgatggaatggtgcatattaaaccgtaaaattctttggcttttttttttttggtcaggaaagcaaagcctgtggagaagttggaaactacatacagggcatttcttcagagatcatccaaaaagaaggcacatcctgaggtgtacataggctgatttagtaccctatttttaatctatattccactgcccactgaatgaattctattatctgttgaaacaggatgacacaactactgatgatcatccagtacgcaactttgggactgtcttgaaccgtggtgaaatcagtaagtttgctgtgatggtatgattaacatcaatttcaagtgcctggctgggtgaactaatgttgcattttgatgtggcaggaggccagcatgcagaaaactctcacctggtgaaaactctgcaaaggttattacttgttatacgcatgcaatcagtataaagaaatctagatgaacctggaatttttttactggtgttgatactgttgcaaatttgcagagttgatgtcaataggccacttgcagtttacacagatgagaattcgttacctagtcatggccttgctagaaccaggagcaacaacacggcctggcagacccttggatcacaagcagatcggaacaaagaaaataacatgaggcctgctaaatggacatcacacaaggttttttttttctcccctaagccactagaattcttcaaaaggtccctttttgcgacatgtctcgaggtttatcggttcagtaatgatcaatgaactgatgatagtattgcactgaacaacagattcctcagaaggttggatcgagggcagcagttcagccgactcgtgtaagctccattgaagtcttcgtagatgacgaatgcgccgagtatgctactgtgcccttaagttaacagttttgaatagttctttaaaaagagtaactgtaaaaacgtataatttttatataccttcctttgattatttcagggaaccagttccccaagtgccaaagagtacaaaaccatctattctgaagcttaggcaagcaacaagcagaaacctcaagcagtaagaatagttcagcttatattatgtttccagaggttctgttcctttctcatttttttttaatgtacacttgcttttttttaacagggaaactgaactgcttatggagaatcctctgcggaatttccctctaaccagccttagataatcaatatttatgtggtgtaatgctgtatttcgatcttcttttaccaatttattgtttgagtgtttgtgacattatgctgaaataagctttagcctctaaagcttaggcaggcaaagagcctttttaggctatccatgagtgttgtaatattgcacaataatttgattgataaatcctcgacgagggttgggggtgcttaatttggttggatgctgataaacataagtgatgctaatttttaatggtgctctgtttttttttcttttttgggctgaacaaactgaggctggaattgagtaaaccttccgggaaattatttcctttcaaataaaaatcataatgcattagattctccaaataattcactataaccccatcaggtcacaaacaccaaaacgtgattgaaaactgtcatgcaagtggatccatgacagtgtatacacaagatcaggtgtgacaacttgtttgcagacacagacatggcaaaaaacatgtttgccatggatagatctccaatgctatttttttttctcaggtcttatcaaaggtccccattgccagcataaattacggaactttaaggctgtgttcggaatcggacattcccagcgtgtaagtacggaaaacggagcggaaatgagaagagaagattagatatgaaccaaagcagggaaaaaaaagtgagagtagatgaaatattactccacttgatctaatccagcatagcaaaaatgatcacctcccagaacctcaaaagttgatgaccctattggctaatagcactcacaacttcaagctgcaagctgagagtatagtagtgacaacacactgggtggtaataagtgagagagagagagagagagaaaaaaatgaggttttgattatttgatatcctggcccactgtcacacacttggatggtcccatatgttattgtcacatgtgttaatataatcaaagtgataacggataaagcatcaaatcatcaaagtttacaacaataaatatcatattgcccgtacgttgcaatgggatttgaattaaagaaaattatcgctaacccattattactatcattttatgcatatatttgttaccaacatgtaggccctttagcttcacattatccattttcttctactagtcacaggccccatgcgttgcaaagggatgagatatcaacatggttctattttttcctcttacaataagggtttgtttagtttgttgccaaaattaaccttaccaaaattcacaagatttggcggaaatttgatttgcacctgtaaatcacaaatttctagctaattcacttaattgctaaaataaaccttaccaaacatttgccattgccaagttttagtaagataacaaacttaacattattttaccattgcaaccttaccaaactctaccaaaattgggcaattgtagaacattccactcacaaaaccataccaaaatttggtaaggtaccaaactaaacaacatcttaccaaaatattagccacaaatggtaaggtttgttttggttaggtgcgcatttgcttgtgtggtaattttatcttcttatcgaagagttaattacgtgctgaggaaccctcttgtggctgcagttgaagccaatctacaactctacaaggcgaccatactatactatggatggattccgagagtgaaccagacaaatgaagaacaaccagctgccagtccaaacacacaagattcataagattcatgttatctagacccgctttaatttgctttcgaataattaagaggaaagcgtccgatcaagtacatgggatacgaaaccacttaattaactagcgagttctcaatatatcatattccttacatttatattctttaagtgtgttctttgctgttgcaaaaaaaaaaaattctagttatgaacctgaatattaactcgggtatgtcaaagtttgtagttagagatggagtgaatacataataacaatccattttcctcacatgtatattttattttcataaagaaagctgccctatgtatgtgcttattcgtttgtatgattagaatagcgtaaaaagttttggaaaaaaagcgaaagctggtgttctttacttagtactctctcaatcggagaaaaaaaaatcaaattctagttatgaacctgaatattaactcgggtatgtcaaagtttgtagttagagatggagtgaatccataataacaatccattttcctcacatgtatattttattttttaaagaaagcggtcctatgtatatgcttattcgtttgtatgattagaatagcgtaaaaagttgtggggaaaaaaagcgaaaggatgaaaaacaaaaacaattccgttgccgggactcgaacccgggtctctcgggtgagagccgagtatcctaaccagctagactacaacggattttgctcaggcagggcttcattatatgactaattttagttgaccgaaaacacacaaaaatcaggatttgttagtttattgctaagtgtggggtgattgggtatactactacggtaaattccctcgcttttttttctggtaaggaaagcaaacctagggttaaaatgcaaaaaggctattattttttacccactaacattttttttagataatggttttaccgactaacatgtaatcgatatatataaaaaaatagaaatctatatgaacctggaggttcttgactgtggtgatactgatgcaaaaattctagaattgatgttgaaatttatataaacacctgccatatatacccttggaacacaagcatatcggaagaaagttactaagtgaggcctcctaaatggacatcacttgagattttttttttcgttcaaggacttgttaatgattttgaatagttttttttttaaaaaataactttataacgtactccctccgtttcaaattatagtgaaactgtttcaagtttaactaagtttgtagaaaaaaaagagtaacatttttaacccaagagaaatatattatgaaaatatatttaactatagatttaatggaactaatttggtgttatagatattaccatatttatctacaaatttagttaaaattgaagtggtttgactttgaccaaaattaaaattactaatagtttgaaacggagggagcacgactttcaatataccttcctttttcgttaattttagggaaccagctccccaagtgccaaagagttcaaaaccatctatcctaaagcttaggaaagcaacacgcagaaaccccacgcagtaagaatactttaacttattatgttaccacaggttctgtttctttgtcagtttttttttaatcacacttttttttttaacagggaagctgaactgctaatggaaaaatccgctgcacaacttcccttttaagcagcctttgttaagcagtattcatatggtgcaatgctgcatttcttttactgacttgtttgaacgatgcgacattttgccaaaataagctttaaacctct
